United States Patent Application Publication US 2014/0199313 A1 - sequence listing, part 11

SEQ ID NO: 49343 - protein, 577 aa, Prochlorococcus marinus subsp. pastoris str. CCMP1986
MKETSPKSNNGTIVDNNENFNIEFDPISDALAAIRNGECIIVVDDERRENEGDLICAAQFATPQQINFMATEGRGLICLAMQGEKLDALDLPLMVDRNTDENQTAFTISIDAGPENNVTTGISAEDRAKTIQVAINPSTKPEDLRRPGHIFPLRAKKGGVLKRAGHTEAAVDIAAMSGLYPAGVICEIQNPDGSMSRLPQLKQYAKEWGMKLISIADLISYRFQNERFVYRKSDAILPSIFGNFKAYGYINELDGSEHIALVKQKSNKLSEPVLVRMHSECLTGDAFGSLRCDCRPQLEAALARIEKEEEGVVVYLRQEGRGIGLINKLKAYSLQDGGLDTVEANEKLGFPADLRNYGVGAQILTDLGIKKLKLLTNNPRKIAGLGGYGIEVTERVPLVICPGEHNSEYLNVKRQKLGHMLEEEKLNSIDIDPYIAIFLDGDYKSIDLVPIKNKIIEFCEKNKINIMLESSPRLLAFWNRPKLVWKILHDKNREDFTINDNEINKIEIFIKFLSEYNKSSKVGIIVSKNIQQALHPKNSIKLKNTKFSIKNEELHSSTRKFNLDKETFSIIFDKKLS

SEQ ID NO: 49344 - DNA, 1905 bp, Prochlorococcus marinus str. MIT 9313
  CDS (1)..(1905): transl_table=11
atggaggtggggatggtcctcaagcaatctgatggtttgaagaccgccgtagcccgtagcgccgataaccgctactcggctgcctcgaacctgagaaatgtcagaggctggagagcgagggggactttccattgccttcatcggacgccggctgatcgtactggtgtcgataatgaacccagtacgttcatccctaaggccctgaggacatctcctatacccgctgaatcggtcgagatccgcttcgacgaaatttctgatgcacttgccgcgatccgaaacggtgaatgcgttgtggttgttgatgatgagcgcagagaaaacgagggcgacctaatttgtgctgctcagttcgctacgcctgagcaaatcaatttcatggccacagaggctcgtggtctgatctgccttgcgatgcaaggcagtcgcctagatcaacttgacctgccgctgatggttgatcgcaacacagatgccaaccaaacggcttttaccgtaagcatcgatgcagggcctgaaaaaggggtttctaccggtatttcagcggaggatcgagcgcgcacgattcaagtggccctacatccggagactcgtccaagagacctacgccgcccaggacatattttcccccttagagcgagtcaaggaggtgttctcaaaagggctggacatacagaatccgccgtggatttgtcacagctggcagggcttgctccagctggcgtgatctgcgagatccaaaactcagacggatcaatggcaagactgccgcaattgcaaaactatgcgcggcgttggggactcaagctcatcaacatcgccgatctgattcgttaccgtcttgagaacgaacgctttgtataccgtcaagccactgccgatttaccaagtctctttggcagttttcaggcaatcggctatttaaatggtttggatggatcggaacacattgctcttgtcaagggcgatccacgaaaactgaaagaaccagttttagtgcgcatgcactccgaatgtcttacgggagatgcttttggatcactgcgctgcgattgtcgcccccaacttgaggcagcgttagctcgcatcgaacaagaaggtgaaggcgtggttgtttatctccgccaggaaggtcgcggcattggactaattaacaaattaaaggcctatagccttcaagatggcggtctagacactgtggaagccaatgaaagtttgggtttccctgcagatctgcgcaactatggggttggtgctcaaattctcactgaccttggcatccaccgtttacgtctacttacaaacaacccacgcaaaattgctggactgggtggatatggcttacaagtcgaaagtcgtgtccccctagtgatctgtcctggagatcacaacgccgcttatttagctgttaagcgggaaaaacttggacacttgattgatgctggcaaatcagagaataaagctccagaagttggaccttttgttgtggttgcctgggacggtgaggtgaacggagagacgttggctaagctgaggacccgtgcacatgattgggccaaaagcaatgaacttgagctcatagcagaaagctcaccccgtctacttgctctatgggatcgccccctttttgtatggcgtgtatgtccacgagtcaaaacctcttctgaggtttcatcagatccacttaaaaaagcatcgctggagttactgcttcaagagttgattcaatggtcagggagccgtcgaattggtcttctgcgtactgaccgtgctgagcaagcaatgcatcctcctcaggatctaaagagagaagagcgttcgttggcaacactatttaaagatgatttttcaccactaaaagattgggatgccacgagctttcccaatctgatcctttggtcgtga

SEQ ID NO: 49345 - protein, 634 aa, Prochlorococcus marinus str. MIT 9313
MEVGMVLKQSDGLKTAVARSADNRYSAASNLRNVRGWRARGTFHCLHRTPADRTGVDNEPSTFIPKALRTSPIPAESVEIRFDEISDALAAIRNGECVVVVDDERRENEGDLICAAQFATPEQINFMATEARGLICLAMQGSRLDQLDLPLMVDRNTDANQTAFTVSIDAGPEKGVSTGISAEDRARTIQVALHPETRPRDLRRPGHIFPLRASQGGVLKRAGHTESAVDLSQLAGLAPAGVICEIQNSDGSMARLPQLQNYARRWGLKLINIADLIRYRLENERFVYRQATADLPSLFGSFQAIGYLNGLDGSEHIALVKGDPRKLKEPVLVRMHSECLTGDAFGSLRCDCRPQLEAALARIEQEGEGVVVYLRQEGRGIGLINKLKAYSLQDGGLDTVEANESLGFPADLRNYGVGAQILTDLGIHRLRLLTNNPRKIAGLGGYGLQVESRVPLVICPGDHNAAYLAVKREKLGHLIDAGKSENKAPEVGPFVVVAWDGEVNGETLAKLRTRAHDWAKSNELELIAESSPRLLALWDRPLFVWRVCPRVKTSSEVSSDPLKKASLELLLQELIQWSGSRRIGLLRTDRAEQAMHPPQDLKREERSLATLFKDDFSPLKDWDATSFPNLILWS

SEQ ID NO: 49346 - DNA, 1704 bp, Synechococcus sp. WH 8102
  CDS (1)..(1704): transl_table=11
atggcgacgtccaaccaacagttgatcgtacagagattgataatgatggaattgcagtacggcaggcttctgaactccagttcccagcatcagcaggacgatccgatccgcttcgatgacatcgccgaggcgttggccgccattcgcaatggtgcctgtgtggtggtggtcgatgacgagcagcgtgaaaacgaaggcgatctgatctgcgccgctcaattcgccacaccggaagcgatcaatttcatggcgaccgaggcccgcgggctgatctgtctggccatggaggggaagcggctggacgagcttgatcttcccctgatggtggatcgcaacaccgatgccaacgaaacggccttcacggtgagcatcgatgcgggggctgagcacggcgtcagcactggaatctctgcggaggatcgtgcccggacgattcaggttgccctcaatcccaagacgcgacctgcggagctgcgacgaccgggacacatttttccgctgcgggccaagcctggcggcgtgttgaaacgcgccggacacacggaagcagctgttgacctggcccagcttgcgggtcttacaccctccggcgtgatctgcgagatccagaacagcgatggctccatggcccgtctgccggaactgagggcttacgccgatacctggggcttgaagctcatcagcatcgctgaactgatccgctatcggctcgacaacgaacggtttgtgcgacggcaggcccatgcggaactgccgagtcagttcggttcgttccaggccattggctactgcaatgaactggatggctcggaacatgtggccctcgtcaaaggtgacccggcctccctgcgtgaaccggtgctggtgcggatgcattcggaatgcctcaccggtgatgccttcggatccctgcgctgcgactgccgccctcagctggaggcagcactgcgccaaatcgaacgtgagggggaaggtgtggtggtttacctacgccaggagggtcgcggcatcggtctgatcaacaaacttcgcgcctacagccttcaggatggaggccttgacaccgttgaggccaacgaacggctggggttccccgctgacttgcgcaactacggggtgggagcgcagatcctctcagatctcggcatccatcgcttgcgactgctgaccaacaacccccgcaagatcgctgggctcgggggctatggacttcaggtggaagaacgggtccccctggtgatggatgccggtgatcacaacgccgactatctggctgccaagcgcgacaaactcggccatctcatggacagcgatggtccctgcaccgttctcgccgtcgcggtgaacgatcgaacggagagcctgccctcgatccgctcccgtgtggaagatctcgctgagacccacggccaaaccctggaagcgctgcatgagccgcgcttgctggcgctctgggaccgtccccagttcgtctggaagctcacgccggaggtggatgctccgctggcactgctgcagtcgattgcccagctggaatccacacaacgcattggtttgcttcgcgtcagcaccgagcgcagtgcgctccacccatcacaaacgctggaacgggaagagcgttccttggttgagctcatccagaccaatggggacgaacgtctgacgcaacgtccgtccctcctgcactggtcagccagggactga

SEQ ID NO: 49347 - protein, 567 aa, Synechococcus sp. WH 8102
MATSNQQLIVQRLIMMELQYGRLLNSSSQHQQDDPIRFDDIAEALAAIRNGACVVVVDDEQRENEGDLICAAQFATPEAINFMATEARGLICLAMEGKRLDELDLPLMVDRNTDANETAFTVSIDAGAEHGVSTGISAEDRARTIQVALNPKTRPAELRRPGHIFPLRAKPGGVLKRAGHTEAAVDLAQLAGLTPSGVICEIQNSDGSMARLPELRAYADTWGLKLISIAELIRYRLDNERFVRRQAHAELPSQFGSFQAIGYCNELDGSEHVALVKGDPASLREPVLVRMHSECLTGDAFGSLRCDCRPQLEAALRQIEREGEGVVVYLRQEGRGIGLINKLRAYSLQDGGLDTVEANERLGFPADLRNYGVGAQILSDLGIHRLRLLTNNPRKIAGLGGYGLQVEERVPLVMDAGDHNADYLAAKRDKLGHLMDSDGPCTVLAVAVNDRTESLPSIRSRVEDLAETHGQTLEALHEPRLLALWDRPQFVWKLTPEVDAPLALLQSIAQLESTQRIGLLRVSTERSALHPSQTLEREERSLVELIQTNGDERLTQRPSLLHWSARD

SEQ ID NO: 49348 - DNA, 618 bp, Chromobacterium violaceum ATCC 12472
  CDS (1)..(618): transl_table=11
atgtcgccgcacccgcaacccgctcccgaacccgtcatccagtatatcgccagctgcaagctgcccacgccgtggggcgaattcgtcatgcacggcttcgaggaagagagcggccaggagcatgtggcgctgacgctgggcgaggtgggcgacggcctgccggtgctggcgcggcttcactcggagtgcctgaccggcgacgcgctcttttctctgcgctgcgactgcggcttccagctggaggccgcgatggaggcgatcagcaaagccggccgcggcgcgctgctgtatttgcgccaggaaggccgcggcatcggcctgatcaacaagatccgcgcctacaagctgcaggatggcggcgcggatacggtggaagccaatgaaaggctgggtttcccagccgacatgcgcgatttccgcattgcccgccacatgctggcgcatctgggcatcggcagcgtcaaggtgatgaccaacaatccgcgcaagctggccacgctggaagcggccggcatcgcggtggtggagcgtgtgccgctgcaagtggggcgcaatccgtataatgaccgttacctggacaccaaggccgccaagctgggccacatgctgctcaagtaa

SEQ ID NO: 49349 - protein, 205 aa, Chromobacterium violaceum ATCC 12472
MSPHPQPAPEPVIQYIASCKLPTPWGEFVMHGFEEESGQEHVALTLGEVGDGLPVLARLHSECLTGDALFSLRCDCGFQLEAAMEAISKAGRGALLYLRQEGRGIGLINKIRAYKLQDGGADTVEANERLGFPADMRDFRIARHMLAHLGIGSVKVMTNNPRKLATLEAAGIAVVERVPLQVGRNPYNDRYLDTKAAKLGHMLLK

SEQ ID NO: 49350 - DNA, 1218 bp, Porphyromonas gingivalis W83
  CDS (1)..(1218): transl_table=11
atggaagaaatcaagctgaatactattgaagaagccctggaagacttcaaggaaggtaagttcctgatcgtcgtggatgatgaagatcgtgaaaatgaaggcgactttatcatcgcagcggagaagataacgccggataaagtgaacttcatgatgcaccacggccgcggcgtcctctgcgctcccatatccgaagagcgtgctcacgagctggagctggagatgcaagtgccggacaatacctcggtacacgagactccctttaccgttacggtagaccgcctcggcaatggctgtaccacgggtgtttccatgtacgaccgtgcacagacgattttggctctggccgatcccaacacacgtccgtcggatttgggacgtccggggcatatctgcccactccgtgcgcgcagccgtggtgttctgcgtcgggcaggacacacggaagcggctgtggatttggcacgtctatgcggcatgcaaccggctgcagccctcatagagattatcaatgaggacggtaccatggcacgtttgccacagctatgggaggtctccaagcgttttggactgaagatcattgccatcaaagatctgatagcctaccgcctcaaacaagaatccatcgtagaaaagggtgtagaagtggatatgcctaccgaatacggacacttccgactcatacctttccgtcaaaaatccaatggactggagcacatagctttgttcaaggggacgtgggacgaaaatgaaccgatactcgttcgtatgcactcatcctgtgccactggcgacatattcggatctatgcgttgtgactgtggcggccaattactgcaagcaatggagaagatcgagaaagaaggcaaaggagctatcatctatctgaatcaggaaggccgcggtatcggcctgatggaaaagatgaaagcttataagctacaggaacagggtatggatacgatagacgccaacctctgcctcggacacaaagccgatgaacgtgattatggcataggcgcccaaattctgcgtcttttgggtatcaagaaaatgcgcttgatgacaaacaacccggtcaaacgtatcggactggaagctttcggcttggagatcgtagaaaatatccccctggaaactgccccaaatcgctacaacgagttctatctgcgcaccaagaaagaacgtatggggcacgagctgcacaacatcaaataa

SEQ ID NO: 49351 - protein, 405 aa, Porphyromonas gingivalis W83
MEEIKLNTIEEALEDFKEGKFLIVVDDEDRENEGDFIIAAEKITPDKVNFMMHHGRGVLCAPISEERAHELELEMQVPDNTSVHETPFTVTVDRLGNGCTTGVSMYDRAQTILALADPNTRPSDLGRPGHICPLRARSRGVLRRAGHTEAAVDLARLCGMQPAAALIEIINEDGTMARLPQLWEVSKRFGLKIIAIKDLIAYRLKQESIVEKGVEVDMPTEYGHFRLIPFRQKSNGLEHIALFKGTWDENEPILVRMHSSCATGDIFGSMRCDCGGQLLQAMEKIEKEGKGAIIYLNQEGRGIGLMEKMKAYKLQEQGMDTIDANLCLGHKADERDYGIGAQILRLLGIKKMRLMTNNPVKRIGLEAFGLEIVENIPLETAPNRYNEFYLRTKKERMGHELHNIK

SEQ ID NO: 49352 - DNA, 570 bp, Wolinella succinogenes DSM 1740
  CDS (1)..(570): transl_table=11
atgacagcgctaaaagcctctcaaaaagccaagcttcccactcgacacggaatctttacgattcaagcgtttgcgcatgagggaaaagaacacttagccatcttctctgaccccttaccccccgtcccgcttcttcgagtgcactctgaatgcctcacgggtgatgtttttggcagcctcaaatgcgattgtggcagcgagctctccatcgccatggagcgaatcgccaaagagggcggaatcgcgctctatcttcgccaagaggggaggggaattggactctttcacaaggtcaatgcctacgcccttcaagatcaagggtatgacaccgttgaggcgaatctcgcccttggtttcaaggaagatgagcgaaactatgaggtggtcggtgagattttgagcttttatggaatcgatgaagtgaagctcctcaccaataaccccaaaaaggtggaggcgatgagccactttgtgaagattcactccagagaagcgattctagccccgcacaattgctacaatgaaaactatctcaaaaccaagcaagagaagctcggacacctgctttag

SEQ ID NO: 49353 - protein, 189 aa, Wolinella succinogenes DSM 1740
MTALKASQKAKLPTRHGIFTIQAFAHEGKEHLAIFSDPLPPVPLLRVHSECLTGDVFGSLKCDCGSELSIAMERIAKEGGIALYLRQEGRGIGLFHKVNAYALQDQGYDTVEANLALGFKEDERNYEVVGEILSFYGIDEVKLLTNNPKKVEAMSHFVKIHSREAILAPHNCYNENYLKTKQEKLGHLL

SEQ ID NO: 49354 - DNA, 1719 bp, Gloeobacter violaceus PCC 7421
  CDS (1)..(1719): transl_table=11
gtggccactggttttcactccgttcccgagatcctggacgaattgcgcgccggccgggcggtggtggtcgtcgacgacgagaaccgcgagaacgaaggcgatctcatctgtgccgcccagttcgcctcccccgaaatgatcaacttcatggccacccacgcccggggcctcatttgcctggcgatgaccgccgagcggctcgaccagttgcagttgccgctgatggtgagcgaaaacaccgaccgcaaccagacggcttttaccgtgagcatcgacgccggcccccacctgggggtgagcaccggcatctccgccgccgaccgggccaagaccatccaggcggccatcgattcgcgcacccgtgcaggcgacctgacccgccccggccacatctttccgatccgcgcccgcgagggaggcgtgctgaagcgcgccggtcacaccgaggcggcggtcgatctggcgcgcatggcggggctgtatccggccggggtgatctgcgaaatccagaaccccgacggttcgatgtcgcgcctgccggaactgctccagtacgcccgcaccttcaacctcaagattgtcaccatcgccgaaattatcgcctaccggctgcagaacgaacgcttcatcaagcgcgagacggtggcgatgctgcctaccgccttcggcaaattcgagatttttgcctaccgcgacaccctcgacggcaaggaacacgtcgccctggtgcgccgtccacccgcgggctcgggcctttttgacggggcgccgccttttgccggcagcgaggagccggtactggtgcgcgtccactccgaatgcctgaccggcgacaccttcggctcgctgcgctgcgactgccgccagcagttgcaggctgccctcaagatgatcgaccaccacggccagggtgtggtcgtctatctgcgccaggagggccgcggcatcgggctgatcaacaagctcaaagcttacgccttacaagatatgggcctcgacacggtcgaagcgaacgagcggctggggtttgccgccgatctgcgcagctatggcgtcggcgcccagatcctcaacgacctgggggtgcaccgcatgaaattgatcaccaacaatccgcgcaagatcgcgggcctgagcggctataacctcgaagtggtggaccgcgtgcccctcatcatcgaagagaccgactacaactccacctacctcaacaccaaagcccagaagctcgggcacctgctgccgggggtgcggcttttgacgctgggggtgctctggcgtcgggcgactatgcagccctacgacccggagcgctccaatcaagtcgaactgctgcgcgaactgtttggtcagcaggatctgctcatccaggaggagcgccgcccggtggcgagcgccgtctttgggccggacgccgtcgtggtgcacatcgggctcccttctgcgggcaacaagagccccaacgcttggtataccgacccgacgagtgcttgccgccgggcgatcttggccgctttggaggaacttgtgcagaacaacccaccgcaagtgctgcaatttttggtcagctccggagctgatccgctcaatcacctcagcgaacgccttcagcatcgcgaagaagatctagcatccctgccggatgccatcaaaggaccgctctcccccgagactgtctacatcttcaaagccgacgccacccaaccacccacctcctga

SEQ ID NO: 49355 - protein, 572 aa, Gloeobacter violaceus PCC 7421
MATGFHSVPEILDELRAGRAVVVVDDENRENEGDLICAAQFASPEMINFMATHARGLICLAMTAERLDQLQLPLMVSENTDRNQTAFTVSIDAGPHLGVSTGISAADRAKTIQAAIDSRTRAGDLTRPGHIFPIRAREGGVLKRAGHTEAAVDLARMAGLYPAGVICEIQNPDGSMSRLPELLQYARTFNLKIVTIAEIIAYRLQNERFIKRETVAMLPTAFGKFEIFAYRDTLDGKEHVALVRRPPAGSGLFDGAPPFAGSEEPVLVRVHSECLTGDTFGSLRCDCRQQLQAALKMIDHHGQGVVVYLRQEGRGIGLINKLKAYALQDMGLDTVEANERLGFAADLRSYGVGAQILNDLGVHRMKLITNNPRKIAGLSGYNLEVVDRVPLIIEETDYNSTYLNTKAQKLGHLLPGVRLLTLGVLWRRATMQPYDPERSNQVELLRELFGQQDLLIQEERRPVASAVFGPDAVVVHIGLPSAGNKSPNAWYTDPTSACRRAILAALEELVQNNPPQVLQFLVSSGADPLNHLSERLQHREEDLASLPDAIKGPLSPETVYIFKADATQPPTS

SEQ ID NO: 49356 - DNA, 609 bp, Photorhabdus luminescens subsp. laumondii TTO1
  CDS (1)..(609): transl_table=11
atgaacaataaaatgcaattaaaacgagtcgctgaggccaagttacccactccttggggtgattttttaatggtcggctttgaagaaatcgccacaggtcaagatcatgtcgcattagtatacggtactatttctggcaatgaacctgtgctttccaggatccattcagaatgtctgaccggtgacgccctgtttagtctgcgttgtgattgcggttttcaacttgaagccgcccttgctcaaattgctaaagaagggcgaggtgtattactttaccatcggcaagaaggtcgtaatattggcttaatcaacaaaattcgtgcttacgcgttacaggataacggtatcgatactgtagaagctaaccatcagttaggttttgccgccgatgagcgtgatttcaccttatgtgcagatatgtataaattactcggtattcaagctattcgtctgctgacaaataatcccaaaaaagtggaaattatgaccgaagcagggattaatatcgtagaacgtgttccattaattaccggccgaaatcctaagaatgcttattatttggatactaaagccagaaaaatgggtcatttgttatctgagcaaaattag

SEQ ID NO: 49357 - protein, 202 aa, Photorhabdus luminescens subsp. laumondii TTO1
MNNKMQLKRVAEAKLPTPWGDFLMVGFEEIATGQDHVALVYGTISGNEPVLSRIHSECLTGDALFSLRCDCGFQLEAALAQIAKEGRGVLLYHRQEGRNIGLINKIRAYALQDNGIDTVEANHQLGFAADERDFTLCADMYKLLGIQAIRLLTNNPKKVEIMTEAGINIVERVPLITGRNPKNAYYLDTKARKMGHLLSEQN

SEQ ID NO: 49358 - DNA, 597 bp, Photorhabdus luminescens subsp. laumondii TTO1
  CDS (1)..(597): transl_table=11
atgaataatatatcaattagaaatagtacttttataccgttgaaatctattaacaatgaatctgaatttatatcatttaatggatttacccaggataaagagcatttagctatacgtataggaaaatggtcagagaaacacatacctttggttaggatccattctgaatgtgtgacaggagaaatatttcactctcttttatgtgactgtggtgagcagttaaatgaatctttaaaagaaattgatattcatggaggagtcttaatttatttacgccaggaaggccgtggaattggattatataataaaatagatgcatataagctacagcgcaatgggttagatacataccaagctaatcaagctcttggtttcttagatgattatcgtgatttttctctcgcggctaaaatgttactggccatgaatatttcaaaaattcgtttgataactaataatccagataaaatacatcaaattactcagaatggaattgaaatatatgaagttattaataccaagacattcttaaatgaaaaaaataaaaattatttgactgctaaaaaaataaaaacctttcatgctcttgaactataa

SEQ ID NO: 49359 - protein, 198 aa, Photorhabdus luminescens subsp. laumondii TTO1
MNNISIRNSTFIPLKSINNESEFISFNGFTQDKEHLAIRIGKWSEKHIPLVRIHSECVTGEIFHSLLCDCGEQLNESLKEIDIHGGVLIYLRQEGRGIGLYNKIDAYKLQRNGLDTYQANQALGFLDDYRDFSLAAKMLLAMNISKIRLITNNPDKIHQITQNGIEIYEVINTKTFLNEKNKNYLTAKKIKTFHALEL

SEQ ID NO: 49360 - DNA, 1155 bp, Vibrio vulnificus YJ016
  CDS (1)..(1155): transl_table=11
gtgtctatcagcgttttagcgcttaaattgacaggaaatatcgctatgccaatcagtacaccccaagagatcattgaagacattcgtttgggcaaaatggtcatcttaatggacgatgaagaccgcgaaaacgaaggtgatttgattatggcggcggagcacattacgccagaagccatcaattttatggccaaatatggtcgcggtttgatctgtttgaccatgaccaaagagcgttgccagcgtcttggattaccaccaatggtgcaagataacaacgcgcaatacaccaccaacttcactgtttccatcgaagcggcggaaggcgtgacaacaggtatttcagcagcggatcgtgctcgtaccgtgcaagcggcagtcgcaaaagaagctaaagcggcagacttggtgcaaccggggcacattttcccattagccgcgcaagatggtggcgtattgactcgcgcgggtcataccgaggcaggctgcgaccttgctcgtttggcgggtttcgaaccagcctctgttatcgttgaaattctgaatgacgatggcaccatggcacgtcgccctgatttggaagtgtttgctgagcagcatggtctcaaactcggcaccattgccgatttgattgagtatcgaaacaacacggaaaccacgattgagcgcgttgctgagtgcaagctacccaccgagtttggtgagtttgatctggtgacttaccgcgacaccattgataatcaaattcactttgctttgcgtaaaggcactgtgggtgatcaaacaccactggttcgtgttcatttacaagacacctttaccgatttactgcgcagcgatcgcaatgctgagcgcagttggacgcttgataaagcgatgaagcgtattggccaagaagggggcgttctggtgattctggggaatgaagagtcgcctgagctgctgatccatcgcgtcaaaatgtttgaagctcaagacaaagaagaggcacccaaattggcgaagaagcagggcacttcacgtcgtgttggtgtcggctcgcaaattcttgcagacttaggtgtgcacgatatgcgtctactttcttccagcaacaagaaataccatgcccttggcggttttggtctgaacgttattgagtatgtgtgtgaataa

SEQ ID NO: 49361 - protein, 384 aa, Vibrio vulnificus YJ016
MSISVLALKLTGNIAMPISTPQEIIEDIRLGKMVILMDDEDRENEGDLIMAAEHITPEAINFMAKYGRGLICLTMTKERCQRLGLPPMVQDNNAQYTTNFTVSIEAAEGVTTGISAADRARTVQAAVAKEAKAADLVQPGHIFPLAAQDGGVLTRAGHTEAGCDLARLAGFEPASVIVEILNDDGTMARRPDLEVFAEQHGLKLGTIADLIEYRNNTETTIERVAECKLPTEFGEFDLVTYRDTIDNQIHFALRKGTVGDQTPLVRVHLQDTFTDLLRSDRNAERSWTLDKAMKRIGQEGGVLVILGNEESPELLIHRVKMFEAQDKEEAPKLAKKQGTSRRVGVGSQILADLGVHDMRLLSSSNKKYHALGGFGLNVIEYVCE

SEQ ID NO: 49362 - DNA, 648 bp, Vibrio vulnificus YJ016
  CDS (1)..(648): transl_table=11
atgtacaaaagagtcgttagattagacgtaaccaatcaagtgagtagagatatggcggaagttcgagccagagtcgattttaaagtcggtgcaaaaagtaatattgatgcggaaattctttcatttcgtggtttgaagaccgacaaagagcatgtggcagtcatctttaaatcggcagatgtgactcaagaagtccccctagttcgaatgcattctgaatgcctcactggggatgtgttccattcatctcgctgtgactgtggcgagcagttggaagagacgatcaatcgtatgggtgagtctggcggcatcattctttatcttcgccaagaaggtcgcgggatcggcctttacaacaaaatcgatgcttaccgtttgcaaagcgaagggatgaatacttacgaggccaataaccatcttggctttgatgacgatcttcgtgactttacggaagcggtacaaatgcttgaagcgttagggatcaaacagattcgattagtgaccaacaatcctaagaagattcgtgaactaagtgagtacgggatagagattgttgaagtggtcaacacttctgctcacatcaaagaaggcaatgaaagctacttaaaggcgaaagtctctcatggtaagcaccatttaaaagtgtaa

SEQ ID NO: 49363 - protein, 215 aa, Vibrio vulnificus YJ016
MYKRVVRLDVTNQVSRDMAEVRARVDFKVGAKSNIDAEILSFRGLKTDKEHVAVIFKSADVTQEVPLVRMHSECLTGDVFHSSRCDCGEQLEETINRMGESGGIILYLRQEGRGIGLYNKIDAYRLQSEGMNTYEANNHLGFDDDLRDFTEAVQMLEALGIKQIRLVTNNPKKIRELSEYGIEIVEVVNTSAHIKEGNESYLKAKVSHGKHHLKV

SEQ ID NO: 49364 - DNA, 1104 bp, Vibrio vulnificus YJ016
  CDS (1)..(1104): transl_table=11
gtgcattttgtttcttattctttgtgttatgacgtcaggagcaacatcatggagcaaccgatttatttctatgagccagatgaaaatcatggctttctcgccaacttctatccatgttcgatcaccgtttctgggacgtgctggccgagcagtgaacactactaccaagcacaaaaattcgacgatgtccggctacaggaaaaagtgctgagggcagaagatgctgcacaagcttttcggctttcacgcgaatatcagcagtggcaaaggcatgactggtatgacattcgagtagaagtgatgagattcattgtgcgcgagaaatttttgcaaaacacgcccctagcgcatcaactgcttgcgacgggagatactgaactgaaagaacattcgcataaggatgccttttggggggatgggggcgatgggcatggacgcaatgagctcgggcgtattttgatgatggttcgagaggagttgcaagagcacgcgccatacaatctggtgcagtttattgacagtgcgaagttgcctacccagtgggggacatttcaaatgtatggtttcattgaaaaagccaccgggaaagagcatttggcgctcgtgtatggggatattgaacaacaggcagcgcctttgattcgtctgcactctgagtgtttaacaggcgatgcgctgtttagtgcccgctgtgattgcggttttcagctcgccaaagccttgcaaaacatcgtggcagaaggggcgggcgtgttgctctatttgcggcaggaagggcgggggataggccttatcaataaaattcgcgcttatcacttacaagatgacggggccgacacggtggaagctaacgagcaacttggctttggcgccgatatgcgcgattacgcgttttgtcgcggcattctcagttttctcggcattgaacgtgtgaggctgatgaccaacaacccacgcaaggtgaaggcactgcaattggccaatattgaggtgacggagcgcgtgccgctgcaagaaggcaataatccgcacaatcatcagtatttaagaaccaaagccgataagctaggccacatgtttgatcgcaacttcgttaaaccttag

SEQ ID NO: 49365 - protein, 367 aa, Vibrio vulnificus YJ016
MHFVSYSLCYDVRSNIMEQPIYFYEPDENHGFLANFYPCSITVSGTCWPSSEHYYQAQKFDDVRLQEKVLRAEDAAQAFRLSREYQQWQRHDWYDIRVEVMRFIVREKFLQNTPLAHQLLATGDTELKEHSHKDAFWGDGGDGHGRNELGRILMMVREELQEHAPYNLVQFIDSAKLPTQWGTFQMYGFIEKATGKEHLALVYGDIEQQAAPLIRLHSECLTGDALFSARCDCGFQLAKALQNIVAEGAGVLLYLRQEGRGIGLINKIRAYHLQDDGADTVEANEQLGFGADMRDYAFCRGILSFLGIERVRLMTNNPRKVKALQLANIEVTERVPLQEGNNPHNHQYLRTKADKLGHMFDRNFVKP

SEQ ID NO: 49366 - DNA, 1239 bp, Corynebacterium diphtheriae NCTC 13129
  CDS (1)..(1239): transl_table=11
gtgactttggatagcatcgaaagggccatcgcggatattgcgaatggaaagcctgtggtcgtagtcgactcagaagatcgtgaaaacgaaggcgatttaatttttgcggctgataaagcaacgccagagttagtagcctttatggttcgatattcttcgggttatatatgtgcctctttgacgtcagaagagtgcgatcgacttcagcttccgccaatgacatcccataacgaggatgcgcggggtaccgcatatgccgtcacggtagacgcgaatacaggaacaactggtatttctgcaacaagtcgtgcagatacgttgaggaaacttgccgacagtcaattcggacctcaagatttcacgcgtcctggccatgtggttccactgcgtgcgaaagcaggaggtgtgcttgaacgggcagggcatactgaagcggctgtcgatctagctcgaatggctggcttgaatccagcaggcgtcctgtgtgaagtcgtcagcgaagatgatcccacagacatggcacgagcacctgaactacgacgatttgcggatcgacatgatcttgcacttatttcgattgaacagcttattgagtggcgacgtaggtacgaattacttgttgaacgagccgtgtcaacacaactgccaactgagttcggacggtttaccgcggtcggctatcgtggaatcgttgacggtgtagaacatattgcgctagttgcaggcgatattacttctgatgagggcaaggatgttctccttagagtccattctgaatgcttgaccggagatgttttgggttctcgtcggtgtgactgtgggccgcaattacaggcgtcccttcgtgctatttccgagcgagggcgcggagtcgtggtgtacttgcgtggacatgaaggacgtggaatcggattacttcacaagcttcaggcgtatcatctgcaagatgaaggggccgatacggttgacgcaaataaggcattaggcctaccagttgacgcccgtaattactctgttgctgcacacattctacgagatcttggcgtgcagtcggtatgtttgctgacgaataatccagaaaaatcccttgaactggaacgctatggggtcaaagtaactggacgagagcctgtcaaagtggaagtgcacgaagataatattcgttatttgaccacaaaacgggatcgaatgaaccatgatctgccatggattgccgaatacaaaaaggagcaaagctaa

SEQ ID NO: 49367 - protein, 412 aa, Corynebacterium diphtheriae NCTC 13129
MTLDSIERAIADIANGKPVVVVDSEDRENEGDLIFAADKATPELVAFMVRYSSGYICASLTSEECDRLQLPPMTSHNEDARGTAYAVTVDANTGTTGISATSRADTLRKLADSQFGPQDFTRPGHVVPLRAKAGGVLERAGHTEAAVDLARMAGLNPAGVLCEVVSEDDPTDMARAPELRRFADRHDLALISIEQLIEWRRRYELLVERAVSTQLPTEFGRFTAVGYRGIVDGVEHIALVAGDITSDEGKDVLLRVHSECLTGDVLGSRRCDCGPQLQASLRAISERGRGVVVYLRGHEGRGIGLLHKLQAYHLQDEGADTVDANKALGLPVDARNYSVAAHILRDLGVQSVCLLTNNPEKSLELERYGVKVTGREPVKVEVHEDNIRYLTTKRDRMNHDLPWIAEYKKEQS

SEQ ID NO: 49368 - DNA, 1203 bp, Geobacter sulfurreducens PCA
  CDS (1)..(1203): transl_table=11
atgccggttgcacgtattgaggaagcaattgaagatatccgccaaggcaagatggtgattctggtggacgatgaggaccgtgagaacgaaggcgacctgaccatggccgcggaaatggtgacccccgaggcgatcaacttcatggcccggttcgggcgggggctcatctgtctcaccatgacgaccgaacggtgcgatcatctccaactgccactcatggtttcggcaaacacttcctcgttcggcacggccttcaccgtatccatcgaggcaaaacggggggtgacaaccggcatctcagcggcggaccgggcccacaccattctgaccgctgttgccgatgacgcaaaggcagatgacctcgcccgtccgggccatgtgttcccgctgcgggccaagccgggcggagtgctcgttcgtgccggccaaaccgaaggctcggtcgatctggctcgtcttgccggactcaagcccgccggcgtcatttgtgagatcatgaacgatgacggcaccatggcgcgaatgccgcaactcaaggttttcgccaaggagcacggaatcaggatctgcaccatcgcggatctggtggcctatcggctcaagcacgagtccctggtgaggcgtgcggcagacgtgcttctgcccacggatttcggggaattcagggccattgcatttgagaacgacgttgaccgactggagcacttggcgctggttaagggagagatcaggggggatgagccggtgctcgtccgggtgcattccgagtgcatgaccggcgacgttttcggcagcctgcgctgcgactgcggcagccagctccatcgggctatggaaatgatcgaggccgaagggcgcggggtcatcctctacatgcgccaggaagggcgcggtatcggtctgttcaacaagttaaaagcctatgccctgcaggacgaagggaaagacacggtggaggcgaacctggccctgggcttcaagccggacctgcgtgattatggcatcggcgcccagattctcgtgaacctgggggtgcggaacatcaggcttctgaccaacaacccccgcaaactgatcggcctccagggttacggcatcaatatcgtggagcgagttcccatcgaaattccgcccaccactacgaatctcgactatctcaaggccaagcgcgaaaagctcggccatttgctggaaaatatctga

SEQ ID NO: 49369 - protein, 400 aa, Geobacter sulfurreducens PCA
MPVARIEEAIEDIRQGKMVILVDDEDRENEGDLTMAAEMVTPEAINFMARFGRGLICLTMTTERCDHLQLPLMVSANTSSFGTAFTVSIEAKRGVTTGISAADRAHTILTAVADDAKADDLARPGHVFPLRAKPGGVLVRAGQTEGSVDLARLAGLKPAGVICEIMNDDGTMARMPQLKVFAKEHGIRICTIADLVAYRLKHESLVRRAADVLLPTDFGEFRAIAFENDVDRLEHLALVKGEIRGDEPVLVRVHSECMTGDVFGSLRCDCGSQLHRAMEMIEAEGRGVILYMRQEGRGIGLFNKLKAYALQDEGKDTVEANLALGFKPDLRDYGIGAQILVNLGVRNIRLLTNNPRKLIGLQGYGINIVERVPIEIPPTTTNLDYLKAKREKLGHLLENI

SEQ ID NO: 49370 - DNA, 1278 bp, Mycobacterium avium subsp. paratuberculosis K-10
  CDS (1)..(1278): transl_table=11
atgacgaggttggactccgtcgaaagggcggttgccgacattgcggccggcaaggccgtcatcgtcatcgacgacgaagaccgggagaacgagggcgatctgatcttcgccgccgagaaggcgacgccggagatggtggcgttcatggtgcgctacacctcgggctacctgtgtgtgccgctggacggggcgatctgcgaccgcctgggcctgctgccgatgtatgcggtcaaccaggacaagcacgggaccgcttacacggtcacggtcgacgcgagaaacggtgtgggcaccgggatttcggcctcggaccgggccaccaccatgcgcctgctggccgatcccaccagcatcgccgaggatttcacccggcccggtcatgtggttccgttgcgcgccaaggacggtggcgtgctgcgccggcccggtcacaccgaggccgccgtggacctggcccggatggccggcctgcagccggccggcgccatctgcgagatcgtcagccagaaggacgagggctcgatggcgcagaccgacgagctgcgggtgttcgccgacgaacacgacctcgccatgatcaccatcgccgacctgatcgagtggcgccgcaagcacgagaagcacatcgagcgcatcgcggaggcccggatcccgactcggcacggcgagtttcgcgccatcggttacaccagcatctacgaggaggtcgaacacgtcgcgctggttcgcggcgagatcgccggccccaactccgacggcgacgacgtgctggtgcgggtgcactcggagtgcctgaccggtgacgtgttcggttcgcgccgttgcgattgcggaccccagctcgacgccgccatggccatggtggcccgtgaggggcgcggcatcgtgctgtacatgcgcgggcacgagggccgcggcatcgggctgatgcacaagctgcaggcctaccagctgcaggacgccggcgaggacaccgtcgacgccaacctcaaactcggattgcctgctgacgcaagggattacggaatcggcgcgcagatcctggtcgatctgggggtgcgttcgatgcggctgctgaccaacaaccccgccaagcgggtggggctggacggctacggtctgcacatcatcgagcgggtgccgctgccggtgcgcaccaacgccgagaacattcgttacctgatgaccaagcgcgataagatgggccacgatctggccggcctggacgattttcacgaatcggtccatctgccaggcgaattcggcggcgccctgtga

SEQ ID NO: 49371 - protein, 425 aa, Mycobacterium avium subsp. paratuberculosis K-10
MTRLDSVERAVADIAAGKAVIVIDDEDRENEGDLIFAAEKATPEMVAFMVRYTSGYLCVPLDGAICDRLGLLPMYAVNQDKHGTAYTVTVDARNGVGTGISASDRATTMRLLADPTSIAEDFTRPGHVVPLRAKDGGVLRRPGHTEAAVDLARMAGLQPAGAICEIVSQKDEGSMAQTDELRVFADEHDLAMITIADLIEWRRKHEKHIERIAEARIPTRHGEFRAIGYTSIYEEVEHVALVRGEIAGPNSDGDDVLVRVHSECLTGDVFGSRRCDCGPQLDAAMAMVAREGRGIVLYMRGHEGRGIGLMHKLQAYQLQDAGEDTVDANLKLGLPADARDYGIGAQILVDLGVRSMRLLTNNPAKRVGLDGYGLHIIERVPLPVRTNAENIRYLMTKRDKMGHDLAGLDDFHESVHLPGEFGGAL

SEQ ID NO: 49372 - DNA, 1083 bp, Wolbachia endosymbiont of Drosophila melanogaster
  CDS (1)..(1083): transl_table=11
atgtttataggaaatcagagtagcaataaggtagaaagagctatcagcgaaatcaggcgcggtcggccaattgtaatatatgatgaaagtaattacctattgtttgctgctgctgaggctttagaaagagatttatttaatcaatacaagcttacatcaagtaatgtatatgttactttaacttcaagtaaggtaaaatacatatctcagaataaagaacataacagcaaacgtctgttggtgaataattttgatgaactgctctatttaataaactgttcaaaggaagattgcataaaagagttgcaatgctcaaagacaatagatgaatgtgctattgccttgcttaagttctcagaattattgccatacgcgttagtggctgatatgacttttgagaataaccatgaaatgcgaaattggtgcgagaaaaatgacgttattgcactggacacgtcattcataaataattttcaagaaaatcaggatgtatatgaagtgtgcaaaacatcattatttttaaaacagactcaagaagtaaatatcatatcttatagaaccgaaagtggtggaagagaacatcatgcaattatcattggcaatccagataaagatgacgaaccattagtgagaattcattcttcgtgctatacgggtgacttgttagatagcttgtcatgcgattgcagaagtcagttacatcaagcaattcaaatgatagctgactctggaagtggtattatattgtatttgatgcaagatggaagaggcattggtttaactaataagttaagagcgtacagtatgcaaagaggacataatcttgatactgttgatgcaaatagaatattgggttttgaagatgatgaaaggagttttgctgttgcagctaaaatgcttaagaaattgaacattaacaaaatccaattacttacaaacaatgataggaaattgtcagaattggaaagtagtggtataggagttacaaagtgtctaccacttattgtggaacgtaataaatataacgattcatatatggagacaaagtttggtaaattaggccatagattaagagttttttag

SEQ ID NO: 49373 - protein, 360 aa, Wolbachia endosymbiont of Drosophila melanogaster
MFIGNQSSNKVERAISEIRRGRPIVIYDESNYLLFAAAEALERDLFNQYKLTSSNVYVTLTSSKVKYISQNKEHNSKRLLVNNFDELLYLINCSKEDCIKELQCSKTIDECAIALLKFSELLPYALVADMTFENNHEMRNWCEKNDVIALDTSFINNFQENQDVYEVCKTSLFLKQTQEVNIISYRTESGGREHHAIIIGNPDKDDEPLVRIHSSCYTGDLLDSLSCDCRSQLHQAIQMIADSGSGIILYLMQDGRGIGLTNKLRAYSMQRGHNLDTVDANRILGFEDDERSFAVAAKMLKKLNINKIQLLTNNDRKLSELESSGIGVTKCLPLIVERNKYNDSYMETKFGKLGHRLRVF

SEQ ID NO: 49374 - DNA, 1131 bp, Bdellovibrio bacteriovorus HD100
  CDS (1)..(1131): transl_table=11
atggaattcaatacaatccctgagatcatcgatgatgttcgtaacggcaagatggtcatcctggtggatgacgaggatcgtgaaaacgaaggcgatctgattctggccgctgaattcgcgacgccacaaaatatcaacttcatggtgaaagaagcccgcggcctggtgtgcctgtgtctgacagcccagcaggtcgagcgtctgcagcttccactgatggttcgtgatgatctgaactttgcgccgaacaaaacggcgttcatggtcagcatcgaagcttctgaagggatctcgaccggtatttctgctgccgaccgtgcgctgacgtgccgagtggctgcgaaccctcatgcaaaaccctctgacattcacatgccgggtcacatcttcccaatccgcgcccagcagggtggggttttgaagcgtgcgggtcacacagaggccagcgtggatctggcccgtctggcgggtttgaatccggcagccgtgatctgtgaagtgatgaacgatgacggcacaatggctcgcgtgggtgatctgcgtgagttcgcaaaaaagcacgacatcaaaattggcacgatcgtggatctgatcgcttatcgtctggcgaatgaaactttggtggaagagctgcacagcgttccactgccggcgtcttttggtgaaaacatgcaggcgcgtgttttccgcagcaccgtggatgggttggaacatttggtgattcaaaaaggtgaaatcaagaaagatcatccgaccctggttcgtgttcacgtggataacttcacccgtgatttcatggcggtggttcagcgtggggcttcgtccgtgcttgaaagcatcaaggcgatttcccaggaagaaagcggtgctttcgtgcttctgcgcgggaacaaccgaacttccggtctgactcaggagctgaatgttctggtgggtcttgaggacatccgtccgacgacgccgttgatggatgaacgtgattacggcattggtgcgcagatcctgcgtgagattggcgcgaacaaaatccgcctgttgaccaataagcctgaaaagaaagtcggcctgaaggcctttgatattgaaatcgttgaaattgtcgcaatggaaaacttgaagggaccaaaataa

SEQ ID NO: 49375 - protein, 376 aa, Bdellovibrio bacteriovorus HD100
MEFNTIPEIIDDVRNGKMVILVDDEDRENEGDLILAAEFATPQNINFMVKEARGLVCLCLTAQQVERLQLPLMVRDDLNFAPNKTAFMVSIEASEGISTGISAADRALTCRVAANPHAKPSDIHMPGHIFPIRAQQGGVLKRAGHTEASVDLARLAGLNPAAVICEVMNDDGTMARVGDLREFAKKHDIKIGTIVDLIAYRLANETLVEELHSVPLPASFGENMQARVFRSTVDGLEHLVIQKGEIKKDHPTLVRVHVDNFTRDFMAVVQRGASSVLESIKAISQEESGAFVLLRGNNRTSGLTQELNVLVGLEDIRPTTPLMDERDYGIGAQILREIGANKIRLLTNKPEKKVGLKAFDIEIVEIVAMENLKGPK

SEQ ID NO: 49376 - DNA, 1194 bp, Bacillus cereus ATCC 10987
  CDS (1)..(1194): transl_table=11
atgtttcatcgtattgaagaagctctagaagatttaaaacaaggaaaagtcgtgatcgtatgtgatgatgaaaaccgcgaaaatgaaggcgactttatcgctttagcagagtatattacgccagaaacaattaactttatgattacacatgggcgcggcctcgtttgtgtaccaattacagaaggatacgcagaacgtctacaattagaaccaatggtagctcataatacagattcgcatcatactgcatttacagtgagcattgatcatgtttctacaacaactgggattagtgcccacgaacgtgcaactacgatacgagaaatgttaaatcctgcatcaaaaggtgctgatttcaatcgtcctggacatatctttccattaattgcgaaagaaggtggtgtcctgcgccgtgctggtcatacagaagctgctgtcgatttagcacagctttgcggagcagaaccagctggcgtcatttgcgaaattattaatgaggacggtacgatggcacgcgtacctgatttactacagtgcgcaaaacaatttgatataaaaatgattacaatagaagatttaattgcttatcgccgccaccatgaaacattagtgacgcgtgaagtggaaattacattacctacagatttcggtactttccatgcaattggctattctaattcattagatacgaaagaacatattgcactcgtaaaaggtgatatttcaacaggagagcctgtacttgtacgcgttcattcagagtgcttaacaggagatgtatttggctcgtgccgctgcgattgcggaccacaactccatgctgcacttgctcaaattgagcgtgaaggaaagggcgttcttctttatatgagacaagaaggacgaggcattgggcttcttaataagcttcgcgcttataagttacaagaagaaggcttcgatactgtagaagcaaacgaaaagcttggcttccctgctgatctgcgtgattacggtattggcgctcaaatattaaaagatttaggtttacaacatttacggttattaacgaataatcctcgaaaaattgctggcttacaaggttacgatttagaagtaatcgagcgtgtaccgttacaaatgccagcaaaagaagagaataaaacgtatttacaaacgaaagtaaacaaattaggacatttactaaacttataa

SEQ ID NO: 49377 - protein, 397 aa, Bacillus cereus ATCC 10987
MFHRIEEALEDLKQGKVVIVCDDENRENEGDFIALAEYITPETINFMITHGRGLVCVPITEGYAERLQLEPMVAHNTDSHHTAFTVSIDHVSTTTGISAHERATTIREMLNPASKGADFNRPGHIFPLIAKEGGVLRRAGHTEAAVDLAQLCGAEPAGVICEIINEDGTMARVPDLLQCAKQFDIKMITIEDLIAYRRHHETLVTREVEITLPTDFGTFHAIGYSNSLDTKEHIALVKGDISTGEPVLVRVHSECLTGDVFGSCRCDCGPQLHAALAQIEREGKGVLLYMRQEGRGIGLLNKLRAYKLQEEGFDTVEANEKLGFPADLRDYGIGAQILKDLGLQHLRLLTNNPRKIAGLQGYDLEVIERVPLQMPAKEENKTYLQTKVNKLGHLLNL

SEQ ID NO: 49378 - DNA, 906 bp, Eremothecium gossypii
  CDS (1)..(906)
atgactgaatacacagtgccagaagtgacctgtgtcgcacgcgcgcgcataccgacggtacagggcaccgatgtcttcctccatctataccacaactcgatcgacagcaaggaacacctagcgattgtcttcggcgagaacatacgctcgcggagtctgttccggtaccggaaagacgacacgcagcaggcgcggatggtgcggggcgcctacgtgggccagctgtaccccgggcggaccgaggcagacgcggatcggcgtcagggcctggagctgcggtttgatgagacagggcagctggtggtggagcgggcgacgacgtggaccagggagccgacactggtgcggctgcactcggagtgttacacgggcgagacggcgtggagcgcgcggtgcgactgcggggagcagttcgaccaggcgggtaagctgatggctgcggcgacagagggcgaggtggttggcggtgcggggcacggcgtgatcgtgtacctgcggcaggagggccgcggcatcgggctaggcgagaagctgaaggcgtacaacctgcaggacctgggcgcggacacggtgcaggcgaacgagctgctcaaccaccctgcggacgcgcgcgacttctcgttggggcgcgcaatcctactggacctcggtatcgaggacatccggttgctcacgaataaccccgacaaggtgcagcaggtgcactgtccgccggcgctacgctgcatcgagcgggtgcccatggtgccgctttcatggactcagcccacacagggcgtgcgctcgcgcgagctggacggctacctgcgcgccaaggtcgagcgcatggggcacatgctgcagcggccgctggtgctgcacacgtctgcggcggccgagctcccccgcgccaacacacacatataa

SEQ ID NO: 49379 - protein, 301 aa, Eremothecium gossypii
MTEYTVPEVTCVARARIPTVQGTDVFLHLYHNSIDSKEHLAIVFGENIRSRSLFRYRKDDTQQARMVRGAYVGQLYPGRTEADADRRQGLELRFDETGQLVVERATTWTREPTLVRLHSECYTGETAWSARCDCGEQFDQAGKLMAAATEGEVVGGAGHGVIVYLRQEGRGIGLGEKLKAYNLQDLGADTVQANELLNHPADARDFSLGRAILLDLGIEDIRLLTNNPDKVQQVHCPPALRCIERVPMVPLSWTQPTQGVRSRELDGYLRAKVERMGHMLQRPLVLHTSAAAELPRANTHI

SEQ ID NO: 49380 - DNA, 1200 bp, Thermus thermophilus HB27
  CDS (1)..(1200): transl_table=11
atggaagggatcgccagcgtcaaggaacttctggaggagctcaaggcgggccgtcccgtgatcctggtggacgacgaggaccgggagaacgagggcgacctgatcatggcggcggagcacgtgaccccggagtgggtgaacttcatgctcaaggagtgccggggcctcctctgcgtggccctcacggaggagagggccaaggccctggacctccccctcatggtggagaggaaccaggacccccagggaacccgcttcaccgtgagcgtggacgcccgggggacgaccacggggatcagcgcctttgagcgggcggccaccatcaggctcctcgccgaccccgaggtcacggcccaggacttccgccgcccggggcacgtcttccccctggtggcgaggcccgggggggtcttgcgccgcgccgggcacacggaggccacggtggacctgttgcgcctcgccggcctcaccccggtgggcagcctcattgagatcctcaaggaggacggcaccatggcccgcctgccggacctcttggccttcgctaggaggcacggcctcaaggtgggtaccatcgccgacctcatccgctaccgcctggagaagggggacctctacgtgcggcgggaggcggaggccctgctccccacccgcttcggggagttccgcatcctgggctaccgcgacaccctcacgggggaggagcacgccgccttggtcatgggaagctgggcgccggaggagcccgtcctcgtgcgcatgcactccgagtgcctcaccggggacgccctccactccctgcggtgcgactgcggtttccagagggacctggccctgcagcggatcgccgaggaggggaagggggtcttggtctacctgaggcaggaggggcgggggatcggcctcgtgaacaagatcaaggcctaccacctccaggaccaagggctggacacggtggaggccaacctggccctggggtttcccccggacctccgggactacggcgtgggggcccagatcctctacgacctcggggtgcggaagatgcgcctcctcaccaacaacccgcgcaaggtccgggccctctccggcttcggcatagagatcgtggagcgcatccccttgagggccggggacaacccccacaacgagcgctacctccaggccaagaaggagaagctcgggcactggatggattga

SEQ ID NO: 49381 - protein, 399 aa, Thermus thermophilus HB27
MEGIASVKELLEELKAGRPVILVDDEDRENEGDLIMAAEHVTPEWVNFMLKECRGLLCVALTEERAKALDLPLMVERNQDPQGTRFTVSVDARGTTTGISAFERAATIRLLADPEVTAQDFRRPGHVFPLVARPGGVLRRAGHTEATVDLLRLAGLTPVGSLIEILKEDGTMARLPDLLAFARRHGLKVGTIADLIRYRLEKGDLYVRREAEALLPTRFGEFRILGYRDTLTGEEHAALVMGSWAPEEPVLVRMHSECLTGDALHSLRCDCGFQRDLALQRIAEEGKGVLVYLRQEGRGIGLVNKIKAYHLQDQGLDTVEANLALGFPPDLRDYGVGAQILYDLGVRKMRLLTNNPRKVRALSGFGIEIVERIPLRAGDNPHNERYLQAKKEKLGHWMD

SEQ ID NO: 49382 - DNA, 1230 bp, Desulfovibrio vulgaris subsp. vulgaris str. Hildenborough
  CDS (1)..(1230): transl_table=11
atgtccatctgcaaggccgaagaggccatcgacgccatccgcaagggcgagatgatcatcctcgtcgacgacgaggaccgcgaaaacgaaggcgaccttaccatcgccgcgcagcacgtcacgcccgaggtcatcaacttcatggccacccacgggcgcggcctcatctgcctggccctctcccccgagtgggtggacaagctacagctgcccctgatggcccgccgcaacgagtccaagttcggcaccaacttcactgtttccatcgaggcgcgccgcggtgtcaccaccggcatctccgccgccgaccgtgccacgaccatcctgaccgccgtcgccgacgacgtgaaggccgaagacatcgtcacgcccggtcacatcttcccccttcgtgcccagaagggtggggtcatggtccgtgccggacagaccgagggtagcgtcgacctcgccaagctcgccaatctcaagcctgccgcagtcatctgcgaaatcatgcgcgaagatggcgagatggcgcggatgcccgacctcatcgagttcgccgaaaagcacaacatgaagatcgccaccatcaaggacctcatccgctaccggatgcagtcgggccttctttcggtgaagcgcgtgggtgaagccaagatgcccacccgctacggcgatttccagatcatcgcctacgagaacgaactgcacgacgagacccacatcgccctcgtcaagggtgacatctcgcccagcgagcccgtgctcgtgcgcgtgcacagcgaatgcctcaccggtgacgtgctgggttcgttgcgttgcgactgcggcggccagctcgccgcggcactgtgccagattgcggccaaggggtcgggcgtgctgctgtacatgcgccaggaaggacgcggcatcggcctcggcaacaagatcaaggcctacgggcttcaggaccaagggtacgacaccgttgaggccaaccacaagcttggcttcaaggccgacctgcgcgactatggaatcggtgcgcagattctcgtcgacctcggggtgcgcaagatgcgcatgatgaccaacaaccccaagaagatcgtcggcctcgaaggctacggcatagaagtcgtcgaacgtgtgcccatcgaactcgagtcgtgcgccttcaatgaagagtacctgcgcaccaagaaggagaagatgggccacctgcttgaactgaagcaccacgagaacggaggcgacgcctag

SEQ ID NO: 49383 - protein, 409 aa, Desulfovibrio vulgaris subsp. vulgaris str. Hildenborough
MSICKAEEAIDAIRKGEMIILVDDEDRENEGDLTIAAQHVTPEVINFMATHGRGLICLALSPEWVDKLQLPLMARRNESKFGTNFTVSIEARRGVTTGISAADRATTILTAVADDVKAEDIVTPGHIFPLRAQKGGVMVRAGQTEGSVDLAKLANLKPAAVICEIMREDGEMARMPDLIEFAEKHNMKIATIKDLIRYRMQSGLLSVKRVGEAKMPTRYGDFQIIAYENELHDETHIALVKGDISPSEPVLVRVHSECLTGDVLGSLRCDCGGQLAAALCQIAAKGSGVLLYMRQEGRGIGLGNKIKAYGLQDQGYDTVEANHKLGFKADLRDYGIGAQILVDLGVRKMRMMTNNPKKIVGLEGYGIEVVERVPIELESCAFNEEYLRTKKEKMGHLLELKHHENGGDA

SEQ ID NO: 49384 - DNA, 1032 bp, Mycoplasma mobile 163K
  CDS (1)..(1032): transl_table=4
atgccttttcattttatgaagggacttatgattataaaagagaataatttcaaaaaattttttttgaaattatcacttaatgaaaaatattctgatttagttttcacagaattaaaaaaatatgaaaatcaagaatctgaaaaaacagctacttacaaatttaaaataagtaaaaaaatcattttaatagaaggaaaagaagatagaattcttctaagaacactgaaatgaattgacgatattgttgataaaattcttcgtgaatttaatttgagttttggaatcaatattaattttaaaaacagatttactagcaatgaaaataataatttaattatttttaatttttatagcaatgatttgaaaattgctttggaagaattagatgatctaattttggatttaaatatttctgaaaagcaaaatttaatttcatttagatttgactttgattctgtttttcaagaaagtaaaagtatattaatggaaacatctgatggatttttcaacatgaaatcttttgaagttccatcgcacaataaagaatttgtaatcaaatgaaatggggacttaaaaaaaatagttaatgcaagaatccactataaatgtatgacttcagaggtttttggttcaattatgtgtgattgcaaagatcaattggaaagctttaatgaattaatgaaaaaagagggtggacttttactttatgcttatgaagaaggaagaggattcggaatgttacataaattaaatgcttattacaacactgaaaaagaaggtttagatactgttgatgccatgataaaagagacaggaaaaacagaagcaaggaaatttgatatggcaggagaaataataagaaaattaggaattaaagaagtcaatttatatacaaataatccaagaaaaataattcctttattagatagaagaatcaaagtaaataggaaaaaacattgaactgaaacaaagtctaaagaagcaaagaaatatactgaagataaaattaaaaaaatggagcatttagaataa

SEQ ID NO: 49385 - protein, 343 aa, Mycoplasma mobile 163K
MPFHFMKGLMIIKENNFKKFFLKLSLNEKYSDLVFTELKKYENQESEKTATYKFKISKKIILIEGKEDRILLRTLKWIDDIVDKILREFNLSFGININFKNRFTSNENNNLIIFNFYSNDLKIALEELDDLILDLNISEKQNLISFRFDFDSVFQESKSILMETSDGFFNMKSFEVPSHNKEFVIKWNGDLKKIVNARIHYKCMTSEVFGSIMCDCKDQLESFNELMKKEGGLLLYAYEEGRGFGMLHKLNAYYNTEKEGLDTVDAMIKETGKTEARKFDMAGEIIRKLGIKEVNLYTNNPRKIIPLLDRRIKVNRKKHWTETKSKEAKKYTEDKIKKMEHLE

SEQ ID NO: 49386 - DNA, 579 bp, Picrophilus torridus DSM 9790
  CDS (1)..(579): transl_table=11
atgatagagttctattctaaggcaaggctgccatcaaggtttggcagcttcgaaatatacgttttcaagaacgatgagaacaaggatcatgcggttatagttcatggtgatgtgagaggcaaaagtgatgttccggttagaatacacagcgagtgcctaaccggtgatgtccttggatcaatgaggtgtgactgccgtgaccagcttatagaatcactaaaatacataggaagccagccatacggcatgctaatatacatgaggcaggaggggcgtggcataggccttttaaacaagataagggcatacaatttacaggatcagggacttgacacagttgaggcaaatcttgagcagggccttcccgtggatgagagaaagtacgattatgccgttgatgtaataaagtactttaacatagagagcatccagcttataacaaacaatcctgaaaaactaaaataccttgaggagcacggcataaagataacaaagaggataccaataataataccaccaacaaagtttgatgaattttatctcgagacaaaaagggagaggatgggccatctattttga

SEQ ID NO: 49387 - protein, 192 aa, Picrophilus torridus DSM 9790
MIEFYSKARLPSRFGSFEIYVFKNDENKDHAVIVHGDVRGKSDVPVRIHSECLTGDVLGSMRCDCRDQLIESLKYIGSQPYGMLIYMRQEGRGIGLLNKIRAYNLQDQGLDTVEANLEQGLPVDERKYDYAVDVIKYFNIESIQLITNNPEKLKYLEEHGIKITKRIPIIIPPTKFDEFYLETKRERMGHLF

SEQ ID NO: 49388 - DNA, 1182 bp, Staphylococcus aureus subsp. aureus MRSA252
  CDS (1)..(1182): transl_table=11
atgcaattcgataatattgacagtgctttaatggctttaaaaaatggagaaacaattattgtagtagatgatgagaatcgtgaaaatgaaggtgatttagtagcggtcactgaatggatgaacgataataccattaattttatggcgaaagaagcaaggggattaatatgcgcaccagtgtctaaagatattgcacaacgtttggatttggtacaaatggttgatgataactccgacatctttggtacgcaatttacagtgagtattgatcatgtagatacaacaacaggaataagcgcttatgaacgtacattgactgccaaaaagctcattgatccaagtagtgaagctaaagattttaatcgtcctggtcatttatttccattagtagcacaagataaaggggtattagctcgtaatggtcatactgaagcggctgttgatttagctaaacttactggtgccaagcccgctggtgtcatttgtgagattatgaatgatgacggcacgatggcgaaaggacaagatttacaaaagtttaaagaaaaacataaattaaagatgattacgattgatgatttaattgaatatcgtaaaaaattagaaccagaaattgaatttaaggcaaaagtgaaaatgcctacagatttcggaacatttgatatgtatggttttaaagcgacttacacagatgaagagatagttgtactgacaaaaggtgcaattcgacaacatgaaaatgtacgcttacattctgcgtgccttacaggcgatattttccatagtcaacgttgtgattgtggtgctcaacttgaatcgtctatgaagtatatcaatgaacatggcggcatgattatttatctacctcaagaaggtcgtggcataggattgttaaacaaattacgcgcatatgaattaattgagcaaggatatgatacagtaactgcaaatttagcattaggttttgatgaagatttgcgagattatcatattgctgcacagattttaaaatattttaacatcgaacatatcaatttattaagtaataatccaagtaaattcgaaggattaaaacaatatggcattgatattgcagaaagaattgaagttatcgtaccagaaacggtacataatcatgattatatggaaacgaaaaaaataaaaatgggtcatttaatatag

SEQ ID NO: 49389 - protein, 393 aa, Staphylococcus aureus subsp. aureus MRSA252
MQFDNIDSALMALKNGETIIVVDDENRENEGDLVAVTEWMNDNTINFMAKEARGLICAPVSKDIAQRLDLVQMVDDNSDIFGTQFTVSIDHVDTTTGISAYERTLTAKKLIDPSSEAKDFNRPGHLFPLVAQDKGVLARNGHTEAAVDLAKLTGAKPAGVICEIMNDDGTMAKGQDLQKFKEKHKLKMITIDDLIEYRKKLEPEIEFKAKVKMPTDFGTFDMYGFKATYTDEEIVVLTKGAIRQHENVRLHSACLTGDIFHSQRCDCGAQLESSMKYINEHGGMIIYLPQEGRGIGLLNKLRAYELIEQGYDTVTANLALGFDEDLRDYHIAAQILKYFNIEHINLLSNNPSKFEGLKQYGIDIAERIEVIVPETVHNHDYMETKKIKMGHLI

SEQ ID NO: 49390 - DNA, 603 bp, Acinetobacter sp. ADP1
  CDS (1)..(603): transl_table=11
gtggctattgagtttgtcgcgacgtctaaacttccgaccaagtttggtgacttcaatatttctgtgttccaagatccagtcacaggcgaagaacatgttgctctgtccaaaggtttagaaatagcaccaacaggcccagtactggttcgtatccattcagaatgtctgactggcgatgctttcgcttctctgaaatgtgattgcggcccacagttacaagcgactcaaaagctcatcaatgatgtgggacaaggtgttattttatatttgcgccaagaaggtcgcggaattggattaaccaacaaaattcgtgcctatgccttgcaggatcaaggacacgatacagtcgatgccaacttattgcttaatctgcctgcagatgctagacgttatgatatgtgcagtatcatgctcgatcatctacaagtgaaacaagtaaagttaatcaccaataatcctttaaaattaaaggcattgactgatttaggtattaatgtgatagaccgtgttccattaacagtcgggaaaaatccatttaatgaacagtatctaaaaacaaaaaaagaacgcatggcccatctttatcaaaaggatgacttctaa

SEQ ID NO: 49391 - protein, 200 aa, Acinetobacter sp. ADP1
MAIEFVATSKLPTKFGDFNISVFQDPVTGEEHVALSKGLEIAPTGPVLVRIHSECLTGDAFASLKCDCGPQLQATQKLINDVGQGVILYLRQEGRGIGLTNKIRAYALQDQGHDTVDANLLLNLPADARRYDMCSIMLDHLQVKQVKLITNNPLKLKALTDLGINVIDRVPLTVGKNPFNEQYLKTKKERMAHLYQKDDF

SEQ ID NO: 49392 - DNA, 594 bp, Erwinia carotovora subsp. atroseptica SCRI1043
  CDS (1)..(594): transl_table=11
atgcagctaaaacgggtggcggaagccaaattacccactccgtggggcgattttctgatggtgggttttgaagagatcgccacgggtcacgatcaccttgcactcgtctatggtgatatttccggttcagttcctgtactggctcgcgtgcattccgagtgcctgacgggggatgccctgtttagcctgcgctgcgactgtggtttccagcttgaggctgcattaggccacatcgccgaagaaggtcgcggcgtgctgttataccatcgtcaggaaggccgtaatatcgggttgctcaataaaatccgcgcttatgcgttgcaggatctgggggcagatacggtagaagcgaatcatcagcttgggttcgccgccgatgagcgcgattttacgctgtgtgcagatatgttcaaattgctggacgttgatgaagttcgcctgttgactaataatccacagaaagtgaaaatcctcaacgaagcaggcatcaatatcgtcgaacgtgtgccattaatcgtcggacgtaacccgaagaatgagcactatctggcaaccaaagccgccaaaatggggcacatactggatatgaaataa

SEQ ID NO: 49393 - protein, 197 aa, Erwinia carotovora subsp. atroseptica SCRI1043
MQLKRVAEAKLPTPWGDFLMVGFEEIATGHDHLALVYGDISGSVPVLARVHSECLTGDALFSLRCDCGFQLEAALGHIAEEGRGVLLYHRQEGRNIGLLNKIRAYALQDLGADTVEANHQLGFAADERDFTLCADMFKLLDVDEVRLLTNNPQKVKILNEAGINIVERVPLIVGRNPKNEHYLATKAAKMGHILDMK

SEQ ID NO: 49394 - DNA, 1278 bp, Leifsonia xyli subsp. xyli str. CTCB07
  CDS (1)..(1278): transl_table=11
atgagcctcgccaccattccggaggccctcgccgagctgcgcgccggtcggccgatcatcgtcgtggacaacgagagccgcgagaacgagggagatgtcgtcctggccgccgagctcgccagccaggagtggatcgcctggaccgtcaagaactcctccggcttcctctgcgccccgatgacgaacgagatcgccgaccgcctggagctgcccgtcatggtggcgaccaacgaggacacccgcggaaccaactacacggtgagcgtcgacgccgccgaccgcctctccacgggcatcagcgccggcgaccgcgcgcacacgctccgcgtgctcgccggcctggattcgaccccgagcagtctgcaccgcccggggcacatcctgccgctgcgcgcggcggagggtggcgtgcgcgagcgcgacggccacaccgaggccactgtcgacctgctcaaactggcgggtatgacgcccgtcggcgccatcgcggagatcgtgtccggcgacggcgagatgatgcgcctgcccggcctcatcgaactcggcgagcgcgaaggcatcctcgtcatcaccatcgaggcgttgatcgcttacctacaggagttccactgcgatcggcgactcgagtctccgacgcccgtccccgagtcgtcgcgcgtgatcttcgaggtggagacgaccgtcccgacgccgaacggtccgttccggatgcgcgcctaccgcgaccggatgaccggcgcggaccatgtcgccatcgtcgcaggctccccggacccgaccggcacgctggtgcgcgtccactccgagtgcctgaccggcgaggcattcggctcgctcaagtgcgagtgcggaccgcagctggacgccgcgctcgagaccgtccagcgcgagggcggcgtcgtcgtctacctgcgcggccacgagggccgcggcatcggcctgatcaacaagttgcgcgcctataaactgcaggaggacggcctggacaccctcgacgccaacctcgcgctggggctgccgatcgacgcgcgcgactacggggcggccaccgccatcctgcaagacctcggcatgcgctcggtccggctgctgacgaacaacccggagaaggtgcgccagctggaagagcacggcatcgaggtcgaggagcgcgtcgcgctcgtcgtgggtgtcggggcgttcaacgagggttacctggagaccaagcgcgaccggatgggtcacgctatcggagagatctaccagacggcgagcgccgcagagaggacgacacaatga

SEQ ID NO: 49395 - protein, 425 aa, Leifsonia xyli subsp. xyli str. CTCB07
MSLATIPEALAELRAGRPIIVVDNESRENEGDVVLAAELASQEWIAWTVKNSSGFLCAPMTNEIADRLELPVMVATNEDTRGTNYTVSVDAADRLSTGISAGDRAHTLRVLAGLDSTPSSLHRPGHILPLRAAEGGVRERDGHTEATVDLLKLAGMTPVGAIAEIVSGDGEMMRLPGLIELGEREGILVITIEALIAYLQEFHCDRRLESPTPVPESSRVIFEVETTVPTPNGPFRMRAYRDRMTGADHVAIVAGSPDPTGTLVRVHSECLTGEAFGSLKCECGPQLDAALETVQREGGVVVYLRGHEGRGIGLINKLRAYKLQEDGLDTLDANLALGLPIDARDYGAATAILQDLGMRSVRLLTNNPEKVRQLEEHGIEVEERVALVVGVGAFNEGYLETKRDRMGHAIGEIYQTASAAERTTQ

SEQ ID NO: 49396 - DNA, 1257 bp, Desulfotalea psychrophila LSv54
  CDS (1)..(1257): transl_table=11
ttgtctgagccgatttttatattttataaggaaagtgtgaacgttatggccgtaagttctattgaagaagcaattgaagatatcaaagcaggaaagatggttatcttggttgatgatgaagatcgagaaaatgaaggtgatctttgcatggccgcagagtttgttgctgccgctgacatcaactttatggcaacccatggtcgtggtcttatctgtctgaccttgactccaaagcttgttgatcagcttgccctgccaatgatggttcaagagaataagtctccgtacggtactggctttactattagtattgaggcgaagacaggcgtggaaacgggtatttctgcagctgatcgagcccgtactattcaggtcgccgtagcagatggtgccggaccacaggacttggtcagccctggacatgtttttcctcttcgtgctcgcgaaggtggtgtgctctgtcgtacaggacaaaccgagggatctgttgatcttgctcgtctttctggggcgactcctgccggtgttatttgtgaaatcatgaaggatgatggcaccatggcccgcatgccggatcttgagatttttgccgctgaacatgaattgaaaattgtaaccgtagcagatctggttgagtacagattgcgtcaggatttacttgttcaccgtcaggttgcggcgcgtattcccaccgctgatgcgggtgaatttaccgctattgtttataccaatgatgttgataattttgagcatttggctctggttaagggtgatcttgaggctgccgaagaagtacttgtgcgggttcattcagaatgtcttaccggtgatctctttggctctgctcgctgtgattgtggcccccaacttcatgaggccatgcgtatgattgaccgagccggttgtggtgttgtcctttatatgcgtcaagagggtcgtggtattggcctgattaacaaactgaaggcctataatcttcaggacaatcaaggccttgatactgtagaggcgaacatcgagcttggctttaaggcagatcttcgtgactatggtatcggtgctcagatattgcgtgatcttggtattaccaagatgtctcttcttaccaacaatccaaagaaaattatcggccttgagggttatggtattgaagtgatttctcgggtgcccattgaaattgaggcaagtgaggaaaatgaaggctatctgagatgtaagcgggataggatgggacatttgttgaatatgaaagagtag

SEQ ID NO: 49397 - protein, 418 aa, Desulfotalea psychrophila LSv54
MSEPIFIFYKESVNVMAVSSIEEAIEDIKAGKMVILVDDEDRENEGDLCMAAEFVAAADINFMATHGRGLICLTLTPKLVDQLALPMMVQENKSPYGTGFTISIEAKTGVETGISAADRARTIQVAVADGAGPQDLVSPGHVFPLRAREGGVLCRTGQTEGSVDLARLSGATPAGVICEIMKDDGTMARMPDLEIFAAEHELKIVTVADLVEYRLRQDLLVHRQVAARIPTADAGEFTAIVYTNDVDNFEHLALVKGDLEAAEEVLVRVHSECLTGDLFGSARCDCGPQLHEAMRMIDRAGCGVVLYMRQEGRGIGLINKLKAYNLQDNQGLDTVEANIELGFKADLRDYGIGAQILRDLGITKMSLLTNNPKKIIGLEGYGIEVISRVPIEIEASEENEGYLRCKRDRMGHLLNMKE

SEQ ID NO: 49398 - DNA, 1197 bp, Bacillus licheniformis ATCC 14580
  CDS (1)..(1197): transl_table=11
atgtttcacacaattgaagaagcgattcgcgatttgaagcagggaaaagtcatcatcgtagtcgatgacgagaacagggaaaacgaaggcgatttcgttgcgctggcggaatacgcaacacccgatgtaatcaactttatggcttcgcacggaagggggttgatctgcgcgccgctcaatgaagagatcgcttcccggcttgagctccaaccgatggtggacgaaaataccgattctcaccacacagcatttacggtcagtgtcgatcaccgcgatacaaagacggggattagcgctcaggagcggtcgctgaccgtcatgtcgctgatcgctgatcacgcgcatccgggtgattttaaaaggccggggcacattttccccctgatcgcgaaaaaaggcggcgttttaaaaagagccggacatacggaggcggccgttgaccttgcagaagcgtgcgggtccgcgccggccggcgtcatctgcgaaatcatgaatgaagacggcacgatggcaagggtgcctgaactcaaaaaaatagccgatcagcacggcttgaaaatgatcacgattaaagatttgatcgaataccgctacagcaagggaacgctgatcaaccgggaagtgaaaattacgctgccttccgaattcggtaccttcaaggtttacggctatacaaacgaaatcgatgacaaagaacatatagcactcgtcaaaggcgacatacctttcggtgacgagcctgtgcttgtccgggtacactcagaatgcctgacgggcgatgttttcggctcttaccgctgcgactgcggcccgcagcttgccgctgcgctcgcgcaaatcgaacaagcgggccggggcgtactcctgtatttgagacaggaaggaaggggaatcggcttaatcaataaactgaaagcttataagctgcaggaagaaggatacgacaccgtacaggctaacgaaaagctcggttttcttccagaccttcgcaactacgggatcggcgcccaaatcttaagggacctcggcgtgaagcaaatgaagctgttaacgaacaacccgcgaaaaattgcaggtctcgaaggttacggcctgacgatcgcagacagggtgccgctgcagatggagacaaaaaaagataatgaaaagtatctaaaaacgaaaaaatcaaaattggggcatatgcttcatttttaa

SEQ ID NO: 49399 - protein, 398 aa, Bacillus licheniformis ATCC 14580
MFHTIEEAIRDLKQGKVIIVVDDENRENEGDFVALAEYATPDVINFMASHGRGLICAPLNEEIASRLELQPMVDENTDSHHTAFTVSVDHRDTKTGISAQERSLTVMSLIADHAHPGDFKRPGHIFPLIAKKGGVLKRAGHTEAAVDLAEACGSAPAGVICEIMNEDGTMARVPELKKIADQHGLKMITIKDLIEYRYSKGTLINREVKITLPSEFGTFKVYGYTNEIDDKEHIALVKGDIPFGDEPVLVRVHSECLTGDVFGSYRCDCGPQLAAALAQIEQAGRGVLLYLRQEGRGIGLINKLKAYKLQEEGYDTVQANEKLGFLPDLRNYGIGAQILRDLGVKQMKLLTNNPRKIAGLEGYGLTIADRVPLQMETKKDNEKYLKTKKSKLGHMLHF

SEQ ID NO: 49400 - DNA, 1194 bp, Bacillus cereus E33L
  CDS (1)..(1194): transl_table=11
atgtttcatcgtattgaagaagctctagaagatttaaaacaaggaaaagtcgttatcgtatgtgatgatgaaaaccgtgaaaacgaaggcgattttatcgctttagcagagtatattacgccagaaacaattaactttatgattacacatggacgcggtctcgtttgtgtaccgattacagaaggatacgcagaacgtctacaattagaaccaatggtatctcataatacagattcgcatcatactgcatttacagtgagcattgaccatgtttctacaacaacaggcattagcgctcacgaacgtgcaactacgatacaacaattgttaaatcctgcatcaaaaggtgctgatttcaatcgacctggacatatctttccattaatcgcgaaagaaggcggtgtcctgcgtcgtgctggtcatacagaagctgctgtcgatttagcacagctctgcggggcagaaccagctggagtcatttgcgagattatcaatgaggacggtgcgatggcacgcgtccctgatttactacagtgcgcaaaacaatttgatataaaaatgattacaatagaagatttaattgcttatcgccgccatcatgaaacacttgtgacgagagaagtggaaattacattacctacagatttcggtacttttcaagcaattggctattctaactcattagatacgaaagaacatattgcactcgtaaaaggtgatatttcaacaggtgagcctgtacttgtacgcgttcattcagagtgcttaacaggagatgtatttggctcgtgccgctgtgattgcggaccacaactccatgctgcacttgcacaaattgagcgtgaaggaaaaggcgttcttctttatatgagacaagaaggacgaggcattggccttcttaataagcttcgcgcttataagttacaagaagaaggcttcgatactgtagaagcaaatgaaaagcttggttttcccgctgaccttcgtgattacggtatcggcgctcaaatattaaaagatttaggtttacaacatttacgattattaacgaataatccaagaaaaatcgctggcttacaaggttacgatttaacagttacggagcgcgtaccgttacaaatgccagcaaaagaagagaataaaacgtatttacaaacgaaagtaaacaaattaggacatttactaaacttataa

SEQ ID NO: 49401 - protein, 397 aa, Bacillus cereus E33L
MFHRIEEALEDLKQGKVVIVCDDENRENEGDFIALAEYITPETINFMITHGRGLVCVPITEGYAERLQLEPMVSHNTDSHHTAFTVSIDHVSTTTGISAHERATTIQQLLNPASKGADFNRPGHIFPLIAKEGGVLRRAGHTEAAVDLAQLCGAEPAGVICEIINEDGAMARVPDLLQCAKQFDIKMITIEDLIAYRRHHETLVTREVEITLPTDFGTFQAIGYSNSLDTKEHIALVKGDISTGEPVLVRVHSECLTGDVFGSCRCDCGPQLHAALAQIEREGKGVLLYMRQEGRGIGLLNKLRAYKLQEEGFDTVEANEKLGFPADLRDYGIGAQILKDLGLQHLRLLTNNPRKIAGLQGYDLTVTERVPLQMPAKEENKTYLQTKVNKLGHLLNL

SEQ ID NO: 49402 - DNA, 660 bp, Mannheimia succiniciproducens MBEL55E
  CDS (1)..(660): transl_table=11
atgtcaaaaattcaacgtgttgcagaagccaatcttcccaccgagtttgggcttttccgcattgtaggatttgaatttccggatactaaaaaagaacatgtggcactggtaatgggcgatattagcaatagtgaagaaaaccccgtgttagcccgtattcattccgaatgcttaaccggcgatgcattacacagcttaaaatgcgattgcggttttcaactgagcacagcattacgtcaaatcagcgaagcggggcgcggcgtattgatttaccatcgcgaagaagggcgaggaatcggcttaatcaacaaaatccgggcatattcattgcaagataacggaatggatactatcgaagcaaatctggcgctgggctttgccgccgacgaacggaatttcaaagtttgcgcggatatttttgaattattaggtatctgcaaggttcgcctgttaacaaacaaccccgcaaaaatcgacaccatgaaaaaagcgggcatcaacgtagttgaacgaattccgctaaatgtcggcgaaaaccgctacaacaccggatatctggacaccaaagcaaaaaaaatgggccattacatcgtacacgacaatgaaaaacattatttagattgcccgtattgccaatctgaaatccccaataagaaataa

SEQ ID NO: 49403 - protein, 219 aa, Mannheimia succiniciproducens MBEL55E
MSKIQRVAEANLPTEFGLFRIVGFEFPDTKKEHVALVMGDISNSEENPVLARIHSECLTGDALHSLKCDCGFQLSTALRQISEAGRGVLIYHREEGRGIGLINKIRAYSLQDNGMDTIEANLALGFAADERNFKVCADIFELLGICKVRLLTNNPAKIDTMKKAGINVVERIPLNVGENRYNTGYLDTKAKKMGHYIVHDNEKHYLDCPYCQSEIPNKK

SEQ ID NO: 49404 - DNA, 1218 bp, Bacillus licheniformis ATCC 14580
  CDS (1)..(1218): transl_table=11
atgaaaggaggctgtgcgtctatgtttcacacaattgaagaagcgattcgcgatttgaagcagggaaaagtcatcatcgtagtcgatgacgagaacagggaaaacgaaggcgatttcgttgcgctggcggaatacgcaacacccgatgtaatcaactttatggcttcgcacggaagggggttgatctgcgcgccgctcaatgaagagatcgcttcccggcttgagctccaaccgatggtggacgaaaataccgattctcaccacacagcatttacggtcagtgtcgatcaccgcgatacaaagacggggattagcgctcaggagcggtcgctgaccgtcatgtcgctgatcgctgatcacgcgcatccgggtgattttaaaaggccggggcacattttccccctgatcgcgaaaaaaggcggcgttttaaaaagagccggacatacggaggcggccgttgaccttgcagaagcgtgcgggtccgcgccggccggcgtcatctgcgaaatcatgaatgaagacggcacgatggcaagggtgcctgaactcaaaaaaatagccgatcagcacggcttgaaaatgatcacgattaaagatttgatcgaataccgctacagcaagggaacgctgatcaaccgggaagtgaaaattacgctgccttccgaattcggtaccttcaaggtttacggctatacaaacgaaatcgatgacaaagaacatatagcactcgtcaaaggcgacatacctttcggtgacgagcctgtgcttgtccgggtacactcagaatgcctgacgggcgatgttttcggctcttaccgctgcgactgcggcccgcagcttgccgctgcgctcgcgcaaatcgaacaagcgggccggggcgtactcctgtatttgagacaggaaggaaggggaatcggcttaatcaataaactgaaagcttataagctgcaggaagaaggatacgacaccgtacaggctaacgaaaagctcggttttcttccagaccttcgcaactacgggatcggcgcccaaatcttaagggacctcggcgtgaagcaaatgaagctgttaacgaacaacccgcgaaaaattgcaggtctcgaaggttacggcctgacgatcgcagacagggtgccgctgcagatggagacaaaaaaagataatgaaaagtatctaaaaacgaaaaaatcaaaattggggcatatgcttcatttttaa

SEQ ID NO: 49405 - protein, 405 aa, Bacillus licheniformis ATCC 14580
MKGGCASMFHTIEEAIRDLKQGKVIIVVDDENRENEGDFVALAEYATPDVINFMASHGRGLICAPLNEEIASRLELQPMVDENTDSHHTAFTVSVDHRDTKTGISAQERSLTVMSLIADHAHPGDFKRPGHIFPLIAKKGGVLKRAGHTEAAVDLAEACGSAPAGVICEIMNEDGTMARVPELKKIADQHGLKMITIKDLIEYRYSKGTLINREVKITLPSEFGTFKVYGYTNEIDDKEHIALVKGDIPFGDEPVLVRVHSECLTGDVFGSYRCDCGPQLAAALAQIEQAGRGVLLYLRQEGRGIGLINKLKAYKLQEEGYDTVQANEKLGFLPDLRNYGIGAQILRDLGVKQMKLLTNNPRKIAGLEGYGLTIADRVPLQMETKKDNEKYLKTKKSKLGHMLHF

SEQ ID NO: 49406 - DNA, 645 bp, Burkholderia mallei ATCC 23344
  CDS (1)..(645): transl_table=11
atgaacgatggtcgaatttccccaacgatgagcgcgtccgtccgtacgcgcgtcaatgtgcccattcgtccgcgcaccgcgcaacagcggttcgacgccgaaatggtcacgttccagggcttgtgcgacagcgccgagcatctcgcgctcgttttcgggccgctcgccgacgcgccgctcgtgcgcgtgcattccgagtgcctgacgggcgacgtgttcggctccgcgcgctgcgattgcggcgagcagctcgacgagtcggtcgcgatgttcggccgtgaaggcggcatcctgctctatctgcgccaggaggggcgcggcatcgggctgtacaacaagctcgacgcgtaccgcctgcagatctcgcagggcctcgacacgttcgcggcgaaccgcgcgctgaatttccccgacgacctgcgcgatttccgcgtcgccgcgcaaatgctgcaggcgctcggcgtcaccgagatctcgctcgtcaccaacaacccggacaaggtctcgcagatcgagaagcacggcatccggatccggcgcgtgctgcagacgggcgtgttcgtcaacaccacgaaccacggctacctgcgcgcgaagatcgatcaccaccgccacgccatcaacctcagccaggaactgcaatga

SEQ ID NO: 49407 - protein, 214 aa, Burkholderia mallei ATCC 23344
MNDGRISPTMSASVRTRVNVPIRPRTAQQRFDAEMVTFQGLCDSAEHLALVFGPLADAPLVRVHSECLTGDVFGSARCDCGEQLDESVAMFGREGGILLYLRQEGRGIGLYNKLDAYRLQISQGLDTFAANRALNFPDDLRDFRVAAQMLQALGVTEISLVTNNPDKVSQIEKHGIRIRRVLQTGVFVNTTNHGYLRAKIDHHRHAINLSQELQ

SEQ ID NO: 49408 - DNA, 597 bp, Burkholderia mallei ATCC 23344
  CDS (1)..(597): transl_table=11
gtgacgctcgtcgccaccgcgacgcttcctacccgctacggcacgttcacgtcgtatgcgtttcgcgtggcgggcggcgatgccgagcacctcgcgctcgtgatgggcgacgtcgccgagcagccgtcggtgctgacgcggcttcattccgagtgcctgacgggtgacgtgttcggctcgtatcgatgcgattgcggcgagcagctcgatctctcgctgcgctacatcgcggccgaagggcgcggcgtattgctgtatctgcgcggccacgaaggccgcgggatcggcctgagcaacaagatccgcgcgtatgcgctgcaggagcaggggcgcgacaccgtcgaggcgaacctcgacctcgggctacccgacgacgcgcgcgaatacgattccgccgccgcgatcctgcgcatcctgaaagtcacgtccgtgcgactgatgagcaataatccgaagaagttcgacacgctcgcgcggcacggtatcccggtctgcgagcgcgtcgcgctcgccgtgccggtgcgcgaggagaacgagcgctatatccgcacgaagcagctcaagttcggccactattatttcgacgaaaacgaatag

SEQ ID NO: 49409 - protein, 198 aa, Burkholderia mallei ATCC 23344
MTLVATATLPTRYGTFTSYAFRVAGGDAEHLALVMGDVAEQPSVLTRLHSECLTGDVFGSYRCDCGEQLDLSLRYIAAEGRGVLLYLRGHEGRGIGLSNKIRAYALQEQGRDTVEANLDLGLPDDAREYDSAAAILRILKVTSVRLMSNNPKKFDTLARHGIPVCERVALAVPVREENERYIRTKQLKFGHYYFDENE

SEQ ID NO: 49410 - DNA, 1116 bp, Methylococcus capsulatus str. Bath
  CDS (1)..(1116): transl_table=11
atgacgctgaatacgatcgaagaaatcatagaagacatccgccaaggcaggatggtcgtcatcatggacgatgaggaccgggaaaacgaaggcgatctcgtcatggcggcggggcatgtgcggccggaggacatcaacttcatggcgcgttatggccggggtctgatctgtctgacactgactcgtgagcgctgccagcagttgcggctgcccttgatggtgaatgagaaccggacgccgcattcgaccaatttcacggtgtcgatcgaagccgccaccggtgtcaccacgggtatttcggccagcgaccgggcgcgtaccatccagtgcgccgtcgctccggacgccaggcccgacgatctggtccagccgggccatatcttcccgctcatggcgcaacccggcggggtgctcaaccgtgccggacacacggaggcgggctgcgacctggcgcgcctggccggcctggtaccggcggctgtcatcgtcgaaatcctcaacgaggacggttcgatggcgcggcgtgccgacctggaaaagtttgcggccgtccatggcctcaagatcggcaccatcgccgacctgatccattaccggatgcagaacgagcagaccgtggaacgcatctgcgaatgcgatttcccgaccgaacacggtcgcttccgcctccacgcctatcaggaccgtctggacaacaaactgcatctcgccctgacgctgggcgacgtcgccggcggcgagccggtgctggtaagggtccatggccgcaatctgctgaccgatttgttcggggtgaggcgcggcgacatcggtatctccctgcgcgcggccatgaagcggatcgccgacgaggggcgtggcgtgctcgtcgtgatccgcaacgaggaagacgatcgttgcttggtggagcgcatacatcagtaccagatggaggaccacggtgtggacatcggccagcgcgaggaccctggcgtggactggcgcacgaccggaaccggagcgcagattctcgccgacctgggcgtgcgcaaactgcgggtactgggcgcgcacaagaaatatttggggctttccggctacgggctggaagtcgtggactacgtgacaaccgactga

SEQ ID NO: 49411 - protein, 371 aa, Methylococcus capsulatus str. Bath
MTLNTIEEIIEDIRQGRMVVIMDDEDRENEGDLVMAAGHVRPEDINFMARYGRGLICLTLTRERCQQLRLPLMVNENRTPHSTNFTVSIEAATGVTTGISASDRARTIQCAVAPDARPDDLVQPGHIFPLMAQPGGVLNRAGHTEAGCDLARLAGLVPAAVIVEILNEDGSMARRADLEKFAAVHGLKIGTIADLIHYRMQNEQTVERICECDFPTEHGRFRLHAYQDRLDNKLHLALTLGDVAGGEPVLVRVHGRNLLTDLFGVRRGDIGISLRAAMKRIADEGRGVLVVIRNEEDDRCLVERIHQYQMEDHGVDIGQREDPGVDWRTTGTGAQILADLGVRKLRVLGAHKKYLGLSGYGLEVVDYVTTD

SEQ ID NO: 49412 - DNA, 1245 bp, Nocardia farcinica IFM 10152
  CDS (1)..(1245): transl_table=11
gtgaccaggttcgacaccatcgagcgcgcagtcgccgacatcgccgccggtaaggcggtcgtcgtcgtcgacgacgaggaccgcgagaacgagggcgacctcatcttcgcggcggagaaggccacccccgaactggtcgccttcatgatccgctacacctccggctacatctgtgtgccgctcaccggtgaggactgcgatcggctcggcctgccgccgatgtatgcgaccaaccaggacaagcacggcaccgcctacacggtctcggtcgacgcgcgcgagggcatcaccaccggaatctcggcggccgaccgggccaccaccatgcggctgctcgccgacgccgacgcgaaggccgacgacctgacccgccccggccacgtcgtgccgttgcgcgccaaggacggcggcgtgctgcgccgccccggccacaccgaggcggccgtggacctggcgcggatggccgggttgcggccggccggcgtgatctgcgagatcgtcagccagaaggacgagggccacatggcccgcaccgaggaactgcgcgtgttcgccgacgaccacgatctggcgctgatctcgatcgcggacatgatcgcctggcggcgcaagcacgagaagcaggtggtgcgggtcgccgaggcgcgcatccccaccgcgcacggcgcgttcaccgcggtcggctaccagagcatctacgacgatgtcgaacacgtcgccctggtgcgcggcgacatcggcgacggcgaggacgtgctggtgcgcgtgcactccgaatgcctcaccggtgacgtgttcggttcgctgcgctgcgactgcgggccgcaactggacgcggccctggagatggtggaccaggaaggccggggcgtcgtgctgtacatgcgcgggcacgagggccgcggcatcggcctgatgcacaagctgcaggcctaccagttgcaggactccggccgcgacaccgtcgacgccaacctggatctcggtctgcccgccgatgcccgcgactacggcaccggcgcccagatcctggtggacctgggcatccggtcgatgcgcctgctgaccaacaaccccgccaagcgggtcggcctggacggctacggcctcaccatcaccgaacgggtgccgatgcccctgcgcgccaacgccgagaatctgcgctacctgcgcaccaagcgcgaccgcatggggcacgacctggtcgggctcgacgatctggatctgggagagaccgcacagtga

SEQ ID NO: 49413 - protein, 414 aa, Nocardia farcinica IFM 10152
MTRFDTIERAVADIAAGKAVVVVDDEDRENEGDLIFAAEKATPELVAFMIRYTSGYICVPLTGEDCDRLGLPPMYATNQDKHGTAYTVSVDAREGITTGISAADRATTMRLLADADAKADDLTRPGHVVPLRAKDGGVLRRPGHTEAAVDLARMAGLRPAGVICEIVSQKDEGHMARTEELRVFADDHDLALISIADMIAWRRKHEKQVVRVAEARIPTAHGAFTAVGYQSIYDDVEHVALVRGDIGDGEDVLVRVHSECLTGDVFGSLRCDCGPQLDAALEMVDQEGRGVVLYMRGHEGRGIGLMHKLQAYQLQDSGRDTVDANLDLGLPADARDYGTGAQILVDLGIRSMRLLTNNPAKRVGLDGYGLTITERVPMPLRANAENLRYLRTKRDRMGHDLVGLDDLDLGETAQ

SEQ ID NO: 49414 - DNA, 1209 bp, Legionella pneumophila str. Paris
  CDS (1)..(1209): transl_table=11
atgaaacattcattagcaacaatagaagaggctgtggcgacacttaaagccggtaaaatgattattctaatggatgatgaagatagagagaatgaaggtgatttggtgattgctgctgagcacgctactcctgaagccattaattttatgtctcgtcttggttgtggtttaatttgtttgcctatggctgaagaattgatagacaaaatccagctgcccatgatggctcggcataacaaatcgccgtatggtacggcgtttacggtttcgattgaagcagctaacggtgtctccacaggcatctcagcaagagacagagctcgaacaattcaagtggctattgatccaaaaagtgggccatctgatatcatttcacctggacatgtttttcctttacgggctagaaagagaggagttttagaaagaccaggtcaaacagaaggtagtgttgatttggtaagacttgccggattgaccccggcggcagtgatttgtgagatcattaatgaagatggaacaatgagcagacgtgatgaattagctcttttttcaaaaaaacatcaaatacctttagtcaccattaaagatttgattaattaccgaattcgtcacgaaaatcttattaatcctgtcgcaaccactcagattcctctggaggagaatggtgtttttactatgactgtttttgagaatcagatagattccggtgaacattttgtcttggttaaaccccctttgtatggtaatcaagtgcctttggttcgaattcattctgagtgcataacaggtgatgtttttggctccagaaaatgtgattgtggaaagcaactggagttgtctttatcccagatcggagctgaaggtggtatattaatttatttgcgtcaggaaggccgtggaataggtttggcaaacaaattaaaggcgtatgctttgcaagagcaggggtttgatacagtcgatgctaatctggaattaggattgcccgctgacgatagagattatgccgtagcataccaaatactgaaatatttgggggttgacgcattaaggttgctgacaaataatcctttaaaaatagcttctcttgagcgttacggaatgaaaattactcaacgtattcctttggaaattaagccctccagagaaaatcactgttatttaaaaaccaaaaaaataaagctggggcatttattagccattgattag

SEQ ID NO: 49415 - protein, 402 aa, Legionella pneumophila str. Paris
MKHSLATIEEAVATLKAGKMIILMDDEDRENEGDLVIAAEHATPEAINFMSRLGCGLICLPMAEELIDKIQLPMMARHNKSPYGTAFTVSIEAANGVSTGISARDRARTIQVAIDPKSGPSDIISPGHVFPLRARKRGVLERPGQTEGSVDLVRLAGLTPAAVICEIINEDGTMSRRDELALFSKKHQIPLVTIKDLINYRIRHENLINPVATTQIPLEENGVFTMTVFENQIDSGEHFVLVKPPLYGNQVPLVRIHSECITGDVFGSRKCDCGKQLELSLSQIGAEGGILIYLRQEGRGIGLANKLKAYALQEQGFDTVDANLELGLPADDRDYAVAYQILKYLGVDALRLLTNNPLKIASLERYGMKITQRIPLEIKPSRENHCYLKTKKIKLGHLLAID

SEQ ID NO: 49416 - DNA, 1104 bp, Photobacterium profundum SS9
  CDS (1)..(1104): transl_table=11
atgggtttaagcactgcgaaagaaattattgatgatattcgccatggtaagatggttatcttgatggatgatgaagatcgtgaaaatgaaggcgatcttatcattgcagcagagaaaattacgccagaagctgttaacttcatggcaatgttcggtcgtggtttgatttgcctaacgttaacacatgcacgttgtaagcaactcagcctgccattaatggtacaagacaatactgaacagtttagcactaacttcactgtttctattgaagccgccgttggcgttacaaccggtatttcagccgcagatcgtgcaacaacagtacaagccgctgttgccccgaatgccagcttttctgatatcgtgatgccgggacatatcttcccattaatggcacaagaaggtggcgtacttagccgtgctggtcatactgaagcaggttgtgatattgcgcgtttagcaggtcttgagccttcaagtgttattgtggaaattctaaatgaagatggcacaatggcacgtcgtcctcagttagaagtatttgctgaaaagcatggtttgaagctaggtacgatagctgaccttatcgaatatcgtaataacaacgaaaccacgattgaacgaattgcagaatgccgtttaccaacagagtttggtgagttcgatatgattacgtaccgtgatactatcgataatgaaattcactatgcattgcgtagtggtgatgtgaaagaaaatgcagaaacgttagtacgtgttcatttgcaagacacgtttaaagatgttttacattcaggtgcatcgcaatggacattgcctactgcaatgcaacgcattgcttctgaaggtggtgtgttggttgtgctgagcaagcaagaaaatcatgacacgattatcacgaaagtgaaaaaccttgcggcgaacgataacggacagccgaaagtgaaattgaacccgaaagatcaatctcgtcaggttggtgtgggctctcagattttatcggatttaggcgtttcaaaaatgcgtctgcttgcatcaagtacacaacgttatcattcactttcaggttttggcctagaagttgtagaatatatttgtgaataa

SEQ ID NO: 49417 - protein, 367 aa, Photobacterium profundum SS9
MGLSTAKEIIDDIRHGKMVILMDDEDRENEGDLIIAAEKITPEAVNFMAMFGRGLICLTLTHARCKQLSLPLMVQDNTEQFSTNFTVSIEAAVGVTTGISAADRATTVQAAVAPNASFSDIVMPGHIFPLMAQEGGVLSRAGHTEAGCDIARLAGLEPSSVIVEILNEDGTMARRPQLEVFAEKHGLKLGTIADLIEYRNNNETTIERIAECRLPTEFGEFDMITYRDTIDNEIHYALRSGDVKENAETLVRVHLQDTFKDVLHSGASQWTLPTAMQRIASEGGVLVVLSKQENHDTIITKVKNLAANDNGQPKVKLNPKDQSRQVGVGSQILSDLGVSKMRLLASSTQRYHSLSGFGLEVVEYICE

SEQ ID NO: 49418 - DNA, 1053 bp, Photobacterium profundum SS9
  CDS (1)..(1053): transl_table=11
atggttgaagacataaaattttatgagccagaagataatcacggttttttatccaactttgctttaagtcctataacactgagtgatgtggtatggccgagtagtgaacattattatcaagctcaaaaatttacagatctaagtattcaaaataaaatattaaatgcaaaaacaccggatgaggcttttaaaattagtcgtgattttgctgaacaagaaaaagatgattggatggaagttcgtggtgctgtaatgcgatttattgtattcgaaaaatttcgtcagaatacatattttacgcacctattagtcagtactggtgatcatgttcttaaagagcactcgcataaagatgattactggggagacggtggcgacggaagtggcagaaatgagttaggtaaaattctcatggatgttcgagagtattttgctaaaaaagaaccttttaaccttgttcattttgttgatagtgcaaagctgccgactcaatggggcacatttcaaatgtatggcttcattgaggtgaagacggggaaagaacatcttgcccttgtttatggtcaaccaacccctggtgagcctactcttatccgcttacattctgaatgtctaacaggcgatgcattatttagtcaacgttgtgattgtggttttcaactagctcgcgcaatggagaatatcgttaagaaaggatctggggtcctattatatttgaagcaagaagggcgaggcatcggtttaattaataagattcgcgcttatcacctgcaagacgaaggagcagatacagtagaagctaacgaaaggttaggctttgcagctgatatgcgtgattatgccttctgtagaggaatgctaagttttcttaatattgaatcagttagtttaatgacaaataatccacgtaagattaatgcactgactgataacggtattaatgttgttgaacgtgtcaccttgcaagaaggtaataacccttttaatgaaggttaccttaaaacaaaatcagccaaactaggccatatgtttgatgcggaatttattaagtaa

SEQ ID NO: 49419 - protein, 350 aa, Photobacterium profundum SS9
MVEDIKFYEPEDNHGFLSNFALSPITLSDVVWPSSEHYYQAQKFTDLSIQNKILNAKTPDEAFKISRDFAEQEKDDWMEVRGAVMRFIVFEKFRQNTYFTHLLVSTGDHVLKEHSHKDDYWGDGGDGSGRNELGKILMDVREYFAKKEPFNLVHFVDSAKLPTQWGTFQMYGFIEVKTGKEHLALVYGQPTPGEPTLIRLHSECLTGDALFSQRCDCGFQLARAMENIVKKGSGVLLYLKQEGRGIGLINKIRAYHLQDEGADTVEANERLGFAADMRDYAFCRGMLSFLNIESVSLMTNNPRKINALTDNGINVVERVTLQEGNNPFNEGYLKTKSAKLGHMFDAEFIK

SEQ ID NO: 49420 - DNA, 1200 bp, Thermus thermophilus HB8
  CDS (1)..(1200): transl_table=11
atggaagggatcgccagcgtcaaggaacttctggaggagctcaaggcgggccgccccgtgatcttggtggacgacgaggaccgggagaacgagggcgacctgatcatggcggcggagcacgtgaccccggagtgggtgaacttcatgctcaaggagtgccggggcctcctctgcgtggccctcacggaggagagggccaaggccctggacctccccctcatggtggagaggaaccaggacccccagggcacccgcttcaccgtgagcgtggacgcccgggggacgaccacggggatcagcgcctttgagcgggcggccaccatccggctcctcgccgaccccgaggccacggcccaggacttccgccgcccggggcacgtctttcccctggtggcgaggcccgggggggtcttgcgccgcgccgggcacacggaggccacggtggacctgttgcgcctcgccggcctcaccccggtgggcagcctcattgagatcctcaaggaggacggcaccatggcccgcctgcccgacctcctggccttcgctaggaggcacggcctcaaggtgggcaccatcgccgacctcatccgctaccgcctggagaagggggacctctacgtgcggcgggaggcggaggccctccttcccacccgctttggggagttccgcatcctgggctaccgcgacaccctcacgggggaggagcacgccgccttggtcatgggaagctgggcgccggaggagcccgtcctcgtgcgcatgcactccgagtgcctcaccggggacgccctccactccctgcggtgcgactgcggcttccagagggacctggccctacagcggatcgccgaggaggggaagggggtcttggtctacctgaggcaggaggggcgggggatcggcctcgtgaacaagatcaaggcctaccacctccaggaccaagggctggacacggtggaggccaacctggccctggggtttcccccggacctccgggactacggcgtgggggcccagatcctctacgacctcggggtgcggaagatgcgcctcctcaccaacaacccgcgcaaggtccgggccctctccggcttcggcatagagatcgtggagcgcatccccttgagggccggggacaacccccacaacgagcgctacctccaggccaagaaggagaagctcgggcactggatggattga

SEQ ID NO: 49421 - protein, 399 aa, Thermus thermophilus HB8
MEGIASVKELLEELKAGRPVILVDDEDRENEGDLIMAAEHVTPEWVNFMLKECRGLLCVALTEERAKALDLPLMVERNQDPQGTRFTVSVDARGTTTGISAFERAATIRLLADPEATAQDFRRPGHVFPLVARPGGVLRRAGHTEATVDLLRLAGLTPVGSLIEILKEDGTMARLPDLLAFARRHGLKVGTIADLIRYRLEKGDLYVRREAEALLPTRFGEFRILGYRDTLTGEEHAALVMGSWAPEEPVLVRMHSECLTGDALHSLRCDCGFQRDLALQRIAEEGKGVLVYLRQEGRGIGLVNKIKAYHLQDQGLDTVEANLALGFPPDLRDYGVGAQILYDLGVRKMRLLTNNPRKVRALSGFGIEIVERIPLRAGDNPHNERYLQAKKEKLGHWMD

SEQ ID NO: 49422 - DNA, 1197 bp, Geobacillus kaustophilus HTA426
  CDS (1)..(1197): transl_table=11
ttgatgtttgacacgattgaagcagcgctttcggcgctgaaaaacggagaagtgatcatcgtttgcgatgacgaagaccgcgaaaatgaaggcgattttgtcgtgctggccgaaaaagctactccggatgtcattaactttatgatcactcatggccgcgggctcgtctgcgtgccgattacggaggaattggcggagcggctcgagcttgagccgatggtcactcataacacggacgcgcatggcacagcgtttacggtgagtgtcgactacaaaacgacaacgacgggaatcagcgcctacgagcgggcggcgacgattcaggcgctgcttgatccgaatgtgaaagcgagcgattttaaacgtcctggccacgtttttccgttgattgcgaaaaagggaggcgtcttgcggcgcgccggccatacagaagcggcggttgatttggcccgtttgtgcggcgcgaagccggccggcgtcatttgcgaaatcattaaagaggacgggacgatggctcgcgttcctgatttgcggcaaatcgccgaccagttcggattgaaaatgatcacgatcaaagatttgatcgcctatcggagccagcgggaaaagctcgtgaaacgggaggtggacgtttggctgccgaccgaattcggcgaatttcgcgccatcggctacacaaacgtgctcgacggaaaagagcatgtggcgcttgtcaaaggagagatcatcccggatgagccgatcttggtgcgcgtccattccgaatgcttaactggcgatgtgtttggctcgtaccggtgcgactgcggtccgcagctgcatgcggcgctcaggcaaatcgaggcggaagggcgcggggtgttgctttacatgcgccaagaagggcgcggcatcggccttatgaacaagttgcgcgcttacaagctgcaggagcaaggttatgacaccgtcgaggcgaacgaaaagctcggcttccccgccgatttgcgcgattatggcatcggggcgcaaattttgaaagatcttggcgtgacgaaaatgcgcctgctcacgaacaacccgcgcaaaatcgccggcttaaaagggcatggactcgaagtcgttgaacgggtgcccattcagatgccagcgaaaaaggaaaatgaaaaatatttgcgcacgaaacatgaaaaattaggacatatgcttcatttttaa

SEQ ID NO: 49423 - protein, 398 aa, Geobacillus kaustophilus HTA426
MMFDTIEAALSALKNGEVIIVCDDEDRENEGDFVVLAEKATPDVINFMITHGRGLVCVPITEELAERLELEPMVTHNTDAHGTAFTVSVDYKTTTTGISAYERAATIQALLDPNVKASDFKRPGHVFPLIAKKGGVLRRAGHTEAAVDLARLCGAKPAGVICEIIKEDGTMARVPDLRQIADQFGLKMITIKDLIAYRSQREKLVKREVDVWLPTEFGEFRAIGYTNVLDGKEHVALVKGEIIPDEPILVRVHSECLTGDVFGSYRCDCGPQLHAALRQIEAEGRGVLLYMRQEGRGIGLMNKLRAYKLQEQGYDTVEANEKLGFPADLRDYGIGAQILKDLGVTKMRLLTNNPRKIAGLKGHGLEVVERVPIQMPAKKENEKYLRTKHEKLGHMLHF

SEQ ID NO: 49424 - DNA, 1134 bp, Anaplasma marginale str. St. Maries
  CDS (1)..(1134): transl_table=11
ttggaagttcgagtcttcttaaccgcaccatctcgtgggtctcaagtgaatttgataggcagagttttcggctttggcaacaatctggtagagagggcggtgttggagataaggcgctgcgcgccggttatcctccacaagagcggcaggtatgcgttggttttccctagcgaactgtcggaggaccactccttcgccacattaaccgagttttccagtaagttgcacctactgctaactgtcaggagaatggctgcagtcgcaggtgggcgtgcgctgtccagcgcgctggcaaacggtttcacactagcagatattgcagctgcgctatctactagcacaagtctgccacctggtgtgcaggttacaagcagcagtagcccgttagatggccacgcgatagacctaatgaagctagcaaagttgcttccttccgctctgatcgcagacatggagtttgcgcatgatggggaaatggagcagtggtgcgcgcaaaataacatactgtgtttggcatgcgatgcactgtctggctatcgtaaggagtatagcttgcgcgaggtttgccgctctgatctttgtctgaacaacgcaccggcttctaagatacttgtgtacaggtcaaacttaggagaaccggaacactatgcaattatcataggcgatccaagctttgagaaccccgtggtaaggttgcactcgtcgtgctacacgggagatctactgggcagcatttcgtgcgactgtagaggccaattactgcacaccatacagttcttgggcagtggaagtggcggcatagtgttatatatctctcaagagggaagaggaatagggctagcgaacaaaatacgcgcctataacttgcaaacgcagaacgctctggataccgtagacgcgaataggtttcttggattcgatgatgacgaaagagtcttcctgccagcagcgcgcattcttgacgagctgggaatctcaaagtttcagatgctaaccagcaaccccagcaaggtatctagtatgtgtgatcatggattcactgtcacaaaaatgatacccctttcggtcggaactcacgaacgcaatattgactacataaaaacaaaaatagaacgcctagggcacgttaattga

SEQ ID NO: 49425 - protein, 377 aa, Anaplasma marginale str. St. Maries
MEVRVFLTAPSRGSQVNLIGRVFGFGNNLVERAVLEIRRCAPVILHKSGRYALVFPSELSEDHSFATLTEFSSKLHLLLTVRRMAAVAGGRALSSALANGFTLADIAAALSTSTSLPPGVQVTSSSSPLDGHAIDLMKLAKLLPSALIADMEFAHDGEMEQWCAQNNILCLACDALSGYRKEYSLREVCRSDLCLNNAPASKILVYRSNLGEPEHYAIIIGDPSFENPVVRLHSSCYTGDLLGSISCDCRGQLLHTIQFLGSGSGGIVLYISQEGRGIGLANKIRAYNLQTQNALDTVDANRFLGFDDDERVFLPAARILDELGISKFQMLTSNPSKVSSMCDHGFTVTKMIPLSVGTHERNIDYIKTKIERLGHVN

SEQ ID NO: 49426 - DNA, 654 bp, Azoarcus sp. EbN1
  CDS (1)..(654): transl_table=11
atgcacaccgcggatacccgaaacgccgggccggttgcgagcaccgatgaaaccgaccagcggaacacccgcctggtcgcttcatgccggttgccgaccccctgggcaattttccggatgcacggcttcgaagagccggcgaccgggcgcgagcatgtcgcgctgacgcttggagcagtcgccgatggcaaacccgtgctgacccgcgttcactccgagtgcctcaccggcgacgccctgttcagccggcgctgcgactgcggcccgcaactcgaagcggcgctcgcggcgatcgctgccgaagggcgcggcgtcctgctgtacctgcgacaggaaggccgcggcatcggcctgctgaacaaggtccgcgcctatgcgctgcaggacgaaggggcggacaccgtcgaagccaatcacctcctcggcttcgacgccgacacgcgcgattacgccgtcgccgcctcgatgctgggcgagctcggcatcgcctcgttgcggctgatgacgaacaatccacgcaaggtcgccgcactcgagcagtacggcatcacggtcgccgagcgcgtgccgcacatcatcgagccgaacccgcacaacgcgaactacctgcgcaccaaagcccagcggctcggccacctgctcgccggacactga

SEQ ID NO: 49427 - protein, 217 aa, Azoarcus sp. EbN1
MHTADTRNAGPVASTDETDQRNTRLVASCRLPTPWAIFRMHGFEEPATGREHVALTLGAVADGKPVLTRVHSECLTGDALFSRRCDCGPQLEAALAAIAAEGRGVLLYLRQEGRGIGLLNKVRAYALQDEGADTVEANHLLGFDADTRDYAVAASMLGELGIASLRLMTNNPRKVAALEQYGITVAERVPHIIEPNPHNANYLRTKAQRLGHLLAGH

SEQ ID NO: 49428 - DNA, 1125 bp, Zymomonas mobilis subsp. mobilis ZM4
  CDS (1)..(1125): transl_table=11
atgtgcctttacttacggagttttcttttcatggttgaggatcgtaaagcgatagtcatagcacaggcgatagatgccttgcggcggggttggccgatttcgatctctgatcagggcgagattctaagcctgttggcggtcgaacgtgctgacgaccatcggctcaaggtctttgatcccgatcagacagccgatattttactgtctgcggcaagagcggctatcttgaatctcgccaatgacaaagaggctgctactcccgatcaacctgtcaccttggtaaggacgccttggatagattgtgcttctgccttggccttggctgatccttctatggatcttgaaatgccgatgaaggggccttttaaggttaaaaaaaccgttattaaatcggcagccgcatcggctttggaattggccagaatggcaggattacttccggctttcttcgttcaagaagggcagtccgagcaatccctcttgactattcctgcacaagatattgtcgatttcttccaagggcagggggtttacatcgccgcaagggcgcggttgccgattgccttgggcgatcatggtaaagccattgaaaacagccagatcgttgcgttcagaaatgatgccgatgccgtagagcatgttgcggtgattatcggtcatcctgatggtcaaccacccgttgttcgattgcatagcgaatgtcttaccggcgatgtgtttggttcgctgaaatgtgattgtggcccccagctacatcaggctttaaggattatggatgaatccggctatggcatcctgctttatttgcgacaggaagggcgtggtattgggctgatcaataaattgcgtgcctatagcttgcaagatcagggttttgatacagtagatgccaatgtccgcttgggctttgtcaatgatgcccgcgatttccggctggctgcccagatgctaggtgaattggaaataaagcaaatccgtttgctgaccaataatcctgacaaagtagaagggcttaaaaaagccggcattgatgttgtcgagcggttacccttaaagatcaagccgaacccgcataatcaggcgtatcttgaaaccaagcgagaccgtagcggccaccaattataa

SEQ ID NO: 49429 - protein, 374 aa, Zymomonas mobilis subsp. mobilis ZM4
MCLYLRSFLFMVEDRKAIVIAQAIDALRRGWPISISDQGEILSLLAVERADDHRLKVFDPDQTADILLSAARAAILNLANDKEAATPDQPVTLVRTPWIDCASALALADPSMDLEMPMKGPFKVKKTVIKSAAASALELARMAGLLPAFFVQEGQSEQSLLTIPAQDIVDFFQGQGVYIAARARLPIALGDHGKAIENSQIVAFRNDADAVEHVAVIIGHPDGQPPVVRLHSECLTGDVFGSLKCDCGPQLHQALRIMDESGYGILLYLRQEGRGIGLINKLRAYSLQDQGFDTVDANVRLGFVNDARDFRLAAQMLGELEIKQIRLLTNNPDKVEGLKKAGIDVVERLPLKIKPNPHNQAYLETKRDRSGHQL

SEQ ID NO: 49430 - DNA, 1122 bp, Silicibacter pomeroyi DSS-3
  CDS (1)..(1122): transl_table=11
atgagctttgagacgcccggacccgtcgaggcccgcctgcgcgacgcgatcagcccgatcgaagagatcatcgacgaggcgcgcaagggccggatgtatatcctggtcgatcacgaggatcgcgagaacgagggcgatctgtgcatcgccgccgagtttgccgatgccgccgcgatcaacttcatggccacgcatgggcgcggactgatctgcctgccgatgaccgccgaccggatcgaccgtctgggcctgccgatgatggcggtcaacaactcctcgcgccacgagaccgcctttaccgtctcgatcgaggcgcgcgagggcgtgtcgaccggcatttccgccgccgaccgggcgctgacggttgccaccgcgatcaatgaacagaacaccatggcaagccttgccacccccggacacatcttcccgttgcgcgccaagcggggcggggtgctggtgcgcgccggtcataccgaggcggcggtggatatctcgcgtctggcggggctgaacccttcgggcgtgatctgcgagatcatgaaggaagacggcaccatggcgcggctgcccgatctggtcgatttcgccgagcggcacgggatgaagatcgggaccatcagcgacctgatctcctatcgcgcccgcaacgacaatctggtggacgaaaccgcccgcagcaccgtcacctcggaatatggcggcgactgggagatgcgcatctttaccgaccagacccacggcatcgaacatgtggtgctggtcaagggcgacatctcgacccccgaaccggtgctgacccgcacccatgcgctgcacgaggcctcggacgtgctgggcctcggccccaagccgacccaggaactgccccgcgcgatggagaagatcgccgccgaagggcgtggcgtcgtctgcctgttccgccagccgcgcaacgcgctttacgccagtgacgaggacggcgtgcgcaccatcaagcagaccggtctgggtgcccagatcctgtccaagatgggcctgcacgagctgatcctgctcaccgactcgccgcaaaccagatatctcgggctcgacgcctatggcctgaccattgtcggcacccgccccattctgaaggacgcctga

SEQ ID NO: 49431 - protein, 373 aa, Silicibacter pomeroyi DSS-3
MSFETPGPVEARLRDAISPIEEIIDEARKGRMYILVDHEDRENEGDLCIAAEFADAAAINFMATHGRGLICLPMTADRIDRLGLPMMAVNNSSRHETAFTVSIEAREGVSTGISAADRALTVATAINEQNTMASLATPGHIFPLRAKRGGVLVRAGHTEAAVDISRLAGLNPSGVICEIMKEDGTMARLPDLVDFAERHGMKIGTISDLISYRARNDNLVDETARSTVTSEYGGDWEMRIFTDQTHGIEHVVLVKGDISTPEPVLTRTHALHEASDVLGLGPKPTQELPRAMEKIAAEGRGVVCLFRQPRNALYASDEDGVRTIKQTGLGAQILSKMGLHELILLTDSPQTRYLGLDAYGLTIVGTRPILKDA

SEQ ID NO: 49432 - DNA, 1092 bp, Silicibacter pomeroyi DSS-3
  CDS (1)..(1092): transl_table=11
atgagtctgatcccggatatcaccgagcttttggcccgcgcccgcgccgacctgcgcatgggtgtcccggtcgtgttgcgggacgagggtggcgatagcgcgctggcgctggcggccgagacgctgacagcggcgcggctggcggatctgcggcaattgggcgatccggtcattgccatcacagggcgccgggcggaaacgctcaaggcgcgcgcctatgacggcgatctggcgcgggtgatcctgcccaccggggccgatctgcgctgggttcaggcggtggccgatccatcggacgatctgaacacaccgatgaaggggccactgggcaccatgcggcagggcaaggccgggctgcaccgtctggcgatcagcctgaccaaatccgcccggctgctgccggcggcggtgctggtggcactgcccgaggggcgcacattcgctgccgatcacgggctgaccacgatcgaccacgcgcaggccgcgccacacctgtccgagcgcagcccgctgcacgtggtctcggccgcgcgcctgccgatggaggtgtcggaggccgggcgcctgcatgtgttccgccccgaggacggcggcgaagagcattacgcggtcgagatcggccgccccgaccgggacaaaccggtgcttgcgcggctgcattcggcctgtttcaccggcgacctgatgggcagcctgaaatgcgattgcggcccgcagttgcgcggcgcgctggcgcagatgggcgccgagggtgccggggtcctgctgtatctcaaccaagagggtcgcggcattgggctggccaacaagatgcgcgcctatttccttcaggatcaggggtttgacacggtcgaggccaaccaccgcctgggcttcgaggatgacgagcgtgactttcgcctgggctcggacatcctgaaatcgctggggttcaaatcggtgcggctgttgaccaacaaccccgccaagatcgccatgatggagcgcaccggcatcgcggtgaccgaacgggtgccgctcaaggtgggggaaaccgcacataaccggggctatctggcgaccaaggcggccaaatcgggccatatgctgtga

SEQ ID NO: 49433 - protein, 363 aa, Silicibacter pomeroyi DSS-3
MSLIPDITELLARARADLRMGVPVVLRDEGGDSALALAAETLTAARLADLRQLGDPVIAITGRRAETLKARAYDGDLARVILPTGADLRWVQAVADPSDDLNTPMKGPLGTMRQGKAGLHRLAISLTKSARLLPAAVLVALPEGRTFAADHGLTTIDHAQAAPHLSERSPLHVVSAARLPMEVSEAGRLHVFRPEDGGEEHYAVEIGRPDRDKPVLARLHSACFTGDLMGSLKCDCGPQLRGALAQMGAEGAGVLLYLNQEGRGIGLANKMRAYFLQDQGFDTVEANHRLGFEDDERDFRLGSDILKSLGFKSVRLLTNNPAKIAMMERTGIAVTERVPLKVGETAHNRGYLATKAAKSGHML

SEQ ID NO: 49434 - DNA, 1686 bp, Synechococcus elongatus PCC 6301
  CDS (1)..(1686): transl_table=11
gtgactttgccagaagactttcagtttgatgcgatcgccgacgcgatcgcggaaatcaaagccggtcgctcggtggtggtggttgacgatgaaaaccgcgaaaacgaaggtgacctgatctgtgcggctcagtttgccacccccgaaaagatcaacttcatggcggtggaagccagaggcttaatctgtctggctatgacgggcgatcgcctcgatcaactcgatttgccgctgatggtcgatcgcaacaccgacagcaatcaaactgcctttaccgtcagcattgatgcggccccccatctcggcgtcagcactggtatttctgctgaggatcgggcgcgaacgattcaagccacgatcaatcccctgaccaagccccacgatctgcgccgccccggtcacatttttccgctgcgatcgcgggagggcggtgtcctcaagcgggctggacataccgaagccgctgtcgatctagcacggatggctgggctctatcccgctggggtgatctgtgagatccagaatcccaatggatcgatggcgcggctgccggatttgattgactacgctcgtcagcatcggctgaaactgatcagcattgctgatctgatcagctatcggctgcaacatgagcgcttcgtgattcgcgaaacgatcgcgactttgccgagtgagttcgggcagttcacgatttttgcctaccgcaacagcttggatggctcagagcatgtggcgctggtcaagggcgatcccagccgctttagtcagcagccagtcatggtgcgcgttcactccgaatgtctgaccggtgatgccttcggttcactgcgctgcgattgccggatgcagctgcaggccgcgatgaagatgattgaaaatgctggtcagggcgtgattgtctacctacggcaagaaggtcgtggcattggcctaatcaacaaactcaaggcttattcactacaagatttggggctagataccgtcgaagccaacgcccgccttggctttccggctgacctgcgcaattacggcgtgggggcgcaaatcctcaacgacctaggggtaacgcgcattcgtctgatcaccaacaatccccgcaaaattgccggcctcaagggctatggactagaagtggtcgatcgcgtccccctgctgattgaagccaccccctacaattcgtcttatctggcgactaagggtgaaaaactcggccacttgctcctcaaaacccatctagccgcgatcgctctgcatctcacgccggaattacagaacaatccctatcgccaaacgctgattggtcagattcgcagtctggtgcaaggagagggattattcctgcaagaagagctgcgatcggtggcgtcagcgctctttggcccccaggtcctaaccctgcaggtcggcttggcccagtcagaagcgatcgcagcggactggtaccgctcgcccgattccccactggccgaccagctgcagcattgcttggaacaaatggctgcgatcgatggcttagaagatctggaatttctgctggcggatggtcatgacccgctaactagcttgcaggtgcagctcgatcgccagtcgttaccgctaccggatctgagccgccagttcaaaaccctgaagctgcagcagatctatcacttacagctgcaggaacgaccgagctttgtcagctga

SEQ ID NO: 49435 - protein, 561 aa, Synechococcus elongatus PCC 6301
MTLPEDFQFDAIADAIAEIKAGRSVVVVDDENRENEGDLICAAQFATPEKINFMAVEARGLICLAMTGDRLDQLDLPLMVDRNTDSNQTAFTVSIDAAPHLGVSTGISAEDRARTIQATINPLTKPHDLRRPGHIFPLRSREGGVLKRAGHTEAAVDLARMAGLYPAGVICEIQNPNGSMARLPDLIDYARQHRLKLISIADLISYRLQHERFVIRETIATLPSEFGQFTIFAYRNSLDGSEHVALVKGDPSRFSQQPVMVRVHSECLTGDAFGSLRCDCRMQLQAAMKMIENAGQGVIVYLRQEGRGIGLINKLKAYSLQDLGLDTVEANARLGFPADLRNYGVGAQILNDLGVTRIRLITNNPRKIAGLKGYGLEVVDRVPLLIEATPYNSSYLATKGEKLGHLLLKTHLAAIALHLTPELQNNPYRQTLIGQIRSLVQGEGLFLQEELRSVASALFGPQVLTLQVGLAQSEAIAADWYRSPDSPLADQLQHCLEQMAAIDGLEDLEFLLADGHDPLTSLQVQLDRQSLPLPDLSRQFKTLKLQQIYHLQLQERPSFVS

SEQ ID NO: 49436 - DNA, 1194 bp, Bacillus clausii KSM-K16
  CDS (1)..(1194): transl_table=11
gtgtttgaatcgattgatgaagcgatcacacaattaaaagcggggggaatgatcctcgttgtagatgatgaagaccgggagaatgaaggggattttttggctcttgctgaaacagcgtcccctgaaacaatcaattttatggcaacgcacggacgcggtctcatttgtgtgcctttgacggaagaacaggctgagcgcctgcagcttgggcagatggtgtctcacagcacagacccacatggaacggcatttactgtcagcgtcgaccattcacatacgacaacaggcatctctgcttttgagcgggcagaaacggtccgcgctttagcagatgccaatgcgcagccaagtgattttaaacggccagggcatgtttttccgcttgttgccaaaaacggcggtgtgctgcgccgggctggccataccgaagccgctgttgattttgcaaaactttgtggagcaaaaccggcaggcgttatttgcgaagtgatgaacgaagacggatcgatggctagagtgcctgagttgcgcatcattgccgatcagcacaacctgccactggtgacgattaaagatttgatcgcttaccgccgtaaaacggagaaagttgtgacgagagaagtggctatttcgttgccgactgagtatggcgactttaaagcagttggctatacgaataccatcgacggcaaagaaagtgtcgcccttgttaaaggggacgttggaaatggtgagcctgttctagtccgcgttcattccgaatgtctgactggtgatgtatttggctctaaacgatgcgattgtggtccacaattgcacgcagcgctaaagcaaattgaagctgaaggacgaggcgtactgctctatatgaagcaggaaggccgtgggattgggctaatcaataaattccgcgcctataagctgcaagaagaaggctacgatacagtggaagcgaatgagcgccttgggtttccagcggatttgcgcgaatacgggattggggcgcaaatcctacgtgatttaggcatccgtgacatgcggcttttgacgaataaccctcgaaaaattgcagggctagaaggctatgatttaaacattgttgagcgtgtgccactgcaaatggaagctgtagccgaaaatgaacgttatttgcatacgaaaagagaaaaacttgggcatatgctcaatttatag

SEQ ID NO: 49437 - protein, 397 aa, Bacillus clausii KSM-K16
MFESIDEAITQLKAGGMILVVDDEDRENEGDFLALAETASPETINFMATHGRGLICVPLTEEQAERLQLGQMVSHSTDPHGTAFTVSVDHSHTTTGISAFERAETVRALADANAQPSDFKRPGHVFPLVAKNGGVLRRAGHTEAAVDFAKLCGAKPAGVICEVMNEDGSMARVPELRIIADQHNLPLVTIKDLIAYRRKTEKVVTREVAISLPTEYGDFKAVGYTNTIDGKESVALVKGDVGNGEPVLVRVHSECLTGDVFGSKRCDCGPQLHAALKQIEAEGRGVLLYMKQEGRGIGLINKFRAYKLQEEGYDTVEANERLGFPADLREYGIGAQILRDLGIRDMRLLTNNPRKIAGLEGYDLNIVERVPLQMEAVAENERYLHTKREKLGHMLNL

SEQ ID NO: 49438 - DNA, 561 bp, Campylobacter jejuni RM1221
  CDS (1)..(561): transl_table=11
atggaaataaaaatttcagaaattgcgaatttacctagcaaatggggaaatttccaaatgcaaagtttcaaagaaaacgataaagaacatttatgcatatttaaaaacactccaaaagatacactcaatctaagaattcattcagagtgcttaacaggagatgctttaggaagtttaaaatgcgactgcggagaacagcttgaattttcgctaaaatatatagaaaagaatggcggaatggtgatttatcttagacaagaaggaaggggtatagggctttttaacaaggttaatgcttatgctttacaagataaaggttttgatacgattaaagcaaatcatcagcttggctttaaagccgatgagagaacttatgaaattgtagaatttatactcaaacactatgaaatttctaaggttaatttactcacaaataaccctgaaaagctagattctatcaaagaaaaaatcatcatacgcataccgattttaatagaacctaatcgttttaatgtagagtatttaaacataaaacaaactcaaatgggacatcttaaataa

SEQ ID NO: 49439 - protein, 186 aa, Campylobacter jejuni RM1221
MEIKISEIANLPSKWGNFQMQSFKENDKEHLCIFKNTPKDTLNLRIHSECLTGDALGSLKCDCGEQLEFSLKYIEKNGGMVIYLRQEGRGIGLFNKVNAYALQDKGFDTIKANHQLGFKADERTYEIVEFILKHYEISKVNLLTNNPEKLDSIKEKIIIRIPILIEPNRFNVEYLNIKQTQMGHLK

SEQ ID NO: 49440 - DNA, 1116 bp, Ehrlichia ruminantium str. Welgevonden
  CDS (1)..(1116): transl_table=11
atggaaaatttacttaatagctttaattccaataaacatattataaaaaaatccatagcagaattaaggactggcataccagtactattatacaatcacaaaagtaacctgcttgtctttccaagtgaaatgatagataatcaaatattacataaaatccagaaatattcggataatgcttacatattgatcacaggaaatagattgaattttatacttcaatctccaggaaatcagctttctagaattactttaaaagaatcttacagtatagactatatctcatatctactaataggtaagaaaccacacagttcatttgatcatattgatacaaatcacataactacaagtacaaatcctttagatataacatctatttctttaatcaagttaacaaaattattaccatcagcaattgttactgaaataaaacatcctgatatattacagtggtgtaataagtataatattactcctataaaacaagaaattatcgataatcacaaccaagaatatgaattacatgaagtatgtagttctcctttatttttaaaaaattgctgtaatgccaatgtaaactcaagcataaatatttatcgatcagatataggagaacctgaacattatgcacttattataggagaaccagattatagtaacccacttgttagaattcattcctcatgttacacaggagatctattagatagtctatcctgtgattgccgttcccaattacatctttctataaaactaatggtagaaaataagggtggaataattctatacctagcacaagatggccgtggtattggactaacaaataaaataagaacttaccaattacaaataaagtacaactttgatactgtagatgctaatagattttttgggtttgaagatgacgaaagagcattcattgcagcgataaaaatattagaaaaactaggaatctcaaaattgcagttactaactaacaatcccaataaagctgaagaaattaaaaaatatggaataaatattacaaaaatattacctatttttgttgacataaaccaacataatattaattatatcaataccaaagctaaaagactgggtcacgtaagttag

SEQ ID NO: 49441 - protein, 371 aa, Ehrlichia ruminantium str. Welgevonden
MENLLNSFNSNKHIIKKSIAELRTGIPVLLYNHKSNLLVFPSEMIDNQILHKIQKYSDNAYILITGNRLNFILQSPGNQLSRITLKESYSIDYISYLLIGKKPHSSFDHIDTNHITTSTNPLDITSISLIKLTKLLPSAIVTEIKHPDILQWCNKYNITPIKQEIIDNHNQEYELHEVCSSPLFLKNCCNANVNSSINIYRSDIGEPEHYALIIGEPDYSNPLVRIHSSCYTGDLLDSLSCDCRSQLHLSIKLMVENKGGIILYLAQDGRGIGLTNKIRTYQLQIKYNFDTVDANRFFGFEDDERAFIAAIKILEKLGISKLQLLTNNPNKAEEIKKYGINITKILPIFVDINQHNINYINTKAKRLGHVS

SEQ ID NO: 49442 - DNA, 1212 bp, Dehalococcoides ethenogenes 195
  CDS (1)..(1212): transl_table=11
atgcctaatgcccgtgttgaagatgctattgcagatataaaggccggccgttttgttattgtagtagatgactatgaccgcgaaaatgaaggtgatttggtcatggcctctgaaatggtcacgcctgatgccataaatttcatggcaaaaaatgcccgcggccttatttgtgtttcactcactgccgaaaggcttgaacagctgaaaatacctatgatggttacggaaaatacctcgccttacagcaccgggttcaccgtttcggtggaagcccgtaaaaaagttactaccggtatttcagcggctgaccgggcggctacagtgcaggttttgatagacccggcggctacccgtgaagatattgccatgcccggacatatgttccccctgcgcgcccgcgaaggcggggtgctggtacgggcggggcataccgaagcctctatggatttaacccggatggccgggctgtacccttccggtgtactttgcgagattatgaatgatgacggcactatggcccgtctgccccagcttgaagcgaaagccgccgaatgggctataaagataataagcgttaaggacataatttcctaccgccgccgtaccgaaaaaatggttaaaaagataaccgaagccgaactgcctacttctcacggacagtttaaagcggttgcctataaaagccagtttgatgctgacgaacacattgctctggtaatgggagatatctccggcccggagccggttttggtcagggtacacagcgaatgtatcaccggtgatgtctttggcagcaagcgctgtgattgcggtgagcagctggatatggcgcttaatcaaatagccaaagccgggcggggagtgctgctttatatgcggcaggaaggccgcggcataggcctgcataacaagctgtgcgcatatgccctgcaggacaagggtttggatacggttgaggctaacattgaacttggttttgcacctgacctgcgtgaatacggtataggtgctcagatactggtagatttgggcttaagtaaaatccggatgatgaccaataaccccaaaaaggtggtaggtctggagggttacggtattcaggtagttgagaccgtgcctattatagttgaacctaacagttttaaccgccattatctggaaaccaaacagaaaaaaatgggccatctgttaaacgtagacaaaacaaactaa

SEQ ID NO: 49443 - protein, 403 aa, Dehalococcoides ethenogenes 195
MPNARVEDAIADIKAGRFVIVVDDYDRENEGDLVMASEMVTPDAINFMAKNARGLICVSLTAERLEQLKIPMMVTENTSPYSTGFTVSVEARKKVTTGISAADRAATVQVLIDPAATREDIAMPGHMFPLRAREGGVLVRAGHTEASMDLTRMAGLYPSGVLCEIMNDDGTMARLPQLEAKAAEWAIKIISVKDIISYRRRTEKMVKKITEAELPTSHGQFKAVAYKSQFDADEHIALVMGDISGPEPVLVRVHSECITGDVFGSKRCDCGEQLDMALNQIAKAGRGVLLYMRQEGRGIGLHNKLCAYALQDKGLDTVEANIELGFAPDLREYGIGAQILVDLGLSKIRMMTNNPKKVVGLEGYGIQVVETVPIIVEPNSFNRHYLETKQKKMGHLLNVDKTN

SEQ ID NO: 49444 - DNA, 1161 bp, Thermococcus kodakarensis KOD1
  CDS (1)..(1161): transl_table=11
atgaactgggacagagttaggggtctagtccttgaaggaaagccagttgttctcatagacaatcgaagggagttcgaggctgatctaatttatccagccgagatagcttctcccgagatcgtcaacttcatgctctccatgaaaggcctcctctgcctcacgatggacatggacgaggcgttgaagaggggcttcttcccgcttcccagcaaggaaggagagacgaacttcttggttcccgttgattacaaagaaactttcacgggaataaccgctgaagagagggccttaacggcccggaagattgctgaagggcttggtgtgggggccttccgctatcctggacatctccacctccttggcggcatcggcctcaacaggaggagggggcacacggagagctctcttgagctgatggagatactcggcttcaagaggtacgccctgatggttgagatactcgacgaaaagggcgactctcacaacagggagtacgccttgaagctcgcggaggagcacggccttccagtcctcaccacggacgatgtctggaaggaattcgtgaggagaaaacagctgatgagaatctacgccagcgcgaggctcccgacgaggtacggcgactttagaataatagccttcgacaacgagctggactttaaggagcatgtggcaatagtcaaggagccctatggtgaggtcccacttgtcagggttcactcaaagtgcctcacaggagacacattcgcttcactcaagtgcgactgcgggagccagctcgccaacgccctcaggatgatagcccaggagggcgggatactcctctacatggaccaggaaggcaggggaatcggcctgaaggagaagataaaggcctacgagctccaggacaaaggctttgacaccgttgaggccaacaaagccctcggccgcggtgaggacgagaggacttacgaggccgccttccagatgcttcgtgctctgggagtttcaaagatcaggctgataaccaacaacccgaggaaggcaaaggcccttgaggagttcgggatagaggtcgttgagacggttccggctccgggggaggttactgaacacaacaagccctacctgaaggtcaaagccgagaagctcggtcacaagctcccctttaaagtttag

SEQ ID NO: 49445 - protein, 386 aa, Thermococcus kodakarensis KOD1
MNWDRVRGLVLEGKPVVLIDNRREFEADLIYPAEIASPEIVNFMLSMKGLLCLTMDMDEALKRGFFPLPSKEGETNFLVPVDYKETFTGITAEERALTARKIAEGLGVGAFRYPGHLHLLGGIGLNRRRGHTESSLELMEILGFKRYALMVEILDEKGDSHNREYALKLAEEHGLPVLTTDDVWKEFVRRKQLMRIYASARLPTRYGDFRIIAFDNELDFKEHVAIVKEPYGEVPLVRVHSKCLTGDTFASLKCDCGSQLANALRMIAQEGGILLYMDQEGRGIGLKEKIKAYELQDKGFDTVEANKALGRGEDERTYEAAFQMLRALGVSKIRLITNNPRKAKALEEFGIEVVETVPAPGEVTEHNKPYLKVKAEKLGHKLPFKV

SEQ ID NO: 49446 - DNA, 1182 bp, Staphylococcus aureus subsp. aureus COL
  CDS (1)..(1182): transl_table=11
atgcaattcgataatattgacagtgctttaatggctttaaaaaatggagaaccaattattgtagtagatgatgagaatcgtgaaaatgaaggtgatttagtagcggttactgaatggatgaacgataataccattaattttatggcgaaagaagcaaggggattaatatgcgcaccagtgtctaaagatattgcacaacgtttggatttggtacaaatggttgatgataactccgacatctttggtacgcaatttacagtgagtattgatcatgtagatacaacaacaggaattagtgcttatgaacgtacattgactgccaaaaagctcattgatcctagtagtgaagctaaagattttaatcgtcctggtcatttatttccattagtagcacaagataaaggcgtattagctagaaatggacacacagaagcggctgttgatttagctaaacttactggtgccaagcccgctggtgtcatttgtgagattatgaatgatgacggcacgatggcgaaaggacaagatttacaaaagtttaaagaaaaacatcaattaaagatgattacgattgatgatttaattgaatatcgtaaaaaattagaaccagaaattgaatttaaggcaaaagtgaaaatgcctacagatttcggaacatttgatatgtatggttttaaagcgacatacacagatgaagagatagttgtactgacaaaaggtgcaattcgacaacatgaaaatgtacgcttacattctgcgtgccttacaggcgatattttccatagtcaacgttgtgattgtggtgctcaacttgaatcgtctatgaagtatatcaatgaacatggtggcatgattatttatctacctcaagaaggtcgtggcataggattgttaaacaaattacgcgcatatgaattaattgagcaaggatatgatacagtaactgcaaatttagcattaggttttgatgaagatttgcgagattatcatattgctgcacagattttaaaatattttaacatcgaacatatcaatttattaagtaataatccaagtaaatttgagggattaaaacaatatggcattgatattgcagaaagaattgaagttatcgtaccagaaacggtacataatcatgattatatggaaacgaaaaaaataaaaatgggtcatttaatatag

SEQ ID NO: 49447 - protein, 393 aa, Staphylococcus aureus subsp. aureus COL
MQFDNIDSALMALKNGEPIIVVDDENRENEGDLVAVTEWMNDNTINFMAKEARGLICAPVSKDIAQRLDLVQMVDDNSDIFGTQFTVSIDHVDTTTGISAYERTLTAKKLIDPSSEAKDFNRPGHLFPLVAQDKGVLARNGHTEAAVDLAKLTGAKPAGVICEIMNDDGTMAKGQDLQKFKEKHQLKMITIDDLIEYRKKLEPEIEFKAKVKMPTDFGTFDMYGFKATYTDEEIVVLTKGAIRQHENVRLHSACLTGDIFHSQRCDCGAQLESSMKYINEHGGMIIYLPQEGRGIGLLNKLRAYELIEQGYDTVTANLALGFDEDLRDYHIAAQILKYFNIEHINLLSNNPSKFEGLKQYGIDIAERIEVIVPETVHNHDYMETKKIKMGHLI

SEQ ID NO: 49448 - DNA, 1182 bp, Staphylococcus epidermidis RP62A
  CDS (1)..(1182): transl_table=11
atgcaattcgatacaattgagttggctatagaggctttaagaaatggagagagcattattgtagttgacgatgaagatagagaaaatgaaggagatcttgtagctgttacggaatggatggatgataataccattaattttatggctagagagggtcgtggtctgatttgtgcaccaattgataaatctatagctgaaagattaaaactacaatctatggagcaaaataacactgatatttatggcacacattttactgtaagcattgatcattataaaactactacaggaatcagtgcacatgaacgtacacaaacggctagagcactcatagatgaaaatactaatcctgaagattttcatcgtccggggcacttatttccacttatagcaaaagagaatggtgtgttaacacgtaatggtcatactgaagctgccgtagatttggcacggttaacaggagcacaaccagctggagtaatctgcgaaattatgaatgatgatgggacaatggctaagggtgaagatctccagtcatttaaagaacgccaccatttaaaaatgattactataaaaagtttggttgcttttcgtaaggctgttgaacttaatgttaatcttaaggcaaaggtcaagatgccaacagattttggtcattttgatatgtatggatttacaacgaattatagcgatgaagaaatcgttgctattgttaaaggagatttaaaaagcaatcctaatgtacgtatgcattctgcttgtctgactggggatatttttcatagtcaaagatgtgattgcggggcacaacttgaagcgtcaatgaaatatattgacgaacatggtggaatgattatttatttacctcaagaaggtagaggaatagggttaattaataagttgcgcgcatatgagttgatagaaaaaggttatgatacagttactgcaaatcttgctcttggttttgatgaggatttgagagattatcatgttgcagctgaaatattaaagtattttgatataagtgaaattaacttgctcagcaataatcctaaaaaatttgaaggtttagaagattacggcattgagatcgtagatagaattgaacttatcgttccagaaacacaatataaccatagttatatggaaactaaaaaaaataaaatgggacatttaatatag

SEQ ID NO: 49449 - protein, 393 aa, Staphylococcus epidermidis RP62A
MQFDTIELAIEALRNGESIIVVDDEDRENEGDLVAVTEWMDDNTINFMAREGRGLICAPIDKSIAERLKLQSMEQNNTDIYGTHFTVSIDHYKTTTGISAHERTQTARALIDENTNPEDFHRPGHLFPLIAKENGVLTRNGHTEAAVDLARLTGAQPAGVICEIMNDDGTMAKGEDLQSFKERHHLKMITIKSLVAFRKAVELNVNLKAKVKMPTDFGHFDMYGFTTNYSDEEIVAIVKGDLKSNPNVRMHSACLTGDIFHSQRCDCGAQLEASMKYIDEHGGMIIYLPQEGRGIGLINKLRAYELIEKGYDTVTANLALGFDEDLRDYHVAAEILKYFDISEINLLSNNPKKFEGLEDYGIEIVDRIELIVPETQYNHSYMETKKNKMGHLI

SEQ ID NO: 49450 - DNA, 1254 bp, Gluconobacter oxydans 621H
  CDS (1)..(1254): transl_table=11
atgaagccgtccctgaaagcggccatcgaggccatccgcgctggcggcatggtcgtcatggtcgatgacgagaaccgtgagaacgaaggcgatctggtcatggcggcgcagttcgccacgccggaagccatcaatttcatggtccgcgaggcgcgcgggctggtctgcctgccgctggaagccgaacaggtggaccgcctcggcctgccgcccatggtcacgcgcaaccgcgatccgcgcggcacggccttcacggtctcgatcgaagcggcaacaggtgtgacgaccggcatttccgccgccgaccgcgcgcgcacgatcgtcgtcgcggccaatccggacgcaacaccggacgatgtcgtctcacccggccacatcttcccgctccgcgcccatcccgaaggcgttctgggccgcaacggtcataccgaaggctccatcgacatcgcgcgtctggccgggctggaaccggctggcgtgatctgcgagatcatggccgatgacggcagcatgatgcgcctgccggaacttcggaaatacgcggcaaagcacaacatgcccgtggtcagcatcgcagaccttcaggactggtgccgcgagcatggccgtggccctgtcgcaggtcatgacctgatctgcacgcccgtcccggccgctggcgaaatggtggccgaatccgccctgcccagcatcttcggcggccacgacctgcggatccatgccttccgcgccgtcgatggcgtggagcatgtcgcgctggtgaagggcgatccatccaaaggcgtgcctttagtgcggctgcattcagaatgcgtgacgggcgatgcgctcggctccctgcgctgcgactgcggcgcgcagctccgcgaggcgctggaacggatttcggcgtcggaatccggcgtgctggtctatctgcgcggccatgaaggacgcgggatcggcctggccaacaagatccgcgcctacgagcttcaggatcatggcatggacactgtggaggccaatgaagcccttggactgcccgccgatgcccgtgaatgggatgcggcagccgaccttctgcgccatctgggcgtgagttcactccgccttctgacgaacaatccggacaaggaatccaacctggtccgcttcggctttgacgtgaaatccagcgagcggctggaaatcgaggccaatcctttcaaccgcgcctatcttgcgaccaaacgcacgcggatgggccatttccttcaggaacagccggcatga

SEQ ID NO: 49451 - protein, 417 aa, Gluconobacter oxydans 621H
MKPSLKAAIEAIRAGGMVVMVDDENRENEGDLVMAAQFATPEAINFMVREARGLVCLPLEAEQVDRLGLPPMVTRNRDPRGTAFTVSIEAATGVTTGISAADRARTIVVAANPDATPDDVVSPGHIFPLRAHPEGVLGRNGHTEGSIDIARLAGLEPAGVICEIMADDGSMMRLPELRKYAAKHNMPVVSIADLQDWCREHGRGPVAGHDLICTPVPAAGEMVAESALPSIFGGHDLRIHAFRAVDGVEHVALVKGDPSKGVPLVRLHSECVTGDALGSLRCDCGAQLREALERISASESGVLVYLRGHEGRGIGLANKIRAYELQDHGMDTVEANEALGLPADAREWDAAADLLRHLGVSSLRLLTNNPDKESNLVRFGFDVKSSERLEIEANPFNRAYLATKRTRMGHFLQEQPA

SEQ ID NO: 49452 - DNA, 1116 bp, Ehrlichia ruminantium str. Gardel
  CDS (1)..(1116): transl_table=11
atggaaaatttacttaatagctttaattccaataaacatattataaaaaaatccatagcagaattaaggactggcataccagtactattatacaatcacaaaagtaacctgcttgtctttccaagtgaaatgatagataatcaaatattacataaaatccaaaaatactcggataatgcttacatattgatcacaggaaatagattgaattttatacttcaatctccaggaaatcagctttctagaattactttaaaagaatcttacagtatagactatatctcatatctactaacaggtaagaaaccacacagttcatttgatcatattgatacaaatcatataactacaagtacaaatcctttagatataacatctatttctttaatcaagttaacaaaattattaccatcagcaattgttactgaaataaaacatcccgatatattacagtggtgtaataagtataatattactcctataaaacaagaaattatcgataatcacaatcaagaatatgaattacatgaagtatgtagctctcctttatttttaaaaaattgctgtaatgccaatgtaaactcaagcataaatatttaccgatcagatataggagaacctgaacattatgcacttattataggagaaccagattatagtaacccacttgttagaattcattcttcatgctacacaggagatctattagatagtctatcctgtgattgccgttcccaattacatctttctataaaactaatggtagaaaataagggtggaataattttatacctagcacaagatggccgtggtattggactaacaaataaaataagaacttaccaattacaaataaagtacaactttgatactgtagatgctaatagattttttgggtttgaagacgatgaaagagcatttattgcagccataaaaatattagaaaaactaggaatctcaaaattacagttactaactaacaatcccaataaagctgaagaaattaaaaaatatggaataaatattacaaaaatattacctatttttgttgacataaaccaacataatattaattatatcaataccaaagctaaaagactgggtcacgtaagttag

SEQ ID NO: 49453 - protein, 371 aa, Ehrlichia ruminantium str. Gardel
MENLLNSFNSNKHIIKKSIAELRTGIPVLLYNHKSNLLVFPSEMIDNQILHKIQKYSDNAYILITGNRLNFILQSPGNQLSRITLKESYSIDYISYLLTGKKPHSSFDHIDTNHITTSTNPLDITSISLIKLTKLLPSAIVTEIKHPDILQWCNKYNITPIKQEIIDNHNQEYELHEVCSSPLFLKNCCNANVNSSINIYRSDIGEPEHYALIIGEPDYSNPLVRIHSSCYTGDLLDSLSCDCRSQLHLSIKLMVENKGGIILYLAQDGRGIGLTNKIRTYQLQIKYNFDTVDANRFFGFEDDERAFIAAIKILEKLGISKLQLLTNNPNKAEEIKKYGINITKILPIFVDINQHNINYINTKAKRLGHVS

SEQ ID NO: 49454 - DNA, 1083 bp, Wolbachia endosymbiont strain TRS of Brugia malayi
  CDS (1)..(1083): transl_table=11
atgtttataggaaaccgaaatagaaataaagtagaaagggccatcagcgaaattaggcgcggcctaccaattataatatatgataaaagtaattatctattggttgctgctgccgagactttagaaaaagacttgtttaatcagtacgggcttatctcaggtaagatatatgttattctaccttcaagtaaggtaacgtgcatatctcaaaacgtggagcatagtagcaaacgcttattgataaacaattttgatgaactatttcatttagtaaactgttcaaaagaagatcatacgaaggaattacaacgttcaaaggcaatagatgaatgcgctattactttgctaaaatcttcagaattgttgccatacgcattagtggttgacgtgaacttcaaagatgaatatgaaatgcgaggctggtgtgaaaaaagtgatgtaattgcactagacgtgctatttataaataactttcaacaaaatcaggatatatatgaagtatgcaaaacaccattatttttaaaacagactcaaaaagtaaacatcatatcttataggacctgtaatggcagaaaagaacattacgcaattattattggcaatccaggtaaaaatagtgaaccattagtaagagttcattcttcatgctatacaggcgacttattagatagcttatcatgcgattgcagaagtcagttacatcaagcaattcaaataatgactgactctgggaatggtattatactatacctgatgcaagatggtagaggcattggtttaactaacaagttaagggcatatgatatgcaaagaaaatataaccttgatactgtggatgcaaatagaatattgggttttgaagatgatgagaggagtttcgctgttgcagctgaaatgctcaagaaattaggcatcaaaaaaatccagctacttacaaataatggtagaaagctatcagagttgaaaaataatggtatagaggtcacaagatgtctaccacttattatggaacgtaacaagtataacgattcgtatatagaaacaaaatttagcaggttaggtcacagattaagaactttttag

SEQ ID NO: 49455 - protein, 360 aa, Wolbachia endosymbiont strain TRS of Brugia malayi
MFIGNRNRNKVERAISEIRRGLPIIIYDKSNYLLVAAAETLEKDLFNQYGLISGKIYVILPSSKVTCISQNVEHSSKRLLINNFDELFHLVNCSKEDHTKELQRSKAIDECAITLLKSSELLPYALVVDVNFKDEYEMRGWCEKSDVIALDVLFINNFQQNQDIYEVCKTPLFLKQTQKVNIISYRTCNGRKEHYAIIIGNPGKNSEPLVRVHSSCYTGDLLDSLSCDCRSQLHQAIQIMTDSGNGIILYLMQDGRGIGLTNKLRAYDMQRKYNLDTVDANRILGFEDDERSFAVAAEMLKKLGIKKIQLLTNNGRKLSELKNNGIEVTRCLPLIMERNKYNDSYIETKFSRLGHRLRTF

SEQ ID NO: 49456 - DNA, 1134 bp, Xanthomonas oryzae pv. oryzae KACC10331
  CDS (1)..(1134): transl_table=11
atgagcaggcccatcccctcccccagcgcgcagagcttcggcgacccggcggccatccgctgcgagcgcgccgcctccgagctgcgtgccgggcgcccggtgctgctgacggcggcagatgggcaggcgcgtgcggtgctggcactggatagcagcacggcgcagtcgcacaccgccttcgcccgcgccgcgcaggcccgccactatctgttcgtgacgcccacccgcgcccaggtgctgggcttgcgcgcgccgcagggcgcgcgcgtgcgcttgagcgatcacagctacgaccagatcgccgcgctggcctacctgcgcgacacaacggtgcccacgcagtggacggccggcgatgcgctggatgccggtggcgtggagatcgcacggcttggcctactgctgccggcactgctggcggtggaactgcgcgatgtgcacgaccatgccgcgttcgccggctgccagtcgctggcactgggcgatttgagccgcggctgcgccacgtccgcggccgccggctacgagttggtgacccgcaccccggtgccgttacgcggcctgggcatgagcgaattcgtggtgttccgcggcggcgtggcgcagcgcgaccagctggccatcttggtcggccagccggacctcatgagtgccgtgccggtgcgtgtgcattcgtcgtgcctgaccggcgacctgttcggctcgctcaaatgcgattgcggcgaccagctgcgacacggcctggccaagctgaaagaactcggcggcggtgtgctgctgtacctggatcaggaaggccgcggcaccggcatcgccgccaagatgcgcgcctacggctatcagcatgctggcctggacacgatcgatgccgacgcgcagctgggcttcggcccggacgagcgccgctacggcagtgcggtggcgatgctgcaagggctgggcattggccggatccggctgttgaccaataacccggccaaggccgagcgcctgcgcgcggcaggtattgcggtcgaagaccgcatcgcaatcaccggcgacatcaccgcggaaaacgagcagtacctgcgcaccaaggccgcacgcgcaggccatgcgctggatgtggatgcgttgatcctggccgcgcagtag

SEQ ID NO: 49457 - protein, 377 aa, Xanthomonas oryzae pv. oryzae KACC10331
MSRPIPSPSAQSFGDPAAIRCERAASELRAGRPVLLTAADGQARAVLALDSSTAQSHTAFARAAQARHYLFVTPTRAQVLGLRAPQGARVRLSDHSYDQIAALAYLRDTTVPTQWTAGDALDAGGVEIARLGLLLPALLAVELRDVHDHAAFAGCQSLALGDLSRGCATSAAAGYELVTRTPVPLRGLGMSEFVVFRGGVAQRDQLAILVGQPDLMSAVPVRVHSSCLTGDLFGSLKCDCGDQLRHGLAKLKELGGGVLLYLDQEGRGTGIAAKMRAYGYQHAGLDTIDADAQLGFGPDERRYGSAVAMLQGLGIGRIRLLTNNPAKAERLRAAGIAVEDRIAITGDITAENEQYLRTKAARAGHALDVDALILAAQ

SEQ ID NO: 49458 - DNA, 1110 bp, Vibrio fischeri ES114
  CDS (1)..(1110): transl_table=11
atggcaattagctcagcaaaagacattattgaagatattcgtttaggtaagatggttattcttatggatgacgaagatcgtgagaatgaaggtgatttaattattgccgctgagaaaatcactcctgaagccattaactttatggcaactcatggacgtggtttaatctgtttaacgatgacaaaagatcgttgtgaaaaacttggtctacctcctatggtacaagacaataatgcacaatttacaacgaattttacggtatcaattgaagcggcagaaggcgtaacaaccggtatttcagcagcagaccgttctcgcaccgttgaagcggcagtagctaaaaatgcagttgctgcagatttagttcaaccagggcatattttcccactagcagcacaagaaggcggcgtattaactcgtgctggtcatacagaagctgggtgtgatttagctcgtttagctggctatgagcctgctggtgtgattgttgaaatcttgaatgatgatggaacaatggctcgtcgccctgatttggaaatttttgctgaaaaacacggcattaaattaggtacggttgctgatttaattgaatatcgtaataacaacgaaacgacaattgaacgtgtagctgagtgtaaattaccaacagagtttggtgagtttgatttggtgacttaccgtgacacgattgataatcaactgcactacgctcttaagaaagaaaatacgtcaagtgaagcgccgttagttcgtgttcatttacaagatacatttactgatattttgcattcagaccgttgtgcagaacgcagctggacattgccaacagcaatgcagcgtattgccaatgaaggtggtgtattagtgattcttggtaatgaagaatcaacagatagtatcgtacataaagtgaaagttcttgagcgtcaagacagtggtgaagcaccaacaatggcgaagaagcaaggaacttcacgtcgtgtaggtgttggctctcaaattttggctgatattggtatttctgacatgcgtttactttcatcaacgtcaaagcgttaccatgccttatctggctttggtttgaacgttgttgaatacgtaacgaaataa

SEQ ID NO: 49459 - protein, 369 aa, Vibrio fischeri ES114
MAISSAKDIIEDIRLGKMVILMDDEDRENEGDLIIAAEKITPEAINFMATHGRGLICLTMTKDRCEKLGLPPMVQDNNAQFTTNFTVSIEAAEGVTTGISAADRSRTVEAAVAKNAVAADLVQPGHIFPLAAQEGGVLTRAGHTEAGCDLARLAGYEPAGVIVEILNDDGTMARRPDLEIFAEKHGIKLGTVADLIEYRNNNETTIERVAECKLPTEFGEFDLVTYRDTIDNQLHYALKKENTSSEAPLVRVHLQDTFTDILHSDRCAERSWTLPTAMQRIANEGGVLVILGNEESTDSIVHKVKVLERQDSGEAPTMAKKQGTSRRVGVGSQILADIGISDMRLLSSTSKRYHALSGFGLNVVEYVTK

SEQ ID NO: 49460 - DNA, 594 bp, Neisseria gonorrhoeae FA 1090
  CDS (1)..(594): transl_table=11
atgtctgaattattagaccatgtcgcttcctgccgtctgccgaccgaatggggcgtatttacgatgcacggttttgaagaggcaaacgggcaggaacacgtcgcgctgaccgtcggcaattgttcagacggcaatccggtgttgacgcgcatccactccgaatgtctgacgggcgacgcgctgttctcgagaaaatgcgactgcggaccgcaacttgaagcggcaatgagggcggtacaggcagaggggcgcggcatcatcgtctatctgcgtcaggaaggacgcggcatcgggctgattaacaaaatccgcgcctatcatctgcaagaacaaggtatggataccgttgaagccaatttggcactcgggctgcccgtcgatgcccgcgatttccgtttggcgcaatctatctacgaatatctgggcatccgctcggtcaaactgttgaccaacaaccccgaaaaaatccaaaccctgaaagatgcggggattaacgtggtcgaacgcattcccctgcacgtcggggaaaatctggaaaacgagcgttatctccaaaccaaagcagacaagctggggcatttgatgtcggaataa

SEQ ID NO: 49461 - protein, 197 aa, Neisseria gonorrhoeae FA 1090
MSELLDHVASCRLPTEWGVFTMHGFEEANGQEHVALTVGNCSDGNPVLTRIHSECLTGDALFSRKCDCGPQLEAAMRAVQAEGRGIIVYLRQEGRGIGLINKIRAYHLQEQGMDTVEANLALGLPVDARDFRLAQSIYEYLGIRSVKLLTNNPEKIQTLKDAGINVVERIPLHVGENLENERYLQTKADKLGHLMSE

SEQ ID NO: 49462 - DNA, 1266 bp, Chlamydophila abortus S26/3
  CDS (1)..(1266): transl_table=11
ttggtgataaaattcgatgatgatgctcgtgcctcgtgttttgtccctgtagaaaaggcaattgcagatattgcggaaggtaaatttgttattgttgttgatgagacttcgagagagaatgagggagatcttatcatcgcaggcgagaaaatgaccgtcgagaaaatgacttttcttcttaaatatacgacgggaattatctgtgcttctttagattctgagagaataaaacaattagacctcccccctatggttaaagataaccgctgtcgctatcgtactgcatttacagtgtcggtggatgctgcgaaaggcataactacaggtgtctctgcagccgatagaacaagagtggtggaactcctatccgacccgaatagtgttcctggggattttgtccgtccagggcatttcttccctttaatggctacaccgggaggtgtattaaaacgagccggtcatacagaggctgctttagatctcatgcgtttagccaatatgcagccttgcggggtcctttcagagcttgttaatgaagaccacactatgatgcgtcttccgcaaattatagaatttgctatgcagcataagctctcaataatatctacatcggatttagtagcctaccgcatgttatccgaaaggctcgttgtccctatttcttcggctcgtctgcctacagaatatggggattttactattcatgtttacgagtccgttttggatggtatccaacatatcgctttggtcaaaggtgatgtacgagggaaggagaatgtactggtgcgggtacattctgaatgccttactggtgatattctggggtccatacgttgtgattgtggatgccagttgcattctgctatggaatatattggattagagggtgaaggtgttcttgtttatctacgtggacaagaaggacgtggtattggattaggtcataaagttcgagcctacgctctacaagatcgtgggtacgatactgtcgatgctaacttagaaattggcttccctatagattctagagaatatggaatcggagctcagattttagttgatctgggattgacaaagatcaaattgattacccataatccccacaaatatttcggcctccagggatatgggttagaaattgttgatagaatagctcttccaatcaatctctctgaagaaaatgaatgttacctccgcacaaaaaaagagcgtatgggacattggatagattttccttcttacaaagaagaagtgaacataagataa

SEQ ID NO: 49463 - protein, 421 aa, Chlamydophila abortus S26/3
MVIKFDDDARASCFVPVEKAIADIAEGKFVIVVDETSRENEGDLIIAGEKMTVEKMTFLLKYTTGIICASLDSERIKQLDLPPMVKDNRCRYRTAFTVSVDAAKGITTGVSAADRTRVVELLSDPNSVPGDFVRPGHFFPLMATPGGVLKRAGHTEAALDLMRLANMQPCGVLSELVNEDHTMMRLPQIIEFAMQHKLSIISTSDLVAYRMLSERLVVPISSARLPTEYGDFTIHVYESVLDGIQHIALVKGDVRGKENVLVRVHSECLTGDILGSIRCDCGCQLHSAMEYIGLEGEGVLVYLRGQEGRGIGLGHKVRAYALQDRGYDTVDANLEIGFPIDSREYGIGAQILVDLGLTKIKLITHNPHKYFGLQGYGLEIVDRIALPINLSEENECYLRTKKERMGHWIDFPSYKEEVNIR

SEQ ID NO: 49464 - DNA, 666 bp, Pseudomonas syringae pv. syringae B728a
  CDS (1)..(666): transl_table=11
atgcaaatcttgcgaatttccagtcttcatactgatcaggagcacacggtgcccgtcgtctttgtcgccgcttccaaactgcccactccctttgcagagtttgccatgcacggctttatcgagtcggcaaccggccgtgaacatgtcgtcctgagtctgggcgatgtggcggacggtgagccggttctgggtcgcgtacattccgaatgcctgaccggcgacgccctgttcagtcagcgttgcgattgcggctctcaactggaggctgccctgcgcgccatcgccaccgaagggcggggcgtactgttgtatttgcgccaggaagggcgcggtatcggtctgatgaacaagatccgcgcctacgagctgcaggatggcggtgccgatacggttgaagccaacgagcgtctgggctttgctgccgatcagcgtgactacgcgatctgcctgccgatgcttcagcatctgggcgtgcagtcgctacggcttatgaccaacaacccgcgcaaggtcaaagccttgaccgagatgggcatcagggtcgctgagcgcgtgccgctgcacaccggacaaaacccgcacaaccgcctttatctggcaaccaaggcgggcaagctggggcacatgatgggcaacgaacatcaaagcgaggtcggccccgcgtga

SEQ ID NO: 49465 - protein, 221 aa, Pseudomonas syringae pv. syringae B728a
MQILRISSLHTDQEHTVPVVFVAASKLPTPFAEFAMHGFIESATGREHVVLSLGDVADGEPVLGRVHSECLTGDALFSQRCDCGSQLEAALRAIATEGRGVLLYLRQEGRGIGLMNKIRAYELQDGGADTVEANERLGFAADQRDYAICLPMLQHLGVQSLRLMTNNPRKVKALTEMGIRVAERVPLHTGQNPHNRLYLATKAGKLGHMMGNEHQSEVGPA

SEQ ID NO: 49466 - DNA, 675 bp, Haemophilus influenzae 86-028NP
  CDS (1)..(675): transl_table=11
atgactacgaataaggatcactttatggcaaaaattcagctagttgcgcaagccaatttacccactgaatacggtattttcaaaatggtgggatttgaattcccagatacaaaaaaagaacatgtagccttagtgatgggcgatatttctaatgctgatgaacctgtattagcacgtatccattctgaatgtttaactggcgatgcgcttcacagcttaaaatgcgattgtgggttccaactggcgacagcattaaaacaaattcaagaagaaggtcgcggagtcttaatttatcatcgtgaagaaggtcgcggaattggtttgattaataaaatccgtgcttattctttacaagataaaggaatggataccattgaagctaatcttgctttaggtttcaaagcggatgaacgcaactttgaagtctgtgccgatatgtttgagctacttggtgtaaaaaaagttcgcttaatgaccaacaacccagaaaaagtagaaaccatgaaaaaagcaggtatcaacgtggttgaacgagtaccgcttaatgtaggcgaaaaccgctacaacacaaaatatcttgatacaaaagcgaaaaaaatggggcattacattgtgcataacaatgacgaacaacatttaatgacctgtccacattgccaggaagagattatttaa

SEQ ID NO: 49467 - protein, 224 aa, Haemophilus influenzae 86-028NP
MTTNKDHFMAKIQLVAQANLPTEYGIFKMVGFEFPDTKKEHVALVMGDISNADEPVLARIHSECLTGDALHSLKCDCGFQLATALKQIQEEGRGVLIYHREEGRGIGLINKIRAYSLQDKGMDTIEANLALGFKADERNFEVCADMFELLGVKKVRLMTNNPEKVETMKKAGINVVERVPLNVGENRYNTKYLDTKAKKMGHYIVHNNDEQHLMTCPHCQEEII

SEQ ID NO: 49468 - DNA, 1263 bp, Corynebacterium jeikeium K411
  CDS (1)..(1263): transl_table=11
atgagcacgagcgaaaatagcgaaccccaagacatcaaactggattccgtggagcgcgccatcgccgacatcgcggcgggcaaggccgtggtggtcgtcgacgacgaagaccgggaaaacgagggcgacctcatcttcgccgcggagctggccaccccggagctgatggccttcatggtgcgccacagctctggctatgtctgcgtgggaatggatagcgccgactgcgaccgcctgggtctgccgccgatggtggcccgcaacgaggacgtccgcggtacggcctacaccgtcactgtggacgccgccgagggcgtggacaccggcatcagcgccaccgaccgtgcccgcaccgtgcgcctgctggccgaccctacgtccaccgtcgccacctttaaccgtcccggccacgtggtgccgctgcgcgccaagcgcggaggcgtgctcgtgcgccagggccacaccgaggccgcggtggatctggcccgcgcggcgaacctggcgcccgccggcgcgctgtgcgagatcgtctctaaggaagatcccacgaccatggcccgcctgccggagctgcgccgcttcgcagacgagcacgacctggcgctgatcagcatcgagcagctgcaggactggcgccgccaccacacccagaccctcgagcgcgccgtggaaacccgcctgccgaccgttcacggcaacttccgggccatcggctacgtcaacatcatcgacggcacggagcacgtggctctggtcaagggcgatgtgagcgcagtcagcactggcagcgaggagccagttccggtgcgcgtgcactccgagtgcctgaccggcgacgtcttcggttcccgtcgctgcgactgcggggaccagctttccgccgccctggactacatcgaggccaaggggcggggagtggtcatctacctgcgcggccacgaagggcggggcatcgggctactgccgaagctgcgcgcctacgtgctgcaggacgagggcctggacaccgtcgacgcaaacctggagcagggtcttccggtagacgcccgcgagtacagcgccgccgcgcagatcctcaaggacctgcaggttcattcggtcgcgctgatctctaacaacccggacaagatccacgacctggccagccacggcgtggacgtgaccaagcgcatcccggtggagctcaacgccaacgaggacaatgtggtgtacctgcgcacgaaacgcgaccgcatgggccaccaactcgataccctggactag

SEQ ID NO: 49469 - protein, 420 aa, Corynebacterium jeikeium K411
MSTSENSEPQDIKLDSVERAIADIAAGKAVVVVDDEDRENEGDLIFAAELATPELMAFMVRHSSGYVCVGMDSADCDRLGLPPMVARNEDVRGTAYTVTVDAAEGVDTGISATDRARTVRLLADPTSTVATFNRPGHVVPLRAKRGGVLVRQGHTEAAVDLARAANLAPAGALCEIVSKEDPTTMARLPELRRFADEHDLALISIEQLQDWRRHHTQTLERAVETRLPTVHGNFRAIGYVNIIDGTEHVALVKGDVSAVSTGSEEPVPVRVHSECLTGDVFGSRRCDCGDQLSAALDYIEAKGRGVVIYLRGHEGRGIGLLPKLRAYVLQDEGLDTVDANLEQGLPVDAREYSAAAQILKDLQVHSVALISNNPDKIHDLASHGVDVTKRIPVELNANEDNVVYLRTKRDRMGHQLDTLD

SEQ ID NO: 49470 - DNA, 651 bp, Haemophilus somnus 129PT
  CDS (1)..(651)
atgtccaaaattcagttagttgctgaagctaaattacccaccgagttcggaattttccgtattgtcggctttgagtttccagatactcaaaaagaacatgttgctcttgtaatgggcgatattaatgatgataaacctgttcttgcacgtatccattcagaatgtttaaccggcgacgctttacatagcttaaaatgtgattgcggtttccaactggcgaccgcattacgccaaatcagcgaagcaggacgaggagtattgatttatcatcgtgaagaagggcgtggtattggactaattaataaaattcgagcttacgctttgcaagatcaaggattggatacgattgaggcgaaccttgctttaggttttgctgctgatgaacgcaatttttcggtttgtgccgatatttttgcattactgggggtaaaacaagtacgtctgctcacaaataatccgaataaaattgaaaccatgaaaaaatccggtatcaatattgtggagcgagtaccattgaatgtaggtgaaaaccgctataacacagaatatctagatacgaaagcaaaaaaaatgggacactttattgtgcataataatgaacaacatttaatcgcttgtccgcattgccaagaagaaattccgaaaaaataa

SEQ ID NO: 49471 - protein, 216 aa, Haemophilus somnus 129PT
MSKIQLVAEAKLPTEFGIFRIVGFEFPDTQKEHVALVMGDINDDKPVLARIHSECLTGDALHSLKCDCGFQLATALRQISEAGRGVLIYHREEGRGIGLINKIRAYALQDQGLDTIEANLALGFAADERNFSVCADIFALLGVKQVRLLTNNPNKIETMKKSGINIVERVPLNVGENRYNTEYLDTKAKKMGHFIVHNNEQHLIACPHCQEEIPKK

SEQ ID NO: 49472 - DNA, 1212 bp, Deinococcus geothermalis DSM 11300
  CDS (1)..(1212): transl_table=11
atgaggctcgcttctattcccgaactgcttgccgaactgcgggcgggtcgtcccgtcattttggtcgacgacgagcgccgcgagaacgagggtgacctgctgatgcccgccgccaccgccactccggaatgggtgaacttcatggcgcgcgagggccgcggcctgatctgcgtgactctgaccccggagcgggcgcacacgttggacctgacgccgatggtgggaatgagcaccgatccccacggcacagcctttacggtcagcgtggatcacatcagcaccagcaccggcatcagcgcgtttgaccgtgcggcgaccattcgggccttgctcgaccccgccgcgcgtccagaggacttccggcgtcccggccacatctttccgctggtggcccgccccggcggagtgctgcgccgcgcggggcacaccgaggcagcctgcgacctggcgcggctggcgggcttcgcgcccgtcggcgttatctgcgagatcatgggtgacagcggcgagatgctgcggctgcccgatctcctcgcctttggggagcggcatgggctcaaggttggctccatcgaggccctcatcgcctaccggatggaacatgaccccttcatgcgaatcgccgccgaggcgaagctccccaccgcctacggcgagttccggttggtgggctttgaggataccttgtcgggggccgaacacgtggccctggtgatgggcgaggtgaatgaggaaccgctgctcgtgcgggtgcactccgagtgcctgaccggggacgcctttcacagcctgcgctgcgactgcgggccgcagcgggacgcggcgctgcgggcgattgccgaagaaggccggggcgtcctggtctacctgcggcaggaaggccggggcatcggcctgctcaacaagattcgcgcatacgcccttcaggaccagggcgccgacacggtggaagccaacctccgcctgggctttcccgctgacgcccgcgacttcggcatcggcgcgcagatcctgcacctgctgggcgctcgccgcctgcgggtgctgaccaacaacccccgcaagctgcacgcgctgggaggtttcggcctagaagtcgtagagcgcgttccgctgcacgttggccagaacgtccataacgccgcctacctcgccaccaaggccgagaagctcggccacctggcgttgccttcctcccaggagtccgcatga

SEQ ID NO: 49473 - protein, 403 aa, Deinococcus geothermalis DSM 11300
MRLASIPELLAELRAGRPVILVDDERRENEGDLLMPAATATPEWVNFMAREGRGLICVTLTPERAHTLDLTPMVGMSTDPHGTAFTVSVDHISTSTGISAFDRAATIRALLDPAARPEDFRRPGHIFPLVARPGGVLRRAGHTEAACDLARLAGFAPVGVICEIMGDSGEMLRLPDLLAFGERHGLKVGSIEALIAYRMEHDPFMRIAAEAKLPTAYGEFRLVGFEDTLSGAEHVALVMGEVNEEPLLVRVHSECLTGDAFHSLRCDCGPQRDAALRAIAEEGRGVLVYLRQEGRGIGLLNKIRAYALQDQGADTVEANLRLGFPADARDFGIGAQILHLLGARRLRVLTNNPRKLHALGGFGLEVVERVPLHVGQNVHNAAYLATKAEKLGHLALPSSQESA

SEQ ID NO: 49474 - DNA, 627 bp, Azotobacter vinelandii AvOP
  CDS (1)..(627): transl_table=11
gtgtccgtcgtcttcgtcgccgcatccaagctgcccacgccgttcggcgtcttcaccatgcatggctttctcgacgaagccaccggcaaggagcatgtggcgctcaccctgggcacggtggacgatggcgcgccggtgctcggccgcctgcattccgagtgcctgaccggtgatgcgctgttcagcctgcgctgcgactgcggctttcaactggaagccgcactgcgcgccatcgccgccgagggccgtggcgtgctgctctacctgcgccaggaggggcgcggcatcggcctgctcaacaagatccgcgcctacaagctgcaggacgccggcgccgataccgtcgaggccaacgagcgcctgggttttcgcgccgaccagcgcgactacgggatctgcaaaccgatgctcgagcatctgggcatcaccgcgatcaagctgatgaccaacaatccgcgcaaggtcaaggcgctggagggggccggcatccaggtgaccgaacgggtaccgctgcagaccgggctcaacccccacaaccagaaatacctggcgaccaaggccggcaagctcggtcacctgctcggcagcctgcatcagggcgaggtggaaacgccgaccgggagctga

SEQ ID NO: 49475 - protein, 208 aa, Azotobacter vinelandii AvOP
MSVVFVAASKLPTPFGVFTMHGFLDEATGKEHVALTLGTVDDGAPVLGRLHSECLTGDALFSLRCDCGFQLEAALRAIAAEGRGVLLYLRQEGRGIGLLNKIRAYKLQDAGADTVEANERLGFRADQRDYGICKPMLEHLGITAIKLMTNNPRKVKALEGAGIQVTERVPLQTGLNPHNQKYLATKAGKLGHLLGSLHQGEVETPTGS

SEQ ID NO: 49476 - DNA, 624 bp, Chromohalobacter salexigens DSM 3043
  CDS (1)..(624): transl_table=11
gtgacgattcgcttcatcgccgcctcccaactgcccacgccatgggcgacattcaccatgcacggcttcgaagacgatgccacgggcaaggagcacgtcgccttgaccctgggcgatgtctcgacgtccgagcccgtgctggggcgcgtgcactcggaatgcctgaccggtgacgcactgttctcgatgcgctgcgattgcggctatcagctgcaggaagcgctcaagcgcatcgccgacgaaggacgcggcgtgctgctctacctgcgccaggaagggcgtggcatcggcctgctcaacaagatccgcgcctaccacctgcaggatcagggctacgataccgtggaggccaacgagcatctcgggttcggcgccgacatgcgccgttacgacctgtgcgtgcccatgctcgatcatctgggcgtgcaggcgctcaagctgatgaccaacaacccgcgcaaggtcgaagccttgacgcgcgatggcgtgcgcgtcgccgaacgcctggcgatcaccgccgggcgcaatcctcacaacgagcattatctcgccaccaaggtcggcaagctcggccacatgatggcgctgggcgaccccgccgccagggacgaccgcgagcactga

SEQ ID NO: 49477 - protein, 207 aa, Chromohalobacter salexigens DSM 3043
MTIRFIAASQLPTPWATFTMHGFEDDATGKEHVALTLGDVSTSEPVLGRVHSECLTGDALFSMRCDCGYQLQEALKRIADEGRGVLLYLRQEGRGIGLLNKIRAYHLQDQGYDTVEANEHLGFGADMRRYDLCVPMLDHLGVQALKLMTNNPRKVEALTRDGVRVAERLAITAGRNPHNEHYLATKVGKLGHMMALGDPAARDDREH

SEQ ID NO: 49478 - DNA, 1242 bp, Clostridium thermocellum ATCC 27405
  CDS (1)..(1242): transl_table=11
atgaattttgatacaattgagtccgcgatagaggacatcaggcagggaaaaatgatagttgtggttgacgatgaagacagggaaaacgaaggcgacctgctgatggcggcggagctggttacaccggagcatatcaatttcatggcaacatacggaagaggtatgatttgcgccccgataaccgaggccagggcaaaggaattgggactggaattaatggtaacgaaaaacagtgaacacatgagaaccgcctttacagtgacggtggaccataaaagcacgactaccggtatttcggcttttgaaagagctaaaacaataaaggaactttcaaatcctgatgccaaaccggatgattttgtaaggcctggacatgtttttccattaattgctaaagaaggcggagttctaaaacgtgcaggtcatactgaagccgcagtagactttgcaaaactggcaggactttaccctgccggggtaatatgcgaaattatgaatgatgacggaaccatggccagagttccgcagcttatggaatttgtaaaaaaacacggacttaaacttgttaccatagcagatcttataaaatacagaagaaataatgaaaaattgataagaagggcggcggaggcaaaacttcccactgaatacggggattttaaaatagttgcttatgaaaacgttataaacggagaacatcatgtagcattggtaaagggagatgtggcaaactccgacgagcctgtaatggtgagggtgcattcggagtgccttaccggggatgcgttccattccttaaggtgcgactgcggtgagcagctgcacaaagccatggaaatgataggaaaagaggacaagggagtacttttgtacatgagacaggaaggccgtggaattggccttgtaaacaaaatccgggcgtatgagcttcaggatcagggaaaagataccgttgaggccaatgtgcttttgggatttccccccgatcttagggaatatggcataggagcccagatattatacgacctcggtgtaaggaaaataaggcttcttaccaacaatcccaagaagctgataggacttggcggtcacggactggaaattgttgaaagggtgcccattgagataaagggaaacgaaatcaacagtttctatttgaaaaccaaaaaggaaaaaatggggcatttattaaccagtataaacacaacggaacatcaggagggagaatcaaatggcaattaa

SEQ ID NO: 49479 - protein, 413 aa, Clostridium thermocellum ATCC 27405
MNFDTIESAIEDIRQGKMIVVVDDEDRENEGDLLMAAELVTPEHINFMATYGRGMICAPITEARAKELGLELMVTKNSEHMRTAFTVTVDHKSTTTGISAFERAKTIKELSNPDAKPDDFVRPGHVFPLIAKEGGVLKRAGHTEAAVDFAKLAGLYPAGVICEIMNDDGTMARVPQLMEFVKKHGLKLVTIADLIKYRRNNEKLIRRAAEAKLPTEYGDFKIVAYENVINGEHHVALVKGDVANSDEPVMVRVHSECLTGDAFHSLRCDCGEQLHKAMEMIGKEDKGVLLYMRQEGRGIGLVNKIRAYELQDQGKDTVEANVLLGFPPDLREYGIGAQILYDLGVRKIRLLTNNPKKLIGLGGHGLEIVERVPIEIKGNEINSFYLKTKKEKMGHLLTSINTTEHQEGESNGN

SEQ ID NO: 49480 - DNA, 1119 bp, Solibacter usitatus Ellin6076
  CDS (1)..(1119): transl_table=11
atgcccattgtttcagtgccggacgcgatccaggaaatccgcgccgggcgcatcatcgtcgtggttgacgatgaagaccgggaaaacgagggcgacctcaccattgccgcggaaaaagtcactcccgagatcattaattttatggccgttcagggccgcggactgatctgcctcgcgctcacggccgaacgctgcgactaccttcgcctgccgctcatgagccccaccaacacctccatgttcggcaccgcgttcaccgagtccatcgatgcccttcatggcgtgaccaccggcatttccgccgccgaccgcacccgcaccatcctccaggccatcgaccccgactgccgccccagcgacctggcgcgcccaggccacatgtttcccctgcgcgcccgggagggcggcgtcctggtccgtgccggacagaccgaagccagcgtcgatctggcccgcctggccggcctcacccccgccggagtcatctgcgaaatcatgaatgatgatggcaccatggctcgcgtgccccagctcatcgagttctgcaagcgccacgacatgaaaatgctctccgtggccgagctgatccggtaccggatgaaaaacgagaagttcatccgccgggtggccgaaggtatcatccctaccgaattcggcgatttccgcaccattgcctacgccagcgatctcaaccccgaataccatctggccctggtgcgcggcgatgtctcgggcaaggaaagcgtactggttcgcatgcattcacgctgtgtcttcggggacgtcttccgctccagccagtgcgagtgcggccaactggtgcagaattcgctgcgcgccatcgccaaagaggggcagggcgtgctcgtctacctgcacgaaaccggccccggctttcgcgtagacagtggacagctggtcagccacggccgcgattttatgcacctcaagggtgaggacgggcagcgccagctccagcacgagcacggcctgggcgcccagattctctccgatctcggcctccacaccattcgcctgctcaccaaccatccccgcaaaatcgttgccttggaaggctttggcatcgaagttgaggcccagatcccggttggccactga

SEQ ID NO: 49481 - protein, 372 aa, Solibacter usitatus Ellin6076
MPIVSVPDAIQEIRAGRIIVVVDDEDRENEGDLTIAAEKVTPEIINFMAVQGRGLICLALTAERCDYLRLPLMSPTNTSMFGTAFTESIDALHGVTTGISAADRTRTILQAIDPDCRPSDLARPGHMFPLRAREGGVLVRAGQTEASVDLARLAGLTPAGVICEIMNDDGTMARVPQLIEFCKRHDMKMLSVAELIRYRMKNEKFIRRVAEGIIPTEFGDFRTIAYASDLNPEYHLALVRGDVSGKESVLVRMHSRCVFGDVFRSSQCECGQLVQNSLRAIAKEGQGVLVYLHETGPGFRVDSGQLVSHGRDFMHLKGEDGQRQLQHEHGLGAQILSDLGLHTIRLLTNHPRKIVALEGFGIEVEAQIPVGH

SEQ ID NO: 49482 - DNA, 615 bp, Shewanella baltica OS155
  CDS (1)..(615): transl_table=11
atgtcgataaaatatgtcgcgacgtcaaagttacccactccttggggcgtgtttgccatgcatggttttgaagatacagaatcaggcaaagagcatgttgcgctcacattcggtacgctcagtgcggatgaacctgtgttgggtcgaattcattccgagtgtttaactggcgatgcgttatttagcttgcgttgtgactgtggttttcagttacaagcggcgatgcaaaatattgcggaaacgggcagtggctttatcctctatttgcgccaagaaggccgtggcattggtttattgaataaaatccgcgcctatgagctgcaagataaaggtgccaacacagttgaagccaacgagcaactgggcttcgaagccgatatgcgtaaatacgacatgattaaacctatactggaacagataggcgtgaagcatgtgcgtttgatgaccaataaccctcgtaaagtgaaagcgatgaaggaatttggcatcgaagtggttgagcgcgtaccgctgcaagttggtaagaatcgttacaacgaagcctatttaaaaaccaaatccactgagcttggacacatgatgtctgaatatcattttatggatgaaaataagtag

SEQ ID NO: 49483 - protein, 204 aa, Shewanella baltica OS155
MSIKYVATSKLPTPWGVFAMHGFEDTESGKEHVALTFGTLSADEPVLGRIHSECLTGDALFSLRCDCGFQLQAAMQNIAETGSGFILYLRQEGRGIGLLNKIRAYELQDKGANTVEANEQLGFEADMRKYDMIKPILEQIGVKHVRLMTNNPRKVKAMKEFGIEVVERVPLQVGKNRYNEAYLKTKSTELGHMMSEYHFMDENK

SEQ ID NO: 49484 - DNA, 618 bp, Shewanella amazonensis SB2B
  CDS (1)..(618): transl_table=11
atgtcgataaagtatgtcgccacctccaagttgccaacgccctggggcgtttttgccatgcacggttttgaagacagtgaaaccggaaaggagcatgtggcactgacctttggcgatctcagtggtgatgctcctgtactgggacggatccattctgaatgtttgaccggtgacgccctgttcagcctgcgctgtgactgtggttttcagctgcaaacagccatgcagcgcatcgctgaaaccggccgtggctttattttgtatctgcgtcaggaagggcgcggcattggtctgctaaacaaaatccgtgcctatgagttgcaggataaaggagccaataccgtcgaggccaacgagcagctcggatttgccgccgatatgcgcaagtacgatatgatagcccccatgttggcgcatctgggtatttcccgggtcaagctgatgaccaataatccccgtaaagtcaacgccatgaaagatgtgggtatggatgtggttgagcgagtaccgctgcaggtggggaaaaatcgctacaacgaagcttacctcaaaaccaagtctgataagctcggacacatgatgtctgaagagcacttcaaggctcagcatcaggactga

SEQ ID NO: 49485 - protein, 205 aa, Shewanella amazonensis SB2B
MSIKYVATSKLPTPWGVFAMHGFEDSETGKEHVALTFGDLSGDAPVLGRIHSECLTGDALFSLRCDCGFQLQTAMQRIAETGRGFILYLRQEGRGIGLLNKIRAYELQDKGANTVEANEQLGFAADMRKYDMIAPMLAHLGISRVKLMTNNPRKVNAMKDVGMDVVERVPLQVGKNRYNEAYLKTKSDKLGHMMSEEHFKAQHQD

SEQ ID NO: 49486 - DNA, 609 bp, Shewanella frigidimarina NCIMB 400
  CDS (1)..(609): transl_table=11
atgtcggtaaagtatatcgcaacatctaagttacccactccttggggtgtttttgctatgcacggttttgaagaaaccgccacaggtaaagaacacgttgcattgacatttggtcaactggatcccacggagcccatgttaggtcgtattcattcagaatgtttgaccggtgatgcattatttagtttacgttgtgattgtggttttcaattacaagcggccatgcagagtattgctgaacaagggcaggggtttcttctgtacttgcgccaggaaggccgtggtattgggttacttaataaaataagagcttacgagctgcaagatgctggtgccaatacggttgaagctaatgagcgtttaggctttgaagctgatatgcgtaaatacgacatgattttgccgatgttaacgcaaattggcgtgaccaaagtaaagttgatgaccaataacccgcgtaaagtgatggcgatgcaaaatatgggtatcgaagtcgcagaacgtattccgttacaagtgggtaaaaatcgctataacgaatcatatttaaagaccaaatcaacagagttgggtcatatgatgtcggaataccatttccacgatgaatag

SEQ ID NO: 49487 - protein, 202 aa, Shewanella frigidimarina NCIMB 400
MSVKYIATSKLPTPWGVFAMHGFEETATGKEHVALTFGQLDPTEPMLGRIHSECLTGDALFSLRCDCGFQLQAAMQSIAEQGQGFLLYLRQEGRGIGLLNKIRAYELQDAGANTVEANERLGFEADMRKYDMILPMLTQIGVTKVKLMTNNPRKVMAMQNMGIEVAERIPLQVGKNRYNESYLKTKSTELGHMMSEYHFHDE

SEQ ID NO: 49488 - DNA, 1659 bp, Lycopersicon esculentum
  CDS (1)..(1659)
atggcttccatcaacatttctttcccttcaacaacatttcacagtcgatcacaagcgaacttcaagttgttcagtgggttgcattctggagatgtagtttctcttaatggggtctcgtcagggtcattcatacggcttaatgctagaccacacttaaccatcaagagtgatttcaagattacttctgcattgttatctggtgaaggagacatccgatttcaatccaggggagaaaaaactctgtttagtagcctctctacaggaactgagactcaacctgatgctgtaacctttgcaacgctagaagcagatggtgttcagacaactagtggttttctttcagatgacgatgaatgtgatttggatcgaccgaccgaaggtttttcatctgttcctgaggctattgaggacattcgccaaggaaagatggtgctagttacagatgatgaagacagagaaaatgaaggggatttagttatggctgcatccaaagctacaccagaagcaatggctttctttgtgaagtatggaacagggatagtttgtgtgagcatgacagaagaacacttggagaggctacagcttccgttgatggtaaacgataaaaagaatgaggagaaactttgtacagcattcacagtctcagtggatgcgaaacatggaacgactacaggagtatctgctcatgatagagcaacgacagtattggcacttgcgtccggagattcaaagcctgaggatttcaatcgaccgggacatatctttcctttgaaatacagggaaggcggggttttaaaacgagctggacatactgaggcttctgtggatcttgccgtgttagctggcttagaccctgttggagtaatatgtgaggttgtggatgatgatggttccatggctagattgcctatgcttcgtcaatttgcaaaagaacataacttgaagatcatatcagttgctgacttaatcagatataggagaaaaacagatcagctggtagagcatgcttctgctgcaagaatacctacaatgtggggcccgtttactgcccactgcttcaagtcaataatagatggaattgagcacattgctatggttaagggggatataggagatggacaagatattcttgttcgggtacactcggaatgcctcacaggagatatatttggttcagccagatgtgactgtggatcccagctggcaactgcaatgaagcaaattgaggctgctggcaggggggttttggtttacctccgcggtcatgatggtagaggcattggtttgggtcacaaacttcgtgcttataatttacaagatgctggacgtgatactgttgaagcgaatgaagatcttggtttgcccgttgattcaagaaactatggggttggtgcacagatcttaagggatcttggtgttccaactatgaagtttataacgaacaatcctgcacaatacagctggctaaaaggttatggtttggcaatttctggtatggtccccgttgttactccctttactaaccactacgacacatatttggaaacaacacgagctaaaatgggccatgtatacggcttgaaccttattcgcccggcaaccagcaccagcacaacaaatggtaaaccaaactctgagaatacttctactataagatga

SEQ ID NO: 49489 - protein, 552 aa, Lycopersicon esculentum
MASINISFPSTTFHSRSQANFKLFSGLHSGDVVSLNGVSSGSFIRLNARPHLTIKSDFKITSALLSGEGDIRFQSRGEKTLFSSLSTGTETQPDAVTFATLEADGVQTTSGFLSDDDECDLDRPTEGFSSVPEAIEDIRQGKMVLVTDDEDRENEGDLVMAASKATPEAMAFFVKYGTGIVCVSMTEEHLERLQLPLMVNDKKNEEKLCTAFTVSVDAKHGTTTGVSAHDRATTVLALASGDSKPEDFNRPGHIFPLKYREGGVLKRAGHTEASVDLAVLAGLDPVGVICEVVDDDGSMARLPMLRQFAKEHNLKIISVADLIRYRRKTDQLVEHASAARIPTMWGPFTAHCFKSIIDGIEHIAMVKGDIGDGQDILVRVHSECLTGDIFGSARCDCGSQLATAMKQIEAAGRGVLVYLRGHDGRGIGLGHKLRAYNLQDAGRDTVEANEDLGLPVDSRNYGVGAQILRDLGVPTMKFITNNPAQYSWLKGYGLAISGMVPVVTPFTNHYDTYLETTRAKMGHVYGLNLIRPATSTSTTNGKPNSENTSTIR

SEQ ID NO: 49490 - DNA, 618 bp, Pseudomonas fluorescens
  CDS (1)..(618): transl_table=11
gtgcccgtcgtttttgttgctgcttgcaagctgcctacgccttttgcgcaattcaccatgcatggttttctcgatgaagctaccggccgcgagcatgtggtgctcagcctgggcgatatcgccgacggcgctccggttctcggccgcctgcactccgagtgcctgaccggcgatgcactgttcagccagcgttgcgactgcggctcgcaactggaagccgccctgcaggccatcgcccgcgaaggtcgtggggtgttgctgtacttgcgccaggaaggccggggtatcggcctcttgaacaagatccgcgcctacgaactgcaggacggtggcgccgacaccgtggaggccaacgaacgcctgggctttgccgccgaccagcgcgactacgccatgtgcctgccgatgctggagcacctgggggtcaagtccctgcgcctgatgaccaacaacccgcgcaaggtcaaggccttgaccgagatggggatccaggtcgccgagcgcgtaccgctgcacaccggccataacccgcacaacaaactctacctggcgaccaaggccagcaagctcgaccacatgatgggcaacgagcaccagggcgaggtcgaccgcgcgtga

SEQ ID NO: 49491 - protein, 205 aa, Pseudomonas fluorescens
MPVVFVAACKLPTPFAQFTMHGFLDEATGREHVVLSLGDIADGAPVLGRLHSECLTGDALFSQRCDCGSQLEAALQAIAREGRGVLLYLRQEGRGIGLLNKIRAYELQDGGADTVEANERLGFAADQRDYAMCLPMLEHLGVKSLRLMTNNPRKVKALTEMGIQVAERVPLHTGHNPHNKLYLATKASKLDHMMGNEHQGEVDRA

SEQ ID NO: 49492 - DNA, 759 bp, Burkholderia glumae
  CDS (1)..(759): transl_table=11
atgccaggggcggttcgatccgccccattcgtccagactctgcgcaaatcgccagggcataccagcccgttagcgtgtctatcgatgcgcgcgtatctcccgaacctgagaggccgagccatgaatcaatccgatgatcattccggtgtgagcatccgcacacgcatcaaggtgccgattcgtccgcgttcgagcgcgacggcatttgaaaccgagatggtgaccttcaacggtctttgcgacagcgccgaacatatcgcgctggtgttcggcaagatcggcgaggcgccgctggtgcgcctgcattccgagtgcctgacgggcgacgtgttcggctccgcgcgctgcgactgcggcgagcagctcgacgagtcgatcgcgctgttcggcgagcgcggcggcatcctgctctacctgcgccaggaagggcgcggcatcgggctctacaacaagctcgacgcctatcgcctgcagatctcgcagggactcgacaccttcgctgccaatcgcgcgctcaacttccccgacgacctgcgcgacttccgcgtggcggcccagatgctcaaggcgctcggcgtcggcgaggtctcgctggtcaccaacaaccccgacaagaccgcgcaactgacccgtcacggcatcaaggtgcgccaggtgaagtcgaccggcgtgttcgccaacagcgtcaactttggttatctgcatgcgaaggcgacccagcaccggcatgccatcaagctcaacggagaaatgcaatga

SEQ ID NO: 49493 - protein, 252 aa, Burkholderia glumae
MPGAVRSAPFVQTLRKSPGHTSPLACLSMRAYLPNLRGRAMNQSDDHSGVSIRTRIKVPIRPRSSATAFETEMVTFNGLCDSAEHIALVFGKIGEAPLVRLHSECLTGDVFGSARCDCGEQLDESIALFGERGGILLYLRQEGRGIGLYNKLDAYRLQISQGLDTFAANRALNFPDDLRDFRVAAQMLKALGVGEVSLVTNNPDKTAQLTRHGIKVRQVKSTGVFANSVNFGYLHAKATQHRHAIKLNGEMQ

SEQ ID NO: 49494 - DNA, 1083 bp, Wolbachia endosymbiont of Armadillidium vulgare
  CDS (1)..(1083): transl_table=11
atgtttatagaaaatcggaatagcaataaggtagaaagagctatcagcgaaattagaagtggccggccaattgtaatatatgatgaaagtaattacctattgtttgctgctgttgaggctttagaaagagatttatttaatcaatacaagcttatatcaagtaatgtatatgttactttaacttcaagtaaggtaaaatacatatctcaaaataaagaacataacagcaaacgtctgttggtgaataattttgatgaactgctctatttaataaactgttcaaaggaagattgcataaaagagttgcaatgctcaaagacaatagatgaatgtgctattgccttgcttaaattctcagaattattgccatacgcattagtggctgatatgacttttgagaataaccatgaaatgcaaaattggtgcgagaaaaatgacgttattgcactggacacgtcattcataaataattttcaagaaaatcaggatgtatatgaagtgtgcaaaacatcattatttttaaaacagactcaagaagtagatatcatatcttatagaaccgaaagtggcggaagagaacatcatgcaattatcattggcaatccagataaagatgacgaaccattagtgagaattcattcttcgtgctatacgggtgacttgttagatagcttatcatgcgattgtagaagtcagttacatcaagcaattcaaatgatagctgactttggaagtggtattatattgtatttgatgcaagatggaagaggcattggtttagctaataagttaagagcgtacagtatgcaaagaagacataatcttgatactgttgatgcaaatagagtattgggttttgaagatgatgaaagaagctttgctgttgcagttgaaatactcaagaaattagacatcaaaaagatccaattacttacaaataacggtaggaagttatcggagttgaaaaacaatggtatagaggttacaaagtgtctaccacttattatggaacgtaatgaatataatgattcatatatggaaacaaaatttggtaggctaggccatggattaagggttttttag

SEQ ID NO: 49495 - protein, 360 aa, Wolbachia endosymbiont of Armadillidium vulgare
MFIENRNSNKVERAISEIRSGRPIVIYDESNYLLFAAVEALERDLFNQYKLISSNVYVTLTSSKVKYISQNKEHNSKRLLVNNFDELLYLINCSKEDCIKELQCSKTIDECAIALLKFSELLPYALVADMTFENNHEMQNWCEKNDVIALDTSFINNFQENQDVYEVCKTSLFLKQTQEVDIISYRTESGGREHHAIIIGNPDKDDEPLVRIHSSCYTGDLLDSLSCDCRSQLHQAIQMIADFGSGIILYLMQDGRGIGLANKLRAYSMQRRHNLDTVDANRVLGFEDDERSFAVAVEILKKLDIKKIQLLTNNGRKLSELKNNGIEVTKCLPLIMERNEYNDSYMETKFGRLGHGLRVF

SEQ ID NO: 49496 - DNA, 1197 bp, Lactococcus lactis subsp
  CDS (1)..(1197): transl_table=11
atgtttcaatataatacagtagaagaagccttaacagcccttaaagcaggtgaaataattattgtcactgatgatgagaatagagaaaatgaaggagatctgatttgtgcagccgaaatgattagtccagaaaagataaatttcatggccagtcaggcaaagggattaatttgtagtccgatgagtgaaaaatatgctaagagtctgcatttgtcagcaatgacggagagaaatacagacaaccacgggacagcttttactgtttctgtcgatcatgtagagacaagtacaggggtatcagcctttgaccgttcgctgactattagaaaacttgctgatgaagaaagttcagtcgaagattttcgaagacctggtcatgtctttcctctgattgcaaggaaaaatggagtcttagaacgcaatggacacacagaagcaacagttgatttgttacgacttgctggtctaaaggaagtgggagtttgtgttgaaataatggccgaagatggtagcatgatgcgcacagaagaacttcaagaaaaagcaaaagaatgggacttgaattttatcacaatcaaggccatacaaaaatatcgaaaacaaaatgaacaactggttgagcaagttaccagagcgaaacttccaacaaaatatggttattttgaaatctttggatttgtcaataaaataaatggtgagcatcatgtcgccctagttaagggggacattggagagggagaagcagtgctttgccgagttcattcggaatgtttgactggagatgcttttggctcaatgaaatgtgattgtggtgaacaattagaacaagctctaacacagataaatgtcgagggacgagggattttattatatcttcggcaagaagggcgaggaatcggtttaatcaacaaacttcgtgcatattcacttcaagatgaggggcttgatacaattgaagcaaatttagccctaggttttgaagaagatgcgcgtgaatactccataggtgctcaaattttgaaaacacttggtgtgaagtctttaagattaatgactaataacccacaaaaaatcaatgatttttcaaaatatggactaccagttaaagaaagagttccaattcaaattaaagaaaatgaatttgatcaggattatttaaaagtaaagcaaactaaaatgggacatttgttcgattaa

SEQ ID NO: 49497 - protein, 398 aa, Lactococcus lactis subsp
MFQYNTVEEALTALKAGEIIIVTDDENRENEGDLICAAEMISPEKINFMASQAKGLICSPMSEKYAKSLHLSAMTERNTDNHGTAFTVSVDHVETSTGVSAFDRSLTIRKLADEESSVEDFRRPGHVFPLIARKNGVLERNGHTEATVDLLRLAGLKEVGVCVEIMAEDGSMMRTEELQEKAKEWDLNFITIKAIQKYRKQNEQLVEQVTRAKLPTKYGYFEIFGFVNKINGEHHVALVKGDIGEGEAVLCRVHSECLTGDAFGSMKCDCGEQLEQALTQINVEGRGILLYLRQEGRGIGLINKLRAYSLQDEGLDTIEANLALGFEEDAREYSIGAQILKTLGVKSLRLMTNNPQKINDFSKYGLPVKERVPIQIKENEFDQDYLKVKQTKMGHLFD

SEQ ID NO: 49498 - DNA, 1620 bp, Malus domestica
  CDS (1)..(1620)
atggcttccatcaacccctattgctcctcaacggctctttccccttctccagggcacactattctatatcctgggacttcgcttgcagcaaatgggcgattatccggttttgtcacaccgagtgtatcatggaaattgttctttcattccaagggatcaattaaggcaagagctttgctgggagaagatggtctcctgtcttacccaaatggcaacccaactgggagtgaaatacaacctgatgcattaggtttcggaacagtttcagcagaaacaaccccaacgtttagtgggttctcttctgaaaatgatgaaggtgatctagatcaccctatacatggattttcttccattccagaggccattgaagatatacgtcaaggcaagatggttatcgttgtagatgatgaagatagagaaaatgagggagatcttataatggcagcttccttggcaacaccagaagctatggcatttattgtcaagcacggaactgggattgtttgtgtgagcatgaaaggagaagacttggagaggttgcaacttccacttatggtgacacagaatgaagaaaaactttgtacggcattcactgtctcagtggatgcaaaacgtggtacgacaactggtgtttctgctcgtgatagagctgcaacagtcttggctcttgcatcaagagattcaacacctgaagatttcaaccgcccaggacatatctttcccctaaagtacagagagggaggagttctaaaaagagccggtcacactgaagcttcagttgatcttgctatgttggctgggctggatccagtagcagttttatgtgaaattgtggatgatgacggttctatggctaggttaccaaagcttcttgaatttgcaagggcagaaaacttgaaaattgtttccattgctgatttgataagatatagaaggaaaagagataagttggtggagagggctggagttgcacgcatacccacaatgtgggggccatttgaagcctactgttataaatcattgctcgatgggattgagcacattgctatggttaaaggtgaaattgctgacgggcaagaaatacttgtgagggtacactctgagtgcctcactggtgacatatttgggtcagccagatgtgactgtggaaaccagcttgcacttgcaatgaagcaaattgaagcagctggtaggggtgttttggtgtatctccgtggacatgaaggtagaggaattggtttgggtcacaagctccgagcttatacactgcaggatgctgggcgtgacactgttgaagctaatgaggagctgggattacctgttgattctcgcgagtatggcataggtgcacagatactacgagatctaggtgttcgaacgatgaagctgatgactaacaatcctgcaaaatatattggcctcaagggttatggtttggccattgctggcagagtcccattgttggcaccgataactatggagaatcggaaatacctggagaccaaacgggcaaaaatggggcacatctatggttcaaaatccaatggtcatgtaaatggcacaatcgatgaaagtagttcgaaaattgacaaccaatctaatgatgtgtccgagacatga

SEQ ID NO: 49499 - protein, 539 aa, Malus domestica
MASINPYCSSTALSPSPGHTILYPGTSLAANGRLSGFVTPSVSWKLFFHSKGSIKARALLGEDGLLSYPNGNPTGSEIQPDALGFGTVSAETTPTFSGFSSENDEGDLDHPIHGFSSIPEAIEDIRQGKMVIVVDDEDRENEGDLIMAASLATPEAMAFIVKHGTGIVCVSMKGEDLERLQLPLMVTQNEEKLCTAFTVSVDAKRGTTTGVSARDRAATVLALASRDSTPEDFNRPGHIFPLKYREGGVLKRAGHTEASVDLAMLAGLDPVAVLCEIVDDDGSMARLPKLLEFARAENLKIVSIADLIRYRRKRDKLVERAGVARIPTMWGPFEAYCYKSLLDGIEHIAMVKGEIADGQEILVRVHSECLTGDIFGSARCDCGNQLALAMKQIEAAGRGVLVYLRGHEGRGIGLGHKLRAYTLQDAGRDTVEANEELGLPVDSREYGIGAQILRDLGVRTMKLMTNNPAKYIGLKGYGLAIAGRVPLLAPITMENRKYLETKRAKMGHIYGSKSNGHVNGTIDESSSKIDNQSNDVSET

SEQ ID NO: 49500 - DNA, 1131 bp, Aspergillus fumigatus
  CDS (1)..(1131)
atgacccctgcggttcccgcatcattactctccccatccttcactcctccagcaacccccgggggctcgatcaataccgcggagctgcttcaacagacccaattagctggcgcacggcaagggtcaacacatactaagcccccgaggttgctttctcgtcttcccaatgtcgaatgtatcgtccgcgctcggatacccacgacaactggcgcggagatgtttcttcacctgtaccacaatgacttagacaacaaagagcatttggcgattgtgtttggaaatacaattcgaagcagaagcttggacaagatccggcctggagagacggagatggatcgcatgatccgtggcgcgtatgtcgggaaactccgaccgggccgtgtgagcagctggtatgacgaggagaaagctgaagaggccgccagtccggaagctggcggcgctgtatccagtccgcacacactgccgcgaagtagcctcaaggaggcacctcttgtgagaatccattcggagtgctacactggtgagacggcttggtctgcacgctgcgactgcggcgagcagctcgatgaagcagctcgcctcatgtcgctgcctatggaaacgttggcagaggctgcgtcaccgccggatggggcggtaccgtcaaatgctgctggaggtgtaattgtgtacctgcgccaagaaggacgaggcattgggctgggcgagaaactgaaagcgtacaatcttcaggatctgggatcagacacggtggaagccaatctcctgcttcgccaccctgcggatgcaagaagttatggattagctacggcgatcctggtggatcttggtctagggattgactcgaatccgcacggcatccgactactcacgaataacccggacaagattcgagcggttgagggacccaaccgagaagtggtggtgaaagagcgggtgccgatggtgccattggcatggagatcgggtggaaagatgggaatcaagagttccgaggtcgaagggtatctgagaacgaaggtatgtcgacaatctatctcttgcaagctagcttattttctcatcattcttaaacaatgtctcactctctcctcgcagatatcgaaaatgggccatttgctccaatga

SEQ ID NO: 49501 - protein, 376 aa, Aspergillus fumigatus
MTPAVPASLLSPSFTPPATPGGSINTAELLQQTQLAGARQGSTHTKPPRLLSRLPNVECIVRARIPTTTGAEMFLHLYHNDLDNKEHLAIVFGNTIRSRSLDKIRPGETEMDRMIRGAYVGKLRPGRVSSWYDEEKAEEAASPEAGGAVSSPHTLPRSSLKEAPLVRIHSECYTGETAWSARCDCGEQLDEAARLMSLPMETLAEAASPPDGAVPSNAAGGVIVYLRQEGRGIGLGEKLKAYNLQDLGSDTVEANLLLRHPADARSYGLATAILVDLGLGIDSNPHGIRLLTNNPDKIRAVEGPNREVVVKERVPMVPLAWRSGGKMGIKSSEVEGYLRTKVCRQSISCKLAYFLIILKQCLTLSSQISKMGHLLQ

SEQ ID NO: 49502 - DNA, 1383 bp, Oryza sativa
  CDS (193)..(1383)
gcttcctttcggactgttggtgctaaaatcactcaggaaactggtgatttctttgttagcgatgcagagggtgacccagacaaaccaactgatggtttttcctctattgatgaggctataggcgcattgcatgaaggaaagtttgttattgctgtagatgatgaaagcggtgataatgaaggggatcttgtcatggcagctacgctggcagacccagaatctattgcattcatgatcaggaatggttctgggatcatctcagtgggcatgaaggaagaggacttaacaagattgatgattcctatgatgtctccaattgcagaaattgaggatatttcagctgctgcttccacagtaacagtggatgccagagtgggcatatcaaccggcgtctcggctgcagatagggcaaaaacgatttttactctagcctcccctgattctaagccaactgacctcagaagaccaggccatatattccctctaaaataccgaaacggtggtgtgctaaaaagagctggacatactgaggcatccgtcgatcttgtcgcgttggctggcttgcgccctgtgtctgtcctgtcaaccgtcatcaacccagtggatggttcaatggcaggaatgccagtgctgaaacagatggctttggagcatgatatcccaattgtttcaatcgctgatctcatccggtatagaaggaagagggagaagctggtggaactgattgctgtatctcgtttgccgacgaaatggggccttttccgagcttactgctaccaatccaagcttgatggaaccgagcacattgctgttgcaaagggcgacatcggcgacggcgaggacgtcttggtgagggtccattccgagtgcctgaccggcgacatcctcggctccgcccgctgcgactgcggcaaccagctggacctggcgatgcagctcatcgacaaggccggccgcggcgtcctcgtctacctccgcggccacgagggccgcggcatcggcctcggccagaagctccgcgcctacaacctccaggacgacggccacgacaccgtccaggccaacgtcgagctcggcctcgccgtcgactcccgcgagtacggcatcggcgcccagattctgcgggacatgggggtgcgcacgatgcggctgatgacgaacaacccggcaaagttcgtcgggctcaagggctacgggctcgccgtcgtcggcagggttccggtgatctcccccatcaccaaggagaaccagaggtacctcgagacgaagcgcaccaagatgggccatgtctacggctccgacctccccggcaacgtcccggaggaattcctcaacccggacgacatcgccggagaccaagacgaagacgacacccacaactga

SEQ ID NO: 49503 - protein, 396 aa, Oryza sativa
MAATLADPESIAFMIRNGSGIISVGMKEEDLTRLMIPMMSPIAEIEDISAAASTVTVDARVGISTGVSAADRAKTIFTLASPDSKPTDLRRPGHIFPLKYRNGGVLKRAGHTEASVDLVALAGLRPVSVLSTVINPVDGSMAGMPVLKQMALEHDIPIVSIADLIRYRRKREKLVELIAVSRLPTKWGLFRAYCYQSKLDGTEHIAVAKGDIGDGEDVLVRVHSECLTGDILGSARCDCGNQLDLAMQLIDKAGRGVLVYLRGHEGRGIGLGQKLRAYNLQDDGHDTVQANVELGLAVDSREYGIGAQILRDMGVRTMRLMTNNPAKFVGLKGYGLAVVGRVPVISPITKENQRYLETKRTKMGHVYGSDLPGNVPEEFLNPDDIAGDQDEDDTHN

SEQ ID NO: 49504 - DNA, 639 bp, Burkholderia glumae
  CDS (1)..(639): transl_table=11
atgaatcaatccgatgatcattccggtgtgagcatccgcacacgcatcaaggtgccgattcgtccgcgttcgagcgcgacggcatttgaaaccgagatggtgaccttcaacggtctttgcgacagcgccgaacatatcgcgctggtgttcggcaagatcggcgaggcgccgctggtgcgcctgcattccgagtgcctgacgggcgacgtgttcggctccgcgcgctgcgactgcggcgagcagctcgacgagtcgatcgcgctgttcggcgagcgcggcggcatcctgctctacctgcgccaggaagggcgcggcatcgggctctacaacaagctcgacgcctatcgcctgcagatctcgcagggactcgacaccttcgctgccaatcgcgcgctcaacttccccgacgacctgcgcgacttccgcgtggcggcccagatgctcaaggcgctcggcgtcggcgaggtctcgctggtcaccaacaaccccgacaagaccgcgcaactgacccgtcacggcatcaaggtgcgccaggtgaagtcgaccggcgtgttcgccaacagcgtcaactttggttatctgcatgcgaaggcgacccagcaccggcatgccatcaagctcaacggagaaatgcaatga

SEQ ID NO: 49505 - protein, 212 aa, Burkholderia glumae
MNQSDDHSGVSIRTRIKVPIRPRSSATAFETEMVTFNGLCDSAEHIALVFGKIGEAPLVRLHSECLTGDVFGSARCDCGEQLDESIALFGERGGILLYLRQEGRGIGLYNKLDAYRLQISQGLDTFAANRALNFPDDLRDFRVAAQMLKALGVGEVSLVTNNPDKTAQLTRHGIKVRQVKSTGVFANSVNFGYLHAKATQHRHAIKLNGEMQ

SEQ ID NO: 49506 - DNA, 594 bp, Photobacterium leiognathi
  CDS (1)..(594): transl_table=11
atgatcacggtaagagcccgggtgccttttaaaatcgggcaaaaaagtcagatcccagcggagttattgtcgtttcatggctttaattcaggtaaagagcatatcgcaattatttttaaacaagcagataccacaaccgcccctttagttcgcttacattcagaatgcttaaccggtgatgtctttcattcttcgcgctgtgattgtggcgagcagctcaatgaaacaatagaaaaaatgcatcaattcggtgggatcattttgtatctacgtcaagaaggacgtggcattggtttatacaataaaatcgatgcctatcacttacaaagccaaggcatgaatacctatgaagccaataaccatttaggtttcgctgatgatctacgcgattttagtgaagctgcaaaagcattaatggcattaggcataaacaagatccgcttaatcactaacaacccaaagaaaatcaatgaacttcaacaacatggcattgagatcatagatgtggttaacactcaggtacacatcaaacaagacaacgaagattatctaaaaacaaaagcgttacacggccatcacaacctctctttatga

SEQ ID NO: 49507 - protein, 197 aa, Photobacterium leiognathi
MITVRARVPFKIGQKSQIPAELLSFHGFNSGKEHIAIIFKQADTTTAPLVRLHSECLTGDVFHSSRCDCGEQLNETIEKMHQFGGIILYLRQEGRGIGLYNKIDAYHLQSQGMNTYEANNHLGFADDLRDFSEAAKALMALGINKIRLITNNPKKINELQQHGIEIIDVVNTQVHIKQDNEDYLKTKALHGHHNLSL

SEQ ID NO: 49508 - DNA, 597 bp, Alcaligenes eutrophus
  CDS (1)..(597): transl_table=11
atgaatgacacagaaattgagctgatcgactcggcgcgcctgccgacgcgattcggcgactttacggcgcacgccttcaagggcgccgattcaggcatcgaacacctggccctcagcgtgggcgatgtgacgggcgatggcgtcctgatccgcatgcattccgaatgcctgaccggcgacgtcttcggttcctgccggtgcgactgcggtccgcagctcgagctcgccatggaaaagattgccgccgaaggtcgcggcatcctgctgtacctgcgcgggcatgaaagccgcggcattggcctggccgagaagatccgcgcctaccgcctgcaagacggcgggctcgacacggtcgacgccaacctggccctgggccaggcgatcgacgcacgcaactacgccttcgccgccgacctgctgcaccagtggggcgtcaagtccgtgcgcctgatgagcaacaatccgctcaaggccgcagcgctcgagaaggccggcatcacggttaccgagcagttgcgccacatcgtgccgtccaacgccgagaacgagaagtacctggctacgaagcgcacgcgcatggggcacctgctcgattga

SEQ ID NO: 49509 - protein, 198 aa, Alcaligenes eutrophus
MNDTEIELIDSARLPTRFGDFTAHAFKGADSGIEHLALSVGDVTGDGVLIRMHSECLTGDVFGSCRCDCGPQLELAMEKIAAEGRGILLYLRGHESRGIGLAEKIRAYRLQDGGLDTVDANLALGQAIDARNYAFAADLLHQWGVKSVRLMSNNPLKAAALEKAGITVTEQLRHIVPSNAENEKYLATKRTRMGHLLD

SEQ ID NO: 49510 - DNA, 561 bp, Thermoplasma acidophilum
  CDS (1)..(561): transl_table=11
ttgccaactgaatttgggcttttcaggatatatacatttgtaaatgatgaaaacaaggaccatgccgttatcgtacggggagatccgaggggaaaggaggatgtacctgtaagaatacattccgaatgcctcaccggtgacgttctcggatcgctgagatgcgactgcagggatcagctgatacagtccctgagatacctcggcaggcaggattacggtatgctgatttatctgaggcaggagggcagaggcatcggactcctcaacaagatcaaggcatacagcctccaggacagcggtgctgacactgtcgaagcgaatctgaaactcggcctgccggtagacagcagggattattcatttgcttcagaggtgataaagttcttcgaaataaagtccatatacataatgacaaacaacccggaaaagatgaaggcgcttatcgaaagcggcattaacgtcaagggtagaataccgattttcagcgatccaacgccatacgacaaattctatcttgaaaccaagaagataaagcttgggcacgagatagagaacatatga

SEQ ID NO: 49511 - protein, 186 aa, Thermoplasma acidophilum
MPTEFGLFRIYTFVNDENKDHAVIVRGDPRGKEDVPVRIHSECLTGDVLGSLRCDCRDQLIQSLRYLGRQDYGMLIYLRQEGRGIGLLNKIKAYSLQDSGADTVEANLKLGLPVDSRDYSFASEVIKFFEIKSIYIMTNNPEKMKALIESGINVKGRIPIFSDPTPYDKFYLETKKIKLGHEIENI

SEQ ID NO: 49512 - DNA, 654 bp, Actinobacillus actinomycetemcomitans
  CDS (1)..(654): transl_table=11
atgacaaaaattgaattagttgcccaagcgaatttaccgacagaattcggtctgtttaaaatcgtgggctttgaatttcccgacaccaaaaaagaacacgttgcgttggttttaggcgacatccgcaattcggacgaaccggtattagcgcgtattcattccgaatgcttaaccggcgacgcattacacagcctaaaatgcgactgcggtttccaactggcggcggcgttacgtcaaattcaacaggaagggctcggcgtattaatttaccaccgcgaagaaggcagaggcatcggcttaattaacaaaatccgcgcgtattccctccaagatcagggcatggacaccattgaagccaacctggctttaggctttgccgccgatgaacgcaattttggcgtatgtgcggatatttttgatttattgggcgtaacacaaattcgtctgctcaccaataatccgaacaaaatcaaaactatgaaacaggcaggaatcaacgtagttgcgcgggtaccgttaaatgtgggtgagaatcgttataacactgcctatttggacaccaaagcgaaaaaaatggggcattttatcgtgcataacggcgaacagcatttaatggaatgcccgtattgtcaggaagaagtgccgaaaaaataa

SEQ ID NO: 49513 - protein, 217 aa, Actinobacillus actinomycetemcomitans
MTKIELVAQANLPTEFGLFKIVGFEFPDTKKEHVALVLGDIRNSDEPVLARIHSECLTGDALHSLKCDCGFQLAAALRQIQQEGLGVLIYHREEGRGIGLINKIRAYSLQDQGMDTIEANLALGFAADERNFGVCADIFDLLGVTQIRLLTNNPNKIKTMKQAGINVVARVPLNVGENRYNTAYLDTKAKKMGHFIVHNGEQHLMECPYCQEEVPKK

SEQ ID NO: 49514 - DNA, 1092 bp, Wolbachia sp
  CDS (1)..(1092): transl_table=11
atgggtaaaaatgttataggaaatcagagtagcaataaggtagaaagagctatcagcgaaatcaggcgcggtcggccaattgtaatatatgatgaaagtaattacctattgtttgctgctgctgaggctttagaaagagatttatttaatcaatacaagcttacatcaagtaatgtatatgttactttaacttcaagtaaggtaaaatacatatctcagaataaagaacataacagcaaacgtctgttggtgaataattttgatgaactgctctatttaataaactgttcaaaggaagattgcataaaagagttgcaatgctcaaagacaatagatgaatgtgctattgccttgcttaagttctcagaattattgccatacgcgttagtggctgatatgacttttgagaataaccatgaaatgcgaaattggtgcgagaaaaatgacgttattgcactggacacgtcattcataaataattttcaagaaaatcaggatgtatatgaagtgtgcaaaacatcattatttttaaaacagactcaagaagtaaatatcatatcttatagaaccgaaagtggtggaagagaacatcatgcaattatcattggcaatccagataaagatgacgaaccattagtgagaattcattcttcgtgctatacgggtgacttgttagatagcttgtcatgcgattgcagaagtcagttacatcaagcaattcaaatgatagctgactctggaagtggtattatattgtatttgatgcaagatggaagaggcattggtttaactaataagttaagagcgtacagtatgcaaagaggacataatcttgatactgttgatgcaaatagaatattgggttttgaagatgatgaaaggagttttgctgttgcagctaaaatgcttaagaaattgaacattaacaaaatccaattacttacaaacaatgataggaaattgtcagaattggaaagtagtggtataggagttacaaagtgtctaccacttattgtggaacgtaataaatataacgattcatatatggagacaaagtttggtaaattaggccatagattaagagttttttag

SEQ ID NO: 49515 - protein, 363 aa, Wolbachia sp
MGKNVIGNQSSNKVERAISEIRRGRPIVIYDESNYLLFAAAEALERDLFNQYKLTSSNVYVTLTSSKVKYISQNKEHNSKRLLVNNFDELLYLINCSKEDCIKELQCSKTIDECAIALLKFSELLPYALVADMTFENNHEMRNWCEKNDVIALDTSFINNFQENQDVYEVCKTSLFLKQTQEVNIISYRTESGGREHHAIIIGNPDKDDEPLVRIHSSCYTGDLLDSLSCDCRSQLHQAIQMIADSGSGIILYLMQDGRGIGLTNKLRAYSMQRGHNLDTVDANRILGFEDDERSFAVAAKMLKKLNINKIQLLTNNDRKLSELESSGIGVTKCLPLIVERNKYNDSYMETKFGKLGHRLRVF

SEQ ID NO: 49516 - DNA, 1086 bp, Wolbachia sp
  CDS (1)..(1086): transl_table=11
atgtttataggaaatcaaagtagaaataaagtagaaagggccatcagtgaagtcaggcgtggtcttccaattttaatatatgatgataaaaataactatctattgtttgctgctgctgaaactttagaaaaaaatttgtttagtcaatataagcttatatcaggtaatgtatatgttactttgactgcaagtaaggtaaaatacatatgtcagagtaaagaacatagtagcaaacgtctgttggtaaacaattttgatgaactgctccatttaatagactgttcaaaggaagatcacataaaagaattgcaatgctcaaagacaatagatgaatatgctattgccttgcttaaattctcagaattattgccatacgcattagtggctgatatgacgtttgagaataaacatgaaatgcgaaattggtgtgaagaaaatgacattattgcactaaatacgttacttgtgaatgattttcaacgaaatcatagtgtgtatgaagtgtgcaaaacatcattatttttaaagcagactcaagaagtagatatcatatcttatagaaccaaaagtggcggaagagaacattatgcaattatcattggcaatccagataaagataatgagccattagtgagaattcattcttcatgctatacaggagacttattagacagcttatcatgtgattgcagaagccagttacatcaagcgattcaaataatgaccgactttgggaatggcattatattatacttgatgcaagatgggagaggcattggtttaactaataagttaagagcatacagtatgcaaagaaaatataatcttgatactgttgatgcaaatagagtattgggttttgaagatgatgaaaggagctttgctgttgcagctaaaatacttaagaaattgaacattaacaaaatacaattacttacaaacaatggtagaaagttatcagagttgaaaaataacggtatagaagttacaaagtgtgtaccacttattatggaacgcaatgaatataatgattcatatatggaaacaaaatttgacaagttaggccatggattaagggtttattag

SEQ ID NO: 49517 - protein, 361 aa, Wolbachia sp
MFIGNQSRNKVERAISEVRRGLPILIYDDKNNYLLFAAAETLEKNLFSQYKLISGNVYVTLTASKVKYICQSKEHSSKRLLVNNFDELLHLIDCSKEDHIKELQCSKTIDEYAIALLKFSELLPYALVADMTFENKHEMRNWCEENDIIALNTLLVNDFQRNHSVYEVCKTSLFLKQTQEVDIISYRTKSGGREHYAIIIGNPDKDNEPLVRIHSSCYTGDLLDSLSCDCRSQLHQAIQIMTDFGNGIILYLMQDGRGIGLTNKLRAYSMQRKYNLDTVDANRVLGFEDDERSFAVAAKILKKLNINKIQLLTNNGRKLSELKNNGIEVTKCVPLIMERNEYNDSYMETKFDKLGHGLRVY

SEQ ID NO: 49518 - DNA, 1302 bp, Arabidopsis thaliana
  CDS (1)..(1302)
atgagagtgatacctgaggaaggagatgtgttctcttcttctaagagtaatggatcatcaatggggattgagttacagccagatttggtttcgtttggaacattagcagctgaaatgattcctacaacaatggattctcctgaagttgaggatgaagagtttgatttagatcgacctactgatggatttgcgtctattcctcaagctattgaagatattcgacatggcaagatggtagttgttgtagatgatgaagatagagaaaacgaaggagatttgataatggcggcatctttggctacacctgaagctatggcttttgttgtaaagcatgggactggaatcgtgtgtgtgagcatgaaaggcgaagacttggagaggttagagcttcctttaatggtaacgcgtaaggataacgaggaaaaactccgcacggccttcacggtttcagtggacgcaaaaaagggaacatccacaggtgtctcagctcgtgatagggcgcaaacaatattaacccttgcatcaaaagattcaaaacctgaagatttcaatcgtcctggtcatatttttcctttgagatacagagaaggtggtgttcttaaaagagcagggcatacagaagcctctgttgacttgactgtgttggccggtttagaaccagtatctgttttatgtgagattgtagatgatgatggttccatggctagattaccaagactccgccaattcgctcaagagaacaacttgaaattaatttcaatcgctgatttaatcagataccgaaggaaaagagagagactggttgagtttactgcggttgcgcctataccgacaatgtggggaccattcaaagcacattgctttaagtcattacttgatggagttgagcacattgcaatggtcaagggagaaatcggagatgggaaggatattctcgtgagagtacacgcggagtgtatcacagatgatatattcggaaatagctctggtggaaaacagttagcgattgcaatgagactgattgaagaaaatgggagaggtgtttttgtctacttacgtggtcctgaaagtaaaggcattgatctaagccacaagcctcgtacttacaacaccaattcagatcaagccgagggtgtttcatttcccgttgcttcacgggaatacggcattggagcacaaattctaagggatcttggagttagagagatgaaggtgatgacgaataatccagcacattacgttggtcttaaaggctatggtttatcaatttctggtaaggttccactcattactactccttaa

SEQ ID NO: 49519 - protein, 433 aa, Arabidopsis thaliana
MRVIPEEGDVFSSSKSNGSSMGIELQPDLVSFGTLAAEMIPTTMDSPEVEDEEFDLDRPTDGFASIPQAIEDIRHGKMVVVVDDEDRENEGDLIMAASLATPEAMAFVVKHGTGIVCVSMKGEDLERLELPLMVTRKDNEEKLRTAFTVSVDAKKGTSTGVSARDRAQTILTLASKDSKPEDFNRPGHIFPLRYREGGVLKRAGHTEASVDLTVLAGLEPVSVLCEIVDDDGSMARLPRLRQFAQENNLKLISIADLIRYRRKRERLVEFTAVAPIPTMWGPFKAHCFKSLLDGVEHIAMVKGEIGDGKDILVRVHAECITDDIFGNSSGGKQLAIAMRLIEENGRGVFVYLRGPESKGIDLSHKPRTYNTNSDQAEGVSFPVASREYGIGAQILRDLGVREMKVMTNNPAHYVGLKGYGLSISGKVPLITTP

SEQ ID NO: 49520 - DNA, 1137 bp, Archaeoglobus fulgidus
  CDS (1)..(1137): transl_table=11
atggaagaggtttcatctcacgtaaaatccggaaagcctgtaatgattcttgattcggaaaaaagcgccatctgcattcccgcagaggttgtcagcggagaaatactcaacttcatgatgaagaactgcgatgagattcgtttggccttaacctggaagcagattcttaacctcggccttaacaggttcaggttccagaacgggaacttaattccaatcgacccaaatcttgagaaaatttcggcagaggaaagggcaaaattcatcagagagttggttagcggtaatgctggcgacatcaagtatcccggcagaatattcgtagaagagaccaaggagatgggagtgctggagaggccggggatagccgaagcttgcgttgatctggcgaggatggcagggttcgccccctctgccgtttacgctcctctcatgacggcagaaggtggcgttgctggggaggattatgctctaaaatttgccaaagagcactcaatgcccgttttcaggataaaagacatgattgagttcaggataaagtcagaaaagattgttgagagggttattgaagccactctcccgacaaagttctacggcaccttcagggctgtgggctacaaaacacctttgggggagatagtcgccctcgttaagggtagggttgatgagggagacgttctggttagaatccactcggagtgcctgacgggcgacgtttttcactcactgcggtgtgattgcggagaccagcttgagaacgctctgaaaatgattgacagagagggtaagggcgtggcaatctacatgaggggccatgagggcagagggatagggctcataaacaagcttatggcctacaagcttcaggaagagggaaaggataccgtagatgcaaacatcgagctcggatttcctcccgacatgaggagctacggaatcgccgcccagattctcatggatttgaaggtcaagagcatcaggctgctcaccaacaatcccctcaaaatagaggagcttaagaagtacggattcaaaatcgttagagagccgattgaggtagaaccctgcgaggtcaatctgccctatcttaaagcgaagaaggacaagatgggacacttgatatgcttcaacgactga

SEQ ID NO: 49521 - protein, 378 aa, Archaeoglobus fulgidus
MEEVSSHVKSGKPVMILDSEKSAICIPAEVVSGEILNFMMKNCDEIRLALTWKQILNLGLNRFRFQNGNLIPIDPNLEKISAEERAKFIRELVSGNAGDIKYPGRIFVEETKEMGVLERPGIAEACVDLARMAGFAPSAVYAPLMTAEGGVAGEDYALKFAKEHSMPVFRIKDMIEFRIKSEKIVERVIEATLPTKFYGTFRAVGYKTPLGEIVALVKGRVDEGDVLVRIHSECLTGDVFHSLRCDCGDQLENALKMIDREGKGVAIYMRGHEGRGIGLINKLMAYKLQEEGKDTVDANIELGFPPDMRSYGIAAQILMDLKVKSIRLLTNNPLKIEELKKYGFKIVREPIEVEPCEVNLPYLKAKKDKMGHLICFND

SEQ ID NO: 49522 - DNA, 1158 bp, Azospirillum brasilense
  CDS (1)..(1158): transl_table=11
atgtacgccgacgccccgtccgactccgccccgcccgaagccgtcctgcccatggacgaagccgccatgcgcgcggtggaccgggccacggccgccctgcgccggggcgaggccgtcgccatcgagaccgccgacggcagcgtcggcgccgcggtgtcggtggaatccgtggcgatcgacgccgtgcagcggctggtgcagttgaccggcgccgcgccggtcctggcggtcacccgccgccgcgccacggtgctgaagctgatgggggaggggacgggcgtcgtcgccctgtcgcttccccgctgcctgaccgcggacgaggcccacgcgctggccgatcccgaacaccgcccggacggcgacatgcccgacggcctgaccgccacggccatggaccccggatcgcgcgagaccgcggcggtcgacctcgcccggctggcgcggctgctgccggcggccatcgtcgccccggccaccgatcacaccggcagcgccgcggaatgggcggcggagcacgacctgctgctggtccgcgcccgcgacatcgccgactaccgcgtccatgtcgtgcgtacgctgcgtcgggtggccgaggcccgcgtcccgctgtccggcgccgagaacaccagcatcgccgccttccgtcccatcgacggcgggccggagcatctggcgatcatcgtcggcaacccggtggcgggcgagccggtgctggcccgcctgcattcggaatgcttcaccggcgaccttctggcaggcttgcgctgcgactgcggtcagcagctgcgcggcgccatcgcggagatcgcccggcacggcagcggagtcctgctctatctggcgcaggaagggcgggggatcggcctcgtcaacaagctgcgcgcctaccgcattcaggaccgcggcttcgacacggtggacgccaacgagatcctgggtttcgaggccgacgagcgggtctatctgccggcggcggagatgctgcggcaactgggcttcaccgccgtgcggctgatgaccaacaacccggagaagctgcgccagctcgcccgctgcgggatcgaggtggtcgagcgcgttccccacatcttcccggccaacggccacaacgaaggctatctgcgcaccaaggcggagcgcagcggccacatgttctga

SEQ ID NO: 49523 - protein, 385 aa, Azospirillum brasilense
MYADAPSDSAPPEAVLPMDEAAMRAVDRATAALRRGEAVAIETADGSVGAAVSVESVAIDAVQRLVQLTGAAPVLAVTRRRATVLKLMGEGTGVVALSLPRCLTADEAHALADPEHRPDGDMPDGLTATAMDPGSRETAAVDLARLARLLPAAIVAPATDHTGSAAEWAAEHDLLLVRARDIADYRVHVVRTLRRVAEARVPLSGAENTSIAAFRPIDGGPEHLAIIVGNPVAGEPVLARLHSECFTGDLLAGLRCDCGQQLRGAIAEIARHGSGVLLYLAQEGRGIGLVNKLRAYRIQDRGFDTVDANEILGFEADERVYLPAAEMLRQLGFTAVRLMTNNPEKLRQLARCGIEVVERVPHIFPANGHNEGYLRTKAERSGHMF

SEQ ID NO: 49524 - DNA, 585 bp, Buchnera aphidicola subsp
  CDS (1)..(585): transl_table=11
atgcaattaatagaaaaagccatgttacctactccttggggaaattttcttatctttggttttgaagaaaagaaaaatgggaaaaatcatgttgctcttgtatatggtgatataaaaacaaacactcctactctttctagagtacattcagaatgtctaacaggagatgctttttttagtttacgttgtgattgcggtagtcaactagaaatgtctatgaaaagaatttctcaggaaggcagtggtgtattaatttatcatcgtcaggaagggaggaatattggtcttcttaacaaaataaaagcatacgctttacaagatagaggcttagacacggttcaagcaaatcaaaaacttggtttttctgcagatgagagagatttttcattatgcgctgatatatttaatatattaaatattaaaaaaattcgtttattaacaaataatccatttaaagtgcagatgctgagtgatgccggaataaatattgtagaacgtgttcctcttattgtaaaaaaaaatcctaaaaatgcttattatttaaaaactaaagctgaaaaaatgggtcacttgttgtctgaataa

SEQ ID NO: 49525 - protein, 194 aa, Buchnera aphidicola subsp
MQLIEKAMLPTPWGNFLIFGFEEKKNGKNHVALVYGDIKTNTPTLSRVHSECLTGDAFFSLRCDCGSQLEMSMKRISQEGSGVLIYHRQEGRNIGLLNKIKAYALQDRGLDTVQANQKLGFSADERDFSLCADIFNILNIKKIRLLTNNPFKVQMLSDAGINIVERVPLIVKKNPKNAYYLKTKAEKMGHLLSE

SEQ ID NO: 49526 - DNA, 600 bp, Buchnera aphidicola subsp
  CDS (1)..(600): transl_table=11
atgaaactgacaaaaatttctgaagcgaaattacctacttcttttggtgaatttttaatgattgtttttgaagaaagtaaaacagataaaaatcatattgcattggtatatggagatataaaagacacaaataattcagtgttgtctaggattcattctgaatgtttaacaggtgatgcattatttagtatacgctgtgattgtggttttcaattaaaatctgcgttgatggaaattgttaaagaaggtagtggaattcttatatatcatcgccaagaaggacgtaacattggtttatctaataaaatacgtgcatacgcattgcaagatatcggattagatactgttgaagcgaatcatcatttaggtttttctgctgacgaaagggatttttccgtttgcatagatatatttaatacattgaatattaaaaaaataaaattattaactaataacccttcaaaagtaacagttttaaataatgcaggaattcaaattactgaaagaatatcattaattgtaggtagaaatgctaaaaattctaaatatttgaatacaaaagctcataaaatgggacattttttaccaattgaatattaa

SEQ ID NO: 49527 - protein, 199 aa, Buchnera aphidicola subsp
MKLTKISEAKLPTSFGEFLMIVFEESKTDKNHIALVYGDIKDTNNSVLSRIHSECLTGDALFSIRCDCGFQLKSALMEIVKEGSGILIYHRQEGRNIGLSNKIRAYALQDIGLDTVEANHHLGFSADERDFSVCIDIFNTLNIKKIKLLTNNPSKVTVLNNAGIQITERISLIVGRNAKNSKYLNTKAHKMGHFLPIEY

SEQ ID NO: 49528 - DNA, 579 bp, Helicobacter pylori J99
  CDS (1)..(579): transl_table=11
ttgaaacgattagaagtttctaaccaagccaaattacccactcaatttggggagttttgtatccagtgttttagagaaaagggttctaatggctctaaagatcatttagtcattttcacccctaattttcctcaaaaccccttagtgcgtttgcattcagaatgcttaaccggtgatgctctaggctctcaaaaatgcgattgcggaggggcgttgcaaatggcgttagaaaggatttctaaagaaggggggctagtgatttatttgcgccaagaagggcgtgggatagggctatttaacaaagtcaatgcctacgctttacaggataaaggttatgataccattcaagccaatgaaatgatagggtttaaagacgatgaaagggattatagtattgcgggtgagattttagaatattaccgcattaaaaaaatgcgcttgctcacgaataaccctctaaaaatcgccgctttagaaaaatacgctgaggtaacaagggagagcttgatcgtgtgcgctaatgagcataatcaagggtatttggaagttaaaaagctcaaaatggggcatttattgtga

SEQ ID NO: 49529 - protein, 192 aa, Helicobacter pylori J99
MKRLEVSNQAKLPTQFGEFCIQCFREKGSNGSKDHLVIFTPNFPQNPLVRLHSECLTGDALGSQKCDCGGALQMALERISKEGGLVIYLRQEGRGIGLFNKVNAYALQDKGYDTIQANEMIGFKDDERDYSIAGEILEYYRIKKMRLLTNNPLKIAALEKYAEVTRESLIVCANEHNQGYLEVKKLKMGHLL

SEQ ID NO: 49530 - DNA, 579 bp, Helicobacter pylori
  CDS (1)..(579): transl_table=11
ttgaaacgattagaagtttctaaccaagccaaattacccactcaatttggggagttttatatccagtgttttagagaaaagggttctaatggctctaaagatcatttagtggttttcacccctaatttttctcaaaaccccttagtgcgtttgcattcagaatgcttaacgggtgatgctctaggctctcaaaaatgcgattgcgggggggcgttgcaaatggcgttagaaaggatttctaaagaaggggggcttgtgatttatttgcgccaagaagggcgtgggatagggctatttaataaagtcaatgcctacgctttacaggataaaggctatgataccattcaagccaatgaaatgatagggtttaaagacgatgaaagggattatagtgttgcgggtgaaattttagaatactaccgcattaaaaaaatgcgcttactcacaaacaaccctaaaaaaatcgccgctttagaaaaatacgctgaagtaacaagggagagcttgatcgtgtgcgctaatgagcacaatcaagggtatttggaagtcaaaaagctcaaaatggggcatttattgtga

SEQ ID NO: 49531 - protein, 192 aa, Helicobacter pylori
MKRLEVSNQAKLPTQFGEFYIQCFREKGSNGSKDHLVVFTPNFSQNPLVRLHSECLTGDALGSQKCDCGGALQMALERISKEGGLVIYLRQEGRGIGLFNKVNAYALQDKGYDTIQANEMIGFKDDERDYSVAGEILEYYRIKKMRLLTNNPKKIAALEKYAEVTRESLIVCANEHNQGYLEVKKLKMGHLL

SEQ ID NO: 49532 - DNA, 594 bp, Neisseria meningitidis serogroup A
  CDS (1)..(594): transl_table=11
atgtctgaattattaaactatgtcgcttcgtgccgcctgccgaccgaatggggcgtgtttacgatgcacggttttgaagaagcaggcgggcaggaacacgtcgcgctgaccgtcggcgattgttcagacggcaatccggttctgacgcgcatccactccgaatgcctgacgggcgacgcgctgttctcaaaaaaatgcgactgcgggccgcaactggaagcggcaatgaaagcggttcaggcggaagggcgcggcatcatcgtctatctgcgtcaggaaggacgcggcatcgggctgattaacaaaatccgcgcctatcatttgcaggatcagggtatggatacggttgaggcgaacgtggcactcggtctgcccgtcgatgcccgcgatttccgtttggcgcaatctatctacgaatatctgggcatccgctcggtcaaactgctgaccaacaaccccgaaaaaatccaaaccctgaaagatgcggggattaacgtggtcgaacgcatccccctgcacgtcggggaaaaccttgaaaacaaacgctacctccaaaccaaagcagacaagctggggcatctgatgtcggaataa

SEQ ID NO: 49533 - protein, 197 aa, Neisseria meningitidis serogroup A
MSELLNYVASCRLPTEWGVFTMHGFEEAGGQEHVALTVGDCSDGNPVLTRIHSECLTGDALFSKKCDCGPQLEAAMKAVQAEGRGIIVYLRQEGRGIGLINKIRAYHLQDQGMDTVEANVALGLPVDARDFRLAQSIYEYLGIRSVKLLTNNPEKIQTLKDAGINVVERIPLHVGENLENKRYLQTKADKLGHLMSE

SEQ ID NO: 49534 - DNA, 594 bp, Neisseria meningitidis serogroup B
  CDS (1)..(594): transl_table=11
atgtctgaaatgttgaaccatgtggcatcctgccgcctgccgaccgaatggggcgtatttacgatgcacggctttgaagaggcaaacgggcaggaacacgtcgcgctgaccgtcggtaatttttcagacggcaatccggttctgacgcgcatccactccgaatgcctgacgggcgatgcgctgttctcgagaaaatgcgactgcggacctcaacttgaagcggccatgagggcggtacagacagaggggcgcggcatcatcgtctatctgcgtcaggaaggacgcggcatcgggctgattaacaaaatccgcgcctatcatctgcaagaccaaggtatggatacggttgaagccaatttggcactcgggctgcccgtcgatgcccgcgatttccgtttggcgcaatctatctacgaatatctgggcatccgctcggtcaaactgctgaccaacaaccccgaaaaaatccaaaccctgaaagatgcggggattaacgtggtcgaacgcatccccctgcacgtcggggaaaaccttgaaaacaaacgctacctccaaaccaaagcagacaagctgggacatctgatgtcggaataa

SEQ ID NO: 49535 - protein, 197 aa, Neisseria meningitidis serogroup B
MSEMLNHVASCRLPTEWGVFTMHGFEEANGQEHVALTVGNFSDGNPVLTRIHSECLTGDALFSRKCDCGPQLEAAMRAVQTEGRGIIVYLRQEGRGIGLINKIRAYHLQDQGMDTVEANLALGLPVDARDFRLAQSIYEYLGIRSVKLLTNNPEKIQTLKDAGINVVERIPLHVGENLENKRYLQTKADKLGHLMSE

SEQ ID NO: 49536 - DNA, 660 bp, Pasteurella multocida
  CDS (1)..(660): transl_table=11
atggcaaaaattcaacgcgttaccgaggctaatttgccaacggaatttggcatgtttagaattgtcggttttgaatttccagacaccaaaaaagaacatgtggcattagtattgggagaggtagaaaacaccgacgagccaattttagcccgcatccattctgaatgcttaacgggtgatgccctttacagcttaaaatgcgattgtggctttcaactggccgctgccttacgtcaaattagccaagaaggtcgtggtgtattaatttatcaccgcgaggaaggacgtggtatcggtttaattaataaaatccgcgcctattcccttcaagacaaaggcatggatacgattgaagcaaatcttgcattaggctttgcggcagatgaacgaaattttgaagtgtgtgccgatatttttgcgttgttaggcattaataaagttcgcttattaaccaataacccaaacaaaattgacaccatgaaaaaggcagggatcaatattgtagaacgtgtcgcattaaatgtaggcgaaaaccgctataacacggaatatttagacacaaaagccaaaaaaatggggcattttattattcataatcagcaaaaatacccacttgagtgcccttattgctcagaagaagttcctgtgcaagagaaataa

SEQ ID NO: 49537 - protein, 219 aa, Pasteurella multocida
MAKIQRVTEANLPTEFGMFRIVGFEFPDTKKEHVALVLGEVENTDEPILARIHSECLTGDALYSLKCDCGFQLAAALRQISQEGRGVLIYHREEGRGIGLINKIRAYSLQDKGMDTIEANLALGFAADERNFEVCADIFALLGINKVRLLTNNPNKIDTMKKAGINIVERVALNVGENRYNTEYLDTKAKKMGHFIIHNQQKYPLECPYCSEEVPVQEK

SEQ ID NO: 49538 - DNA, 1035 bp, Pichia guilliermondii
  CDS (1)..(1035)
atggcatcgaaggacatagtacatccgcaaccagagcgccggcacgggtcggaaactcacgaatttaccatgcctctcttatctcctacattgacaccatcccatattccatcgcaaacgcctcaaattcctccggaagtgccagcagaagtcagggatcgcttgccccttcctgaaacgttgcctgtggtgaaatgcatggcgagagctcgtataccgaccactcaggggccggagatatttctccatttgtacgagaataacgttgacaataaagagcatttggctattgtttttggggaagatgtgcggtcgaaaacgctctatcagaaacgtcccaatgagacccagcaagatagaatgactcgtggtgcttatgtgggcagattgtttcctggaagaaccgaggcagactatgacagtgagtctaatttgagagtgaatttcgatgtaaatggccaacttatcagagatccgagtaccacctgtagtggtgagcccattttgtcccgtattcattcggaatgttatacgggggaaaccccatggagtgctcgttgcgattgtggagaacaattcgatgaagctggtcggttaatgggtgaagctgggcacgggtgtatcgtgtaccttcgtcaggaaggtcgtggaattggacttggggaaaagttgaaggcttataatttgcaagacttgggagcggataccgtccaggccaatttgatgttacgacatcctgctgatgcgagatctttttcgctcgctacagccatactcttggacttggggctcaacgagatcaagttgttgaccaacaatcccgataaaattgctgcagttgagggaagaaacagagaggtcaaggtagtggaacgggtgcctatggtgccgttggcatggagaagtgagaatggaatcaagtcaaaagagatagagggctacttgactgctaagattgaaaggatggggcacttgcttgtaagccactcaagatatgatagaagagatgaagttaaggacttaagaaataaatga

SEQ ID NO: 49539 - protein, 344 aa, Pichia guilliermondii
MASKDIVHPQPERRHGSETHEFTMPLLSPTLTPSHIPSQTPQIPPEVPAEVRDRLPLPETLPVVKCMARARIPTTQGPEIFLHLYENNVDNKEHLAIVFGEDVRSKTLYQKRPNETQQDRMTRGAYVGRLFPGRTEADYDSESNLRVNFDVNGQLIRDPSTTCSGEPILSRIHSECYTGETPWSARCDCGEQFDEAGRLMGEAGHGCIVYLRQEGRGIGLGEKLKAYNLQDLGADTVQANLMLRHPADARSFSLATAILLDLGLNEIKLLTNNPDKIAAVEGRNREVKVVERVPMVPLAWRSENGIKSKEIEGYLTAKIERMGHLLVSHSRYDRRDEVKDLRNK

SEQ ID NO: 49540 - DNA, 618 bp, Pseudomonas aeruginosa
  CDS (1)..(618): transl_table=11
gtgtccgtcgtgttcgtcgccgcctccaaactgccgactcccttcggcgaattcaccatgcatggtttcctcgacgaggagagcggcaaggaacatgtagccctgagcatgggcgacatcgccgatggcgcgccggtgcttggtcgcctgcattccgaatgcctgaccggcgacgcgctgttcagcctgcgctgcgattgcggtttccagctggaaggcgcgcttgccgccatcgccgaggagggccgcggcgtgctcctctacctgcgccaggaaggtcgcggcatcggcctgctgaacaagatccgtgcctatgaattgcaggatggcggtgccgacaccgtcgaggcgaacctgcaactgggttttggcgccgaccagcgcgactacgccatgtgccagccgatgctcgcgcacctgggcgtctcctccctgcgcctgatgaccaacaatccgcgcaaggtcaaggcgctggaaagctacgccatcaccgtggcggagcgcgtgccgctgcaaaagggcctgaacaagcacaacaggcgctacctggcgaccaaggccggcaagctcgggcacatgctcggcagcctgcaccagggcgaggcggaaaccacgtga

SEQ ID NO: 49541 - protein, 205 aa, Pseudomonas aeruginosa
MSVVFVAASKLPTPFGEFTMHGFLDEESGKEHVALSMGDIADGAPVLGRLHSECLTGDALFSLRCDCGFQLEGALAAIAEEGRGVLLYLRQEGRGIGLLNKIRAYELQDGGADTVEANLQLGFGADQRDYAMCQPMLAHLGVSSLRLMTNNPRKVKALESYAITVAERVPLQKGLNKHNRRYLATKAGKLGHMLGSLHQGEAETT

SEQ ID NO: 49542 - DNA, 618 bp, Pseudomonas putida
  CDS (1)..(618): transl_table=11
gtgcccgtcgtctttgttgccgcctcaaaactcccgacgcccttcgcgaccttcaccatgcatggctttctcgacgaagccacaggccgtgagcatgtggtgctcagcctgggtgatatcgcggacggccagccggtactggggcgcctgcattccgagtgcctgaccggcgatgcactgttcagccagcgctgcgactgcggctcgcagttggaagccgcgctgcaggccatcgcccgcgaaggccgtggggtgttgttgtacctgcgtcaggaaggccgtggcatcggcctgctgaacaagatccgcgcctacgagctgcaggatggcggcgccgacaccgtcgaagccaacgagcgcctgggcttcgctgccgaccagcgtgactacgccatatgcctgccgatgctcgagcacctgggcgtcaagtcgctgcgcctgatgaccaacaatccgcgcaaggtcaaagccctgaccgacatgaacatcgtggttgccgagcgtgtgccgctgcacaccgggcataacccgcacaaccgctactacctggcgaccaaggccggcaagttgggccacatgctgggcaacgaacaccagggcgaggtgccccaggcgtga

SEQ ID NO: 49543 - protein, 205 aa, Pseudomonas putida
MPVVFVAASKLPTPFATFTMHGFLDEATGREHVVLSLGDIADGQPVLGRLHSECLTGDALFSQRCDCGSQLEAALQAIAREGRGVLLYLRQEGRGIGLLNKIRAYELQDGGADTVEANERLGFAADQRDYAICLPMLEHLGVKSLRLMTNNPRKVKALTDMNIVVAERVPLHTGHNPHNRYYLATKAGKLGHMLGNEHQGEVPQA

SEQ ID NO: 49544 - DNA, 591 bp, Salmonella typhi
  CDS (1)..(591): transl_table=11
atgcagcttaaacgtgtggcagaagccaaactgccaaccccattgggtgactttctgatggtgggatttgaagaactggcaaccggacacgaccatgccgcgctggtttttggcgatatttcaggtaaaacgccagtactggctcgcgttcattccgaatgtcttaccggggacgcgctttttagtctgcgctgtgattgtggttttcaactggaagccgcgctgacgcatattgcggaagaaggacgcggtattctgatttaccaccgtcaggaaggccgcaatatcggcctgcttaataaaattcgcgcttatgcgttacaggatcaaggctatgacacggtggaggccaatcatcagctcggctttgccgccgatgagcgtgatttcaccctgtgcgcggatatgttcaaattactcggcgtggatgaagttcgcctactgaccaataatccgaagaaagtcgaaatactgaccgaggcgggaattaatatcgtggaacgcgttccgctcattgtgggtcgtaatccaaataatgagcattatctcgatactaaagcggccaaaatgggccacctgctaagcaagtaa

SEQ ID NO: 49545 - protein, 196 aa, Salmonella typhi
MQLKRVAEAKLPTPLGDFLMVGFEELATGHDHAALVFGDISGKTPVLARVHSECLTGDALFSLRCDCGFQLEAALTHIAEEGRGILIYHRQEGRNIGLLNKIRAYALQDQGYDTVEANHQLGFAADERDFTLCADMFKLLGVDEVRLLTNNPKKVEILTEAGINIVERVPLIVGRNPNNEHYLDTKAAKMGHLLSK

SEQ ID NO: 49546 - DNA, 612 bp, Shewanella oneidensis
  CDS (1)..(612): transl_table=11
atgtcgataaaatatgtcgcgacgtcaaaattacccactccttggggcgtttttgccatgcacggttttgaagatactgaaacaggcaaagagcatgttgcccttacgtttggctccctaagtagcgatgaacctgtattaggtcgtattcactcagaatgtctcaccggcgatgccttgttcagtttacgctgtgattgtggattccagctacaaaccgcaatgcagaacattgctgaaacgggaagtggttttattttgtatttacgccaagaaggccgtggtattggtttgctaaacaagatccgcgcctatgagttgcaggataaaggtgccaatacggttgaggcgaatgagcagttaggttttccggcggatatgcgtaaatacgatatgatccagcctatgcttgaaaaaattggtgtgaagcacgtacgcttaatgaccaataatcctcgcaaagtcaaagcgatgaaagaaattggtattgaggtagttgaacgagtaccgctacaagtgggtaaaaaccgttacaatgaagcttacctaaagacgaaatccactgagcttgggcatatgatgtctgagtatcattttacggatgaagagtag

SEQ ID NO: 49547 - protein, 203 aa, Shewanella oneidensis
MSIKYVATSKLPTPWGVFAMHGFEDTETGKEHVALTFGSLSSDEPVLGRIHSECLTGDALFSLRCDCGFQLQTAMQNIAETGSGFILYLRQEGRGIGLLNKIRAYELQDKGANTVEANEQLGFPADMRKYDMIQPMLEKIGVKHVRLMTNNPRKVKAMKEIGIEVVERVPLQVGKNRYNEAYLKTKSTELGHMMSEYHFTDEE

SEQ ID NO: 49548 - DNA, 666 bp, Streptomyces coelicolor
  CDS (1)..(666): transl_table=11
atgacagaaaaaatcggtgtactcggcaagaagacgacccagcgcacggacgtggagcggatcgtggtgacgccgcttcccaccgtgtacgggaaattccgggcgttcggctatttcgaccacgaacgcggcgacgagcaagtggccctcgtgcacggcgacctcggcgccgaagacgtgctcacccggctccactcggaatgcctgaccggcgacgccttcggctcccagcactgcgagtgcggcgcccaactcgccagcgcgctccggcaggtggccgacgcgggcagcggcatcgtggtctacctgcgcgggcacgaggggcgcggcatcggcctgctcgccaaactgcgcgcgatggcgttgcaggcggagggcctggacacggtggaggcgaacctcgccctcggcctgccggtggacgcccgggactacggcgtcgccgcgcgaatcctcgacgacctcggggtgcggtcggtgcggctgatgtccaacaacccgcgcaagcgcgaggcgttggtgcggcacggcatccgggtcgccgagcaggtgccgctgctgataccgccgtgcgagtcgaacatcacctacctgcgcaccaagcgggagcggctcgaccaccacctgccgcacctggacgccgcgatggcacacgtctcgtcctga

SEQ ID NO: 49549 - protein, 221 aa, Streptomyces coelicolor
MTEKIGVLGKKTTQRTDVERIVVTPLPTVYGKFRAFGYFDHERGDEQVALVHGDLGAEDVLTRLHSECLTGDAFGSQHCECGAQLASALRQVADAGSGIVVYLRGHEGRGIGLLAKLRAMALQAEGLDTVEANLALGLPVDARDYGVAARILDDLGVRSVRLMSNNPRKREALVRHGIRVAEQVPLLIPPCESNITYLRTKRERLDHHLPHLDAAMAHVSS

SEQ ID NO: 49550 - DNA, 597 bp, Vibrio parahaemolyticus
  CDS (1)..(597): transl_table=11
atggcggaagtacgtgccagagtagattttaaagtcggggctaaaagtaatatcgatgctgagatcctgtctttccgtggccttaagacagataaagagcatgtggcagttatttttaaacaagcggatcaaacgcaagacacgccgctagtgcgtatgcattccgagtgtctgactggcgatgttttccactcatctcgctgtgactgcggtgagcagttagaagaaacgatccaacgtatgggcgaatctggcggcgtgatcctttaccttcgccaagagggccgtggtatcggtttgtacaacaagattgatgcgtatcgtctgcaaagccaggggatgaacacttacgaagcaaacaaccatttaggctttgatgatgatttaagagacttcaccgaagcggcacaaatgttagaagcgttaggtatcaagaaaattcgtcttgtgaccaataaccctaagaaaatccgtgaattagcggaatacggaattgagattgtcgaagttgtcaatacttcggcgcacattaaagatggtaatgaaaactatcttagagcgaaagtttctcacggaaaacataacctaaaggtctaa

SEQ ID NO: 49551 - protein, 198 aa, Vibrio parahaemolyticus
MAEVRARVDFKVGAKSNIDAEILSFRGLKTDKEHVAVIFKQADQTQDTPLVRMHSECLTGDVFHSSRCDCGEQLEETIQRMGESGGVILYLRQEGRGIGLYNKIDAYRLQSQGMNTYEANNHLGFDDDLRDFTEAAQMLEALGIKKIRLVTNNPKKIRELAEYGIEIVEVVNTSAHIKDGNENYLRAKVSHGKHNLKV

SEQ ID NO: 49552 - DNA, 594 bp, Wigglesworthia glossinidia brevipalpis
  CDS (1)..(594): transl_table=11
atgcaaattaaacgtattacagaagctaatcttccaactccatggacaaattttttgatgataggttttgaagaaattaaaacaaaatgtaatcatatagcattattacatggaaatatgtcaaaaaatacatcaattttaacgaggattcattctgaatgtttaactggagatgctttatttagtttaaggtgtgattgcggatttcaattacaatctgcattgtcacatatagctaacgaaaaatgcggaatattaatttatcatagacaagaaggaagaaatattggacttataaataaaataaaagcatattctttacaagacaaaggaatcgacacagtagatgctaattatcatttaggatttgaagcagatgaaagagattttacagtttgtgttgaaatattaaatttattacaaataaaatcaattagactgctaacaaataatccaaataaagtaaacgtattgacttcggcaggcattttaataactgaaagagttcctttaatcgttggaagtaacccaagtaatacaaagtacttatatactaaagcaaaaaaaatgggtcatttattaaataataaataa

SEQ ID NO: 49553 - protein, 197 aa, Wigglesworthia glossinidia brevipalpis
MQIKRITEANLPTPWTNFLMIGFEEIKTKCNHIALLHGNMSKNTSILTRIHSECLTGDALFSLRCDCGFQLQSALSHIANEKCGILIYHRQEGRNIGLINKIKAYSLQDKGIDTVDANYHLGFEADERDFTVCVEILNLLQIKSIRLLTNNPNKVNVLTSAGILITERVPLIVGSNPSNTKYLYTKAKKMGHLLNNK

SEQ ID NO: 49554 - DNA, 1098 bp, Pseudomonas aeruginosa
  CDS (1)..(1098): transl_table=11
atggcactcaacacgatcgacgaactgatcgaagacatccgccaaggcaagatggtcatcctgatggatgacgaggaccgcgagaacgaaggcgacctgatcatggccgccgaatgcgtccgcaccgaagacatcaacttcatggtcaagcatgcccgcggcctggtctgcatgccgatgacccgcgagcgttgcgagcgcctcggcctgccgctgatggtgcagcgcaacggctccggcttcggcaccaagttcactgtctccatcgaggccgccgagggcgtcaccaccggcatctccgccgcggaccgcgcccgcaccgtgcaggctgcggcggcgaagaacgccgtggccgccgacatcgtcagccccggccacatcttcccgctgatggcccagccgggcggtaccctggctcgcgccgggcacaccgaggcggcctgcgacctggcgcggatggccgggttcgagccgtccggggtgatctgcgaggtgatgaacgacgacggcagcatggctcgccggcccgaactggaggcgttcgccgccgagcacgggatcaagatcggcaccatcgccgacctgatccactaccggctgatccacgagcgcaccgtcgagcgcatcgccgagcagccgctcgacagcgaactgggccacttcaacctgatcacctaccgcgactcggtggagggcgacgtgcacctggcgctgaccctcggcaaggtctgcgcggaagagccgaccttggtccgcgtgcataacatggacccgctgcgcgacctgctgcaggtcaaccaaccgggccgctggagcctgcgcgcggcgatgaccaaggtcgccgaggcgggcagcggcgtggtgctgctgctcggtcaccagatcggcggcgacgacctgctcgcccatgtccgcgagatcgcttcggcgccggctccggcgcccaaggccaccaccacctacagcaccgtcggtgccggttcgcagatcctgcgcgacctcggcgtgcgcaagatgcgcctgctgagtgcgccgatgcgcttcaatgcgatatccggtttcgacctggaagttgtagaatacctgcccgccgaataa

SEQ ID NO: 49555 - protein, 365 aa, Pseudomonas aeruginosa
MALNTIDELIEDIRQGKMVILMDDEDRENEGDLIMAAECVRTEDINFMVKHARGLVCMPMTRERCERLGLPLMVQRNGSGFGTKFTVSIEAAEGVTTGISAADRARTVQAAAAKNAVAADIVSPGHIFPLMAQPGGTLARAGHTEAACDLARMAGFEPSGVICEVMNDDGSMARRPELEAFAAEHGIKIGTIADLIHYRLIHERTVERIAEQPLDSELGHFNLITYRDSVEGDVHLALTLGKVCAEEPTLVRVHNMDPLRDLLQVNQPGRWSLRAAMTKVAEAGSGVVLLLGHQIGGDDLLAHVREIASAPAPAPKATTTYSTVGAGSQILRDLGVRKMRLLSAPMRFNAISGFDLEVVEYLPAE

SEQ ID NO: 49556 - DNA, 1110 bp, Pseudomonas syringae pv
  CDS (1)..(1110): transl_table=11
atggcattcgatcgcatcgaagacatcattgaagactatcgccaaggcaagatggtgttgctggtcgatgatgaggaccgtgaaaacgaaggtgatctgctgcttgccgccgattgctgcacagcccaggcgatcagtttcatggcccgcgaagcacgcgggctgatctgcctgacgctgaccgacgagcactgtaaaagcctcgggctggaacagatggtgccgagcaacggcagcgttttcgccaccgcgttcactgtgtccatcgaagcgacgacgggcgtgaccaccggcatcagcgcagcagatcgcgcgcgcaccgtgcaggcggcggtcaatccgggggcagtgcctgacgacttggtgcagccgggccatattttcccgttacgcgctcgcgacggcggcgtgctgacccgcgccgggcacaccgaagcgggttgcgacctggcacgcatggcaggttttacccccgcctcggtgattgtcgaagtcatgaatgacgacggcacaatggcgcgtcgccctgacctggagctgttcgccgaaaaacacggcatccgtatcggcaccatcgccgacctgatccattaccggctgagcaccgagcacaccatcgtcagaatcggcgagcgcgagctgcccacggtgcacggcaccttccgcctgttcagctacgaagaccgcatcgaaggcggcgtgcacatggccatggtgatgggcgatatccgtcgcgaagacccgacgctggtgcgcgtgcacgtggttgacccgctgcgtgatctggtcggcgccgagtacaccggtccggccaactggacgctctgggccgccttgcagcgcgtcgcagaagaaggctgcggcgtggtcgtggtgctggccaatcacgaatcgtcacaagcgttgctggagcgcattccgcagttgacccagccaccgcgccagtacacccgctcgcaatcacgtatctattccgaggtcggcaccggcgcgcagattttgcaggacctggggatcggcaagctgcgccacctcggccctccgctcaaatatgccggcctgaccggctacgatctggaagtgattgaaagtattccatttcccggctga

SEQ ID NO: 49557 - protein, 369 aa, Pseudomonas syringae pv
MAFDRIEDIIEDYRQGKMVLLVDDEDRENEGDLLLAADCCTAQAISFMAREARGLICLTLTDEHCKSLGLEQMVPSNGSVFATAFTVSIEATTGVTTGISAADRARTVQAAVNPGAVPDDLVQPGHIFPLRARDGGVLTRAGHTEAGCDLARMAGFTPASVIVEVMNDDGTMARRPDLELFAEKHGIRIGTIADLIHYRLSTEHTIVRIGERELPTVHGTFRLFSYEDRIEGGVHMAMVMGDIRREDPTLVRVHVVDPLRDLVGAEYTGPANWTLWAALQRVAEEGCGVVVVLANHESSQALLERIPQLTQPPRQYTRSQSRIYSEVGTGAQILQDLGIGKLRHLGPPLKYAGLTGYDLEVIESIPFPG

SEQ ID NO: 49558 - DNA, 22 bp, Artificial sequence
  Primer sequence
atgcagcttaaacgtgtggcag

SEQ ID NO: 49559 - DNA, 23 bp, Artificial sequence
  Primer sequence
ttatttgttcagcaaatggccca

SEQ ID NO: 49560 - protein, 249 aa, Artificial sequence
  Consensus
  Variant (2)..(4): Xaa in position 2 to 4 is any amino acid
  Variant (5)..(11): Xaa in position 5 to 11 is any or no amino acid
  Variant (13)..(24): Xaa in position 13 to 24 is any amino acid
  Variant (25)..(32): Xaa in position 25 to 32 is any or no amino acid
  Variant (34)..(34): Xaa in position 34 is any amino acid
  Variant (36)..(38): Xaa in position 36 to 38 is any amino acid
  Variant (40)..(45): Xaa in position 40 to 45 is any amino acid
  Variant (46)..(60): Xaa in position 46 to 60 is any or no amino acid
  Variant (62)..(62): Xaa in position 62 is any amino acid
  Variant (64)..(64): Xaa in position 64 is any amino acid
  Variant (67)..(67): Xaa in position 67 is any amino acid
  Variant (69)..(69): Xaa in position 69 is any amino acid
  Variant (73)..(75): Xaa in position 73 to 75 is any amino acid
  Variant (77)..(77): Xaa in position 77 is any amino acid
  Variant (78)..(79): Xaa in position 78 to 79 is any or no amino acid
  Variant (83)..(84): Xaa in position 83 to 84 is any amino acid
  Variant (87)..(96): Xaa in position 87 to 96 is any amino acid
  Variant (98)..(98): Xaa in position 98 is any amino acid
  Variant (99)..(117): Xaa in position 99 to 117 is any or no amino acid
  Variant (119)..(121): Xaa in position 119 to 121 is any amino acid
  Variant (123)..(124): Xaa in position 123 to 124 is any amino acid
  Variant (125)..(126): Xaa in position 125 to 126 is any or no amino acid
  Variant (134)..(134): Xaa in position 134 is any amino acid
  Variant (135)..(135): Xaa in position 135 is any or no amino acid
  Variant (137)..(138): Xaa in position 137 to 138 is any amino acid
  Variant (141)..(141): Xaa in position 141 is any amino acid
  Variant (144)..(144): Xaa in position 144 is any amino acid
  Variant (145)..(151): Xaa in position 145 to 151 is any or no amino acid
  Variant (153)..(153): Xaa in position 153 is any amino acid
  Variant (156)..(156): Xaa in position 156 is any amino acid
  Variant (157)..(157): Xaa in position 157 is any or no amino acid
  Variant (160)..(160): Xaa in position 160 is any amino acid
  Variant (161)..(161): Xaa in position 161 is any or no amino acid
  Variant (164)..(165): Xaa in position 164 to 165 is any amino acid
  Variant (166)..(166): Xaa in position 166 is any or no amino acid
  Variant (168)..(168): Xaa in position 168 is any amino acid
  Variant (170)..(177): Xaa in position 170 to 177 is any amino acid
  Variant (179)..(180): Xaa in position 179 to 180 is any amino acid
  Variant (183)..(187): Xaa in position 183 to 187 is any amino acid
  Variant (188)..(193): Xaa in position 188 to 193 is any or no amino acid
  Variant (195)..(196): Xaa in position 195 to 196 is any amino acid
  Variant (200)..(200): Xaa in position 200 is any amino acid
  Variant (201)..(210): Xaa in position 201 to 210 is any or no amino acid
  Variant (212)..(212): Xaa in position 212 is any amino acid
  Variant (213)..(214): Xaa in position 213 to 214 is any or no amino acid
  Variant (216)..(218): Xaa in position 216 to 218 is any amino acid
  Variant (220)..(228): Xaa in position 220 to 228 is any amino acid
  Variant (229)..(238): Xaa in position 229 to 238 is any or no amino acid
  Variant (240)..(240): Xaa in position 240 is any amino acid
  Variant (241)..(242): Xaa in position 241 to 242 is any or no amino acid
  Variant (244)..(248): Xaa in position 244 to 248 is any amino acid
PXXXXXXXXXXGXXXXXXXXXXXXXXXXXXXXHXAXXXGXXXXXXXXXXXXXXXXXXXXXLXRXHSXCXTGDXXXSXXXCDCXXQLXXXXXXXXXXGXXXXXXXXXXXXXXXXXXXXGXXXYXXXXEGRGIGLXXKXXAYXLQXXXXXXXXGXDTXXANXXLGXXXDXRXXXXXXXXLXXLGXXXXXXXXXXXLXXNNPXXXXXXXXXXXKXXXLXXXGXXXXXXXXXXXXXXXXXXXYXXXKXXXXXH

SEQ ID NO: 49561 - protein, 26 aa, Artificial sequence
  Consensus
  Variant (2)..(2): Xaa in position 2 is Ile, Leu, Met or Val
  Variant (5)..(5): Xaa in position 5 is any amino acid
  Variant (7)..(7): Xaa in position 7 is any amino acid
  Variant (11)..(11): Xaa in position 11 is any amino acid
  Variant (12)..(12): Xaa in position 12 is Phe, Ile, Leu or Met
  Variant (13)..(13): Xaa in position 13 is any amino acid
  Variant (15)..(16): Xaa in position 15 to 16 is any amino acid
  Variant (20)..(21): Xaa in position 20 to 21 is any amino acid
  Variant (22)..(22): Xaa in position 22 is Ala, Glu or Gln
  Variant (23)..(25): Xaa in position 23 to 25 is any amino acid
  Variant (26)..(26): Xaa in position 26 is Ala, Gly, Ser or Thr
RXHSXCXTGDXXXSXXCDCXXXXXXX

SEQ ID NO: 49562 - protein, 23 aa, Artificial sequence
  Consensus
  Variant (2)..(4): Xaa in position 2 to 4 is any amino acid
  Variant (6)..(8): Xaa in position 6 to 8 is any amino acid
  Variant (9)..(9): Xaa in position 9 is any or no amino acid
  Variant (13)..(13): Xaa in position 13 is Asp, Gly or Asn
  Variant (14)..(14): Xaa in position 14 is any amino acid
  Variant (16)..(16): Xaa in position 16 is Ile or Leu
  Variant (17)..(18): Xaa in position 17 to 18 is any amino acid
  Variant (20)..(21): Xaa in position 20 to 21 is any amino acid
GXXXYXXXXEGRXXGXXXKXXAY

SEQ ID NO: 49563 - protein, 24 aa, Artificial sequence
  Consensus
  Variant (3)..(4): Xaa in position 3 to 4 is any amino acid
  Variant (6)..(6): Xaa in position 6 is Asp or Asn
  Variant (7)..(8): Xaa in position 7 to 8 is any amino acid
  Variant (9)..(9): Xaa in position 9 is Phe, Ile or Leu
  Variant (10)..(13): Xaa in position 10 to 13 is any amino acid
  Variant (15)..(15): Xaa in position 15 is any amino acid
  Variant (17)..(17): Xaa in position 17 is any amino acid
  Variant (18)..(18): Xaa in position 18 is Phe or Tyr
  Variant (19)..(20): Xaa in position 19 to 20 is any amino acid
  Variant (21)..(21): Xaa in position 21 is Ala, Cys, Gly, Ser, Thr or Val
  Variant (22)..(23): Xaa in position 22 to 23 is any amino acid
  Variant (24)..(24): Xaa in position 24 is Ile, Leu, Met or Val
DTXXAXXXXXXXXDXRXXXXXXXX

SEQ ID NO: 49564 - DNA, 900 bp, Escherichia coli
  CDS (1)..(900)
atgaatatcctcctttttggcaaaacagggcaggtaggttgggaactacagcgtgctctggcacctttgggtaatttgattgcttttgatgttcactctactgattattgcggtgattttagtaatcctgaaggtgtagctgaaaccgtaagaagcattcggccggatattattgtcaatgcagccgctcacaccgcagtagacaaagcagaatcagaaccggagtttgcacaattaattaacgcaacaagtgtcgaagcgattgcgaaagcagcaaatgaagttggagcctgggttatccattactcgactgattacgtcttccctggaaatggcgatatgccatggctggagacggatgcaaccgcaccactaaatgtttacggtgaaaccaagttagccggagaaaaagcgttacaggaatattgcgcgaagcatcttattttccggaccagctgggtctatgcaggaaaaggaaataacttcgccaaaacgatgttacgtctggcaaaagagcgtgaagaattagcggttattaacgatcagtttggtgcgccaacaggtgctgaactgctggctgattgtacagcacatgccattcgtgtcgcactgaataaaccggatgtcgcaggcttgtaccatttggtagccagtggtaccacaacctggtacgattatgctgcgctggtttttgaagaggcgcgcaaagcaggcattccccttgcactcaacaagctcaacgcagtaccaacaacagcctatcctacaccagctcgtcgtccacataactctcgccttaatacagaaaaatttcagcagaactttgcgcttgtcttgcctgactggcaggttggcgtgaaacgaatgctcaatgaattatttacgactacagcaatttaa

SEQ ID NO: 49565 - protein, 299 aa, Escherichia coli
MNILLFGKTGQVGWELQRALAPLGNLIAFDVHSTDYCGDFSNPEGVAETVRSIRPDIIVNAAAHTAVDKAESEPEFAQLINATSVEAIAKAANEVGAWVIHYSTDYVFPGNGDMPWLETDATAPLNVYGETKLAGEKALQEYCAKHLIFRTSWVYAGKGNNFAKTMLRLAKEREELAVINDQFGAPTGAELLADCTAHAIRVALNKPDVAGLYHLVASGTTTWYDYAALVFEEARKAGIPLALNKLNAVPTTAYPTPARRPHNSRLNTEKFQQNFALVLPDWQVGVKRMLNELFTTTAI

SEQ ID NO: 49566 - DNA, 1005 bp, Xenopus tropicalis
  CDS (1)..(1005)
atggaaggaaggcacaaggagtacaggatccgtttctcccccggctgggttgaggttgtgcaggatgatgttactattcctggtagaagggctctgataaccggtgcaactggacttcttggtcgagctgtatataaagagtttaaggagaacaattggcatgtgctgggctgtgggtacagtcgtgctcggcccagatttgaatacctcaacctattagatgcagcagcagtgaaagcactcatccaagactttaagcctcatgtgatcattcattgtgcagcagaaaggagacccgatattgtggaaagtcaaccagagtttgcctcactgctaaacgtagtggcatctgagaatttagcaaaagaagctgctggagtcggagcatttcttatttatgttagctcagattatgtttttgatggaacaagcccaccttacagggaagattccataccaaatcccttgaacctttatggcaaaacaaaacttgaaggagagagagcagtattgcacaataatgaaggtgctgcagttcttcgagtgccagtgctatatggagacgtggaaaaacttagtgaaagcgcagtcacaattctgttcgataaggtgcagtttagcaacaagtcagcaaatatggaccattggcagcaaaggtttccaacatatgtcaaagatgttgctagtgtttgccttcaattaacagagcgtagacttcaggatccatctattaagggtatataccactggtctggaaatgaacagatgaccaaatatgaaatgacttgtgccatggcagatgccttcaaccttcccagcagccatctgcgtccaatcacagatgagcctgttggggcaactcctcggccatggaatccccagcttgactgttccaaattggagaaaataggcattggtcagagaacaccattcagagtgggcattagggaaagcctttggccattcttagtggacaagagatggagacaaacagtcttccattag

SEQ ID NO: 49567 - protein, 334 aa, Xenopus tropicalis
MEGRHKEYRIRFSPGWVEVVQDDVTIPGRRALITGATGLLGRAVYKEFKENNWHVLGCGYSRARPRFEYLNLLDAAAVKALIQDFKPHVIIHCAAERRPDIVESQPEFASLLNVVASENLAKEAAGVGAFLIYVSSDYVFDGTSPPYREDSIPNPLNLYGKTKLEGERAVLHNNEGAAVLRVPVLYGDVEKLSESAVTILFDKVQFSNKSANMDHWQQRFPTYVKDVASVCLQLTERRLQDPSIKGIYHWSGNEQMTKYEMTCAMADAFNLPSSHLRPITDEPVGATPRPWNPQLDCSKLEKIGIGQRTPFRVGIRESLWPFLVDKRWRQTVFH

SEQ ID NO: 49568 - DNA, 858 bp, Archaeoglobus fulgidus DSM 4304
  CDS (1)..(858): transl_table=11
atgaaggtagcggtaataggagccaaaggccagcttggaacggaccttgttgacgttcttaaggaggagttcacagtttatccgcttactcatgaggatgttgatgttgcagtgtctgaaagccttgaagtgctgagagacatccaccccgacgttatcataaacaccgctgcctatgtcagagttgatgatgcggagaatcatgcggaaaaggcctttgcggtcaacgccatcggggcgcttaatgtggccagaatctcttcggaaattgatgcggttaacatttacatcagtacagactacgttttcgatggtgagaagggagagccctatgtcgagacagataagccaaatcctataaacgtttacggagcgagcaagtatgccggagaaattctcacgaaaaactactcggaaaaacactacgtgatcagggttgcaagtctatacgggaaggccggggcgagcggaaagggcggtaacttcgtaaactgggtggtggatatggcgagaaaggggcaggagctgaggattgttgcggaccagtttatgagccccacctataccaaggacgtggccctcgctgttagagagtttctcaaactccgccccgactacggaatttaccacatggtaaacgacggatactgctcgtggtttgagtttacgaaggcaatattcgaaattctcgactgggatgtggaaattcagccaataaagtcgagcgagcttaacagattggcgagaaggccagctttctctgccctgcaaaactacaaactcgaaagaattggcattaagatgaggcactggagggaagctttaagagattatttagctgagaagggtttggtttga

SEQ ID NO: 49569 - protein, 285 aa, Archaeoglobus fulgidus DSM 4304
MKVAVIGAKGQLGTDLVDVLKEEFTVYPLTHEDVDVAVSESLEVLRDIHPDVIINTAAYVRVDDAENHAEKAFAVNAIGALNVARISSEIDAVNIYISTDYVFDGEKGEPYVETDKPNPINVYGASKYAGEILTKNYSEKHYVIRVASLYGKAGASGKGGNFVNWVVDMARKGQELRIVADQFMSPTYTKDVALAVREFLKLRPDYGIYHMVNDGYCSWFEFTKAIFEILDWDVEIQPIKSSELNRLARRPAFSALQNYKLERIGIKMRHWREALRDYLAEKGLV

SEQ ID NO: 49570 - DNA, 879 bp, Mesorhizobium loti MAFF303099
  CDS (1)..(879): transl_table=11
gtgaggctcgctgtcaccggacgcgacggccaggttgtgtcgagccttctggaggcaggccagtttgccggtgtagacgtcatcgccattggccgtccgcagctcgacttggcaaaccccgataccgtgatcgaagccattgcagcggccaggcctgacatcgtcgtgtcagctgccgcttacacggccgtggatcaggccgaggatgagcccgatctggcattcagggtgaatgccgtcggcgccggcaaggtggcgcaagccgcggcgcggcttggcgttcccgtcatccacctttcgaccgactacgtcttcgacggcagcgcttccggcgcttacgtcgaaaccgatgcgaccgcgccagccagcgtttacggcgcctccaagctcgccggcgaacagacggtggccgccgccggcccgcgccacctgatcctgcgcaccgcctgggtctacagcccgttcggcaagaatttcgtcaaaaccatgctgcggctggccgccgaccgtgacgagatttccgtggtggccgatcaatggggaaatcccagctcagcgctggatatcgccgatgcgatcctgcatgccgcggccacgctgcaccgcaacaaggacttcggcgcgttcggcacctatcatctggccggcacgggcgagaccaactggagcggctttgcccgccatatcctcgacacgagccgcgtgtctggcggtccttcagcgcgggtccacgacattatgacgacggactacccgaccaaggcgcgacgccctgccaattcccggctttcgagcgcgaagttcgcgtcagcctttggctggaccgcgccggactggcggcaatcgacggaagccgtggtgcgtcgggtcctgttctga

SEQ ID NO: 49571 - protein, 292 aa, Mesorhizobium loti MAFF303099
MRLAVTGRDGQVVSSLLEAGQFAGVDVIAIGRPQLDLANPDTVIEAIAAARPDIVVSAAAYTAVDQAEDEPDLAFRVNAVGAGKVAQAAARLGVPVIHLSTDYVFDGSASGAYVETDATAPASVYGASKLAGEQTVAAAGPRHLILRTAWVYSPFGKNFVKTMLRLAADRDEISVVADQWGNPSSALDIADAILHAAATLHRNKDFGAFGTYHLAGTGETNWSGFARHILDTSRVSGGPSARVHDIMTTDYPTKARRPANSRLSSAKFASAFGWTAPDWRQSTEAVVRRVLF

SEQ ID NO: 49572 - DNA, 843 bp, Thermoplasma volcanium GSS1
  CDS (1)..(843): transl_table=11
ttgccaaacatacttatatttgggcatacagggcagttaggaagagagctcctcaaacttgttcctaacgctatttctggatctatcaatggaaaacgagtagatattacggattattcagagatagctttgctgttctctcaagcaagcccagacatagtaataaattccgctgcttttactaatgtggacagatgcgaaaaagaaagagaaaaggcttatttggtcaatgcaataggcgttaggaacatcgtaaagctctgtgacaagtataattctaaattaattcaaatatctactgattatgtattcaatggagagagaggaaattacaaagaagacgatatacccgacccgatcaattactatggttatacaaaatcaataggagatgcatatgcactatcaagtgacaatacaattgtcgtaagaacatctggagttttcggaaatgccaataattttcctttgtttgtatacaataggcttaaggctggcctcgaagtcgatgttattaagggttattattctccaattcatgccaatcttctttctaaggccttatacgtattaatatccaaaggaacgcataggggcattatcaacattgctggacagaggatatcgcgatttgacctagcgactgccatagcaaacagatttggatttgatcaaaagttaattagggaagttccggatctaaaagaaatggttgcaaggaggccttttgattcatctctcgatatatcttatgcaaaaaagttgatcgactttgatttctacacactcgagagtaatctaaatagttttgaaagatcactaaagaaggatggtgaagaatga

SEQ ID NO: 49573 - protein, 280 aa, Thermoplasma volcanium GSS1
MPNILIFGHTGQLGRELLKLVPNAISGSINGKRVDITDYSEIALLFSQASPDIVINSAAFTNVDRCEKEREKAYLVNAIGVRNIVKLCDKYNSKLIQISTDYVFNGERGNYKEDDIPDPINYYGYTKSIGDAYALSSDNTIVVRTSGVFGNANNFPLFVYNRLKAGLEVDVIKGYYSPIHANLLSKALYVLISKGTHRGIINIAGQRISRFDLATAIANRFGFDQKLIREVPDLKEMVARRPFDSSLDISYAKKLIDFDFYTLESNLNSFERSLKKDGEE

SEQ ID NO: 49574 - DNA, 852 bp, Pyrococcus abyssi GE5
  CDS (1)..(852): transl_table=11
atgagagttgcagtaattggggcaaacggccagttgggaactgatttggttgaagtctttggggaagaagcaattcctttgactcgcaaagatttagacgtaacagatttcgagagcttgaagattttgaaggagcttaagcccgaggtgataatcaatacagcagcttacgttagggttgatgatgctgaactttaccctgaggaggcctttaaggtgaacgccattggagcgttgaacgtcgcgaggattgccaatgaaatcggagcaataaacgtctacatcagcactgattacgtttttgacggggccaaaggtgagccctataccgaagaagatatcccaaacccaatcaacgtctacggggcgagcaagtacataggtgagattttcacgaggaattattctaagaagtactacataatcagggttgcaagcttgtatggaaaagctggggcgaggggaaagggcgggaacttcgtcgagtgggttatcaagaaggccaataagggagaggagcttaggattgttaatgatcagtttatgagcccaacttatactaaggacgtcgcgagaactttgagggagcttttaaggctgaggccaagctttggcgtctaccacatggtgaatgaaggatattgtagttggtatgaattcactagggcaatatttgagattctgggctgggatgttagagtgaagcctataaactcaagtgagctgaagaggctagcaaagaggccgaagttttcagcgttaaagaatgagaagctcgaaaaaattgggctgaagatgaaacactggaaagaagctttgggagagtatttgaaggagaaaggatatctctaa

SEQ ID NO: 49575 - protein, 283 aa, Pyrococcus abyssi GE5
MRVAVIGANGQLGTDLVEVFGEEAIPLTRKDLDVTDFESLKILKELKPEVIINTAAYVRVDDAELYPEEAFKVNAIGALNVARIANEIGAINVYISTDYVFDGAKGEPYTEEDIPNPINVYGASKYIGEIFTRNYSKKYYIIRVASLYGKAGARGKGGNFVEWVIKKANKGEELRIVNDQFMSPTYTKDVARTLRELLRLRPSFGVYHMVNEGYCSWYEFTRAIFEILGWDVRVKPINSSELKRLAKRPKFSALKNEKLEKIGLKMKHWKEALGEYLKEKGYL

SEQ ID NO: 49576 - DNA, 873 bp, Pyrococcus horikoshii OT3
  CDS (1)..(873): transl_table=11
gtggttgcaatgagaattgcaataataggggcaaatgggcaattaggaactgatctcgtggaggtttttggtaatgatccagaattcgaagttgttccattaacgcataaagaccttgacgttacaattccggagagtttgaaagtgctaaaagaaattaagccagatgtccttattaatactgctgcttacgttagggttgatgatgcagagctttatcccgaaaaagcctttgccgtgaatgcaattggtgctttgaatgttgcaaggattgccaatgagattgatgccgttaatgtttatatcagcacggattacgttttcgatggcgaaaagggggagccatataccgaagaagatgtgccgaacccgataaatgtttatggtgtgagtaagtatacgggagaaattttcaccaggaattattctcccaagcattacataattagggtggcgagcctctacgggaaggccggggcgagcggtaagggcgggaactttgtggagtgggtgattgagaaggcaaagcatggagaagagctcaaaattgtggacgaccagttcatgagtccaacctataccaaagacgttgccagaactttgaaagagtttttaaagctgaggtcggagtttggggtttaccatatggttaatgagggcttttgctcgtggtacgagtttaccgaggcaatatttgatgttttaggctggaatgtcgagataaagcccataaagtcaaacgagctcaacaggctggcgaagaggccaaggttctctgcgctgaagaatgaaaagctggaaaaaattgggctaagaatgagacattggagagaagccttggaagagtatttaaaggagaagggttacgtgtag

SEQ ID NO: 49577 - protein, 290 aa, Pyrococcus horikoshii OT3
MVAMRIAIIGANGQLGTDLVEVFGNDPEFEVVPLTHKDLDVTIPESLKVLKEIKPDVLINTAAYVRVDDAELYPEKAFAVNAIGALNVARIANEIDAVNVYISTDYVFDGEKGEPYTEEDVPNPINVYGVSKYTGEIFTRNYSPKHYIIRVASLYGKAGASGKGGNFVEWVIEKAKHGEELKIVDDQFMSPTYTKDVARTLKEFLKLRSEFGVYHMVNEGFCSWYEFTEAIFDVLGWNVEIKPIKSNELNRLAKRPRFSALKNEKLEKIGLRMRHWREALEEYLKEKGYV

SEQ ID NO: 49578 - DNA, 918 bp, Aeropyrum pernix K1
  CDS (1)..(918): transl_table=11
atggtgaataatgccttgaagttactagtgactggtggaactgggcttctcggctacaaccttgtccagcaactactaaagaagggttacagcgtgtaccccacttataacaaaaacaccccctttaagcttgctggagcaagatggtctaaggtcaacctagaggatcctagccaactaacccaactatttagggatattaagccagatgcagttatccacaccgccgcgtatactgatgttgatggttgcgagttgcatagggaaagagcctaccggataaactttttagcttcaatgacagtagctagactagcagccaggcatggtagccttctaatatacgtgtcaacagattatgtgttcgatggagataaaggtatgtacagggaagaggaggctccaaaccccatcaactattacggcttatctaagctactaggagaagtagcaactttgtcagcgatggataaggaaaatgtgcttgtcgttagggttagtggcctttatggatatagccctacggggaaacgaaatttcggcattaatgtgttagagaagttacttaggggggaagaggtaagggcgttctatgaccaatatctatcgccaacatacacatatttcttatcaagaaggctgatagatgtcctcgaaagagagattcgtggagtactccacctagctggcgagcgcctgtcgagacttgagttcgcccaactaatagccaaggttctcggtgctgacgcggaacttatcaagccaatatcaatgaaggaggctaacttgcccgcgaggagacctcgggactcaagcctagacaccactatggctaagaagctaggactcgaattacctagccaagaggagagtgtaaaacattttgtcaatatctatagaaacgctataggggtctaa

SEQ ID NO: 49579 - protein, 305 aa, Aeropyrum pernix K1
MVNNALKLLVTGGTGLLGYNLVQQLLKKGYSVYPTYNKNTPFKLAGARWSKVNLEDPSQLTQLFRDIKPDAVIHTAAYTDVDGCELHRERAYRINFLASMTVARLAARHGSLLIYVSTDYVFDGDKGMYREEEAPNPINYYGLSKLLGEVATLSAMDKENVLVVRVSGLYGYSPTGKRNFGINVLEKLLRGEEVRAFYDQYLSPTYTYFLSRRLIDVLEREIRGVLHLAGERLSRLEFAQLIAKVLGADAELIKPISMKEANLPARRPRDSSLDTTMAKKLGLELPSQEESVKHFVNIYRNAIGV

SEQ ID NO: 49580 - DNA, 720 bp, Clostridium acetobutylicum ATCC 824
  CDS (1)..(720): transl_table=11
gtggtaaaaagtgttataagtaaaattagacctgacgtagttgtaaatgctgctgcctacacaaatgtagatgcctgtgaaacaaacgaaaagaaagcgtttgaggtaaatgcttttggagctaaaaatttggctattgcagcagaagagataggagctaaattagtacatatttcatcagattatgttttcagcggtgaaggaaatacaccttttaaggatgaggacaaagcatcgcctcaaagtgtctatggtaaaagtaaaaaaatgggtgatgattttgtaaaagagttttcttcaaaatatttcatagtaaggccagcttgggtatatgggtataagggtaaaaattttgtgtacacaataatggagctggcgaaagaaaaagaagttgtaactgttgtgaatgatcaaagaggaaatccaacaaatgttgaggatatagtttatcatatattaaaattgatagttacagataagtatggagtttacaattgttcggggcatggagagtgttcatggtacgattttgcatgtgaaataataaaattaagtaatatacctagtgttataaagccatgctcttcaaatgaatataaaagacaagctaaaagaccatcctattcatctttagaaaataaaaatttaagtttagcagttggagatgatatgaggtattggaaagatgcattaaaggtttttatagaaaaagtaatgtaa

SEQ ID NO: 49581 - protein, 239 aa, Clostridium acetobutylicum ATCC 824
MVKSVISKIRPDVVVNAAAYTNVDACETNEKKAFEVNAFGAKNLAIAAEEIGAKLVHISSDYVFSGEGNTPFKDEDKASPQSVYGKSKKMGDDFVKEFSSKYFIVRPAWVYGYKGKNFVYTIMELAKEKEVVTVVNDQRGNPTNVEDIVYHILKLIVTDKYGVYNCSGHGECSWYDFACEIIKLSNIPSVIKPCSSNEYKRQAKRPSYSSLENKNLSLAVGDDMRYWKDALKVFIEKVM

SEQ ID NO: 49582 - DNA, 852 bp, Bacillus halodurans C-125
  CDS (1)..(852): transl_table=11
atgacacaccttctcatcacgggagccaatggccaagtaggcatggagttaagcaaacaggggaagcagcattttcaagtaacggctcttacgaagcaagagttaaatatacttgatcgaaacacggtgatgaacaagattaaaggcgtgaacccggattggattattcatgtagccgcttttaccgctgttgaccaatgtgaggacgaacaacgcaaagcctatcacgtgaacgggctaggcgctgcgaatgtggccagagctgcacgggagacgggagcgaaattaatttatattagcaccgactacgtctttgacgggaacaaaaacagtccctatgaaacgtgtgacctgccaaacccattgaatgtgtatggaaatagtaagtggctaggggaacggctcgtccaaaaatatgtaaaaacgtgtacaatcgcccgaacctcttggttatatggccactacggaggcaatttcgtcaaaaccatgcttcgcctcttacgtaaaggagaaccgatcgaagtcgtagcagaccaagtcggctgtccaacctatgtgaacgatcttgtttattatttatttgcgttaatggaaaaacctagcggaatctatcatattagcaaccgcgggtcatgcaattggtttgagtttgctagagcgattgctaaaaatgcaggttatgatccaagcttaattagggcgacaacaacgaaagcctttgcagcaaaagcccgccgcccgaaatattcggtcatgagccatcaacagctggaattagcaggtttgcaacccccaagggaatgggagctggctctaaaagagtttatacaggaggagacatgtcatgattga

SEQ ID NO: 49583 - protein, 283 aa, Bacillus halodurans C-125
MTHLLITGANGQVGMELSKQGKQHFQVTALTKQELNILDRNTVMNKIKGVNPDWIIHVAAFTAVDQCEDEQRKAYHVNGLGAANVARAARETGAKLIYISTDYVFDGNKNSPYETCDLPNPLNVYGNSKWLGERLVQKYVKTCTIARTSWLYGHYGGNFVKTMLRLLRKGEPIEVVADQVGCPTYVNDLVYYLFALMEKPSGIYHISNRGSCNWFEFARAIAKNAGYDPSLIRATTTKAFAAKARRPKYSVMSHQQLELAGLQPPREWELALKEFIQEETCHD

SEQ ID NO: 49584 - DNA, 909 bp, Pseudomonas aeruginosa PAO1
  CDS (1)..(909): transl_table=11
atgaaccggatccttctcctcggcgccaacggccaggtcggctgggagctgcagcgcgccctggcgccgctgggcgaactgctggtctgtgaccgtcggcgcgccgatctcgccgaccccgaaggcctggcgcgactggttcgcgccgagcggccgcagttcatcgtcaacgccggtgcctacaccgcggtggacaaggccgagagcgatgccgacaacgcccgcctgatcaatgcccgcgccgtcgcggtactggccgaggaggccgcggcctgcggcgcctggctggtgcattactccaccgactacgtgttcgacggcgcgggcagcgtgcctttcgccgaggacgcgccgaccggcccgctgagcgtctacgggcagaccaagctggaaggcgagcaggccatccgcgccagcggctgccgccacctgatcttccgcaccagctgggtctacgccgcgcgcggcggaaacttcgccaagaccatgctgcgcctggccgggcaacgcgacgaactcaaggtcgtggccgaccagttcggcgcgcccaccagcgccgagctgatcgccgacgtcaccgcccaggccctgcagcgcctgtgctgggatgtcgagctggcagcacgggccagcggcacctaccacctggtcgccagcggcgagacgtcctggcacctctatgcgcgcttcgtcatcgaacaggcgctggagcggggctgggagttgcaggcgacgccgcagcgggtcctgccgatcgccaccgaggactacccggtgccggcgaagcgtccggccaattcgcgcctcgacaaccgcaagctgcaacaggtcttcggcctggtactgccagactggcgctaccatgccggacgcatgatccaggaactgagcgagcagggaccactatga

SEQ ID NO: 49585 - protein, 302 aa, Pseudomonas aeruginosa PAO1
MNRILLLGANGQVGWELQRALAPLGELLVCDRRRADLADPEGLARLVRAERPQFIVNAGAYTAVDKAESDADNARLINARAVAVLAEEAAACGAWLVHYSTDYVFDGAGSVPFAEDAPTGPLSVYGQTKLEGEQAIRASGCRHLIFRTSWVYAARGGNFAKTMLRLAGQRDELKVVADQFGAPTSAELIADVTAQALQRLCWDVELAARASGTYHLVASGETSWHLYARFVIEQALERGWELQATPQRVLPIATEDYPVPAKRPANSRLDNRKLQQVFGLVLPDWRYHAGRMIQELSEQGPL

SEQ ID NO: 49586 - DNA, 900 bp, Lactococcus lactis subsp. lactis Il1403
  CDS (1)..(900): transl_table=11
atgattttaataacaggtggaaatggacaacttggaacagagttgcgtcatttacttgatgaacgtggcatggcttatacagcaacagatgctaaagaactcgatattactgacggcgtcgctgttgataaattctttgatgaaaataaacctgaacttgtctatcattgtgcggcttatacagctgttgataaagctgaagacgaaggtcgtgaacttgatgaaaaaatcaatgttgatggaactaaaaatgtagccgaagcggcagcacgtgttggggcaacacttgtttatatttcaactgactatgtttttggcggaactttgccaattggccaagagtggccggttgatgcaccaaaagctcctgaatctgaatatggacggactaaacatcttggtgaagaagcagttgtggcttctggtgtaaaacattacatcatccgtactgcttgggtttttggttcttatggaccaaactttgtcttcacaatgcaaaacttggcgacacgttttccagaattaaccgttgttaatgatcaacacggcagaccaacttggacacgtacacttgcagaatttatggtttatttggttagtgaaaaagctgattttggtttttatcatctaacaaacgatgctgcgcctggtgaagatgtgacttggtttgattttgccaaagaaatcttgaaagacacagatgtgcttgttaaacctgtggattcaagcaaattcccggcaaaagcaaaacgtccatttaattcaacaatgagtcttgaaaaagcaaaagcgacaggttttgtcattccaacatggcaagaagctttagcaagtatgcttgaaaaaggcgatttgcgtgaaaataaagatggcgtaaaaggcgaaattaacaaaaaataa

SEQ ID NO: 49587 - protein, 299 aa, Lactococcus lactis subsp. lactis Il1403
MILITGGNGQLGTELRHLLDERGMAYTATDAKELDITDGVAVDKFFDENKPELVYHCAAYTAVDKAEDEGRELDEKINVDGTKNVAEAAARVGATLVYISTDYVFGGTLPIGQEWPVDAPKAPESEYGRTKHLGEEAVVASGVKHYIIRTAWVFGSYGPNFVFTMQNLATRFPELTVVNDQHGRPTWTRTLAEFMVYLVSEKADFGFYHLTNDAAPGEDVTWFDFAKEILKDTDVLVKPVDSSKFPAKAKRPFNSTMSLEKAKATGFVIPTWQEALASMLEKGDLRENKDGVKGEINKK

SEQ ID NO: 49588 - DNA, 921 bp, Neisseria meningitidis MC58
  CDS (1)..(921): transl_table=11
atgagaatcctattgacaggctcgaaaagccaactggcacgctgcctgcgcgaccgtcttccggaagactgggaaaccattgcgacggattccgcatccctagacattaccgatgccgatgccgtctgcaacatggtcaaaagtttccaacccgacgccattgtcaacacggctgcctatactgccgtcgacaaggcggaaggcgatgcggcagcggcatttgccgtcaatgcttccgccgtttacaaccttgccttggcagcacatcgcgcccatgcccgattcatccacatctcaaccgactatgtctttgacggtaaagggaaaagaccctatcaggaaagcgactttaccaatccttccaatgtatacggacaatccaaaaccgcaggcgagctgctcgcactgtctgccaatcccgacagccttatcctgcggacttcttggctgtttagcgaatacggggacaactttatccgcacgatgctgaaccttgcgcgggaacgttccccgctgtccgccgtccacaaccaaatcggctgcccgacctatgccggcgacttgtccgccaccatcatccgcctgttgcagcactccaatcccgttcgcggcatttaccactacgccggcagcaaatccgtatcctggtacgaatttgcccaacatattttccaagcggcatcgcaacagcagacatccttccccgttcccgaattgactgccgtttcagacaaggaatatccgaccgccgcccccaggcccgcatacagcattttggactgccgcaaaatcgaaaacgacttcggcatcaaaccgtcagactggcaaaaagccttgcacaggtcgtttccaagctgctctgatgccgcccgcccctctgtttccgccgtcaagcaccgccttggcggttttcttatatag

SEQ ID NO: 49589 - protein, 306 aa, Neisseria meningitidis MC58
MRILLTGSKSQLARCLRDRLPEDWETIATDSASLDITDADAVCNMVKSFQPDAIVNTAAYTAVDKAEGDAAAAFAVNASAVYNLALAAHRAHARFIHISTDYVFDGKGKRPYQESDFTNPSNVYGQSKTAGELLALSANPDSLILRTSWLFSEYGDNFIRTMLNLARERSPLSAVHNQIGCPTYAGDLSATIIRLLQHSNPVRGIYHYAGSKSVSWYEFAQHIFQAASQQQTSFPVPELTAVSDKEYPTAAPRPAYSILDCRKIENDFGIKPSDWQKALHRSFPSCSDAARPSVSAVKHRLGGFLI

SEQ ID NO: 49590 - DNA, 843 bp, Methanothermobacter thermautotrophicus str. Delta H
  CDS (1)..(843)
atgaagatccttataaccggttcctcgggcatgctgggaagcgacctcgtggacatcctatcccggaggcatgaggttgtaacatcaggctcccttgacatccgtgaccttgagggtgttatggaactcctcagggagacccggcccgacgccgttgtacatgccgcggcattcacagacgttgactgtgcagaaacagagagggataaagcataccaggtgaacgtgcttggcaccaggaacattgcagctgcggcatcagctgtggggtcatccatcctgtacatatcaacggattacgtctttgatggagaaaaaggtgatggataccttgaatttgatgaaccaaatccccttaacttctatggtaaaacaaagtacctcggcgaggtttcggtgcgtcagctttcagagaggttctacattgtcagaacatcatggttgttcggaaggaacgggagaaacttcgtggggaccatggttgaactcgctgagaggggtcatgaaataagcgttgtggatgaccagtacggatccccgacctacacccgtgaccttgcagcagccatcgggaacctgctggagagaccggcctacggggtctatcacctcacaaattctggtcagtgctcgtggtatgaatttgccattgatatattcaatgaactcggcatggaagtgtgcctgaaacccgtgaaaagccatgaattccccagacccgcccggaggccctcattctctgttctcagaaactataactggtccatggagggtttcaaacccctgaggaactacagggacgccctgagggattacctcaaagatgcgggttttgtaaaatga

SEQ ID NO: 49591 - protein, 280 aa, Methanothermobacter thermautotrophicus str. Delta H
MKILITGSSGMLGSDLVDILSRRHEVVTSGSLDIRDLEGVMELLRETRPDAVVHAAAFTDVDCAETERDKAYQVNVLGTRNIAAAASAVGSSILYISTDYVFDGEKGDGYLEFDEPNPLNFYGKTKYLGEVSVRQLSERFYIVRTSWLFGRNGRNFVGTMVELAERGHEISVVDDQYGSPTYTRDLAAAIGNLLERPAYGVYHLTNSGQCSWYEFAIDIFNELGMEVCLKPVKSHEFPRPARRPSFSVLRNYNWSMEGFKPLRNYRDALRDYLKDAGFVK

SEQ ID NO: 49592 - DNA, 864 bp, Neisseria meningitidis Z2491
  CDS (1)..(864): transl_table=11
atgagaatcctattgacaggctcgaaaagccaactggcacgctgcctgcgcgaccgtcttccggaagactgggaaaccattgcgacggattccgcatccctagacattaccgatgccgatgccgtctgcaacatggtcaaaagtttccaacccgacgccattgtcaacacggctgcctatactgccgtcgacaaagcggaaggcgatgcggcagcggcatttgccgtcaatgcttccgccgtttacaaccttgccttggcagcacatcgcgcccatgcccgattcatccacatctcaaccgactatatctttgacggaaaagggaaaagaccctaccaggaaagcgactttaccaacccttccaatgtatacggacaatccaaaaccgccggcgaactgctcgcactgtctgccaatcccgacagccttatcctgcggacttcttggctgtttagcgaatacggggacaactttgtccgcaccatgctgaaccttgcgcgggaacgttccccgctgtccgccgtccacaaccaaatcggctgcccgacctatgccggcgacttgtccgccgccatcatccgcctgttgcagcagtccaatcccgttcgcggcatttaccactacgtcggcggcaaatccgtatcctggtacgaatttgcccaacatattttccaagcggcatcgcaacagcagacatccttccccgttcccgaattgactgccgtttcagacaaggaatatccgaccgccgcccccaggcccgcatacagcattttggactgccgcaaaatcgaaaacgacttcagcatcaaaccgtcagactggcaaaaagcccttgcacaggtcgtttccaagctgctctga

SEQ ID NO: 49593 - protein, 287 aa, Neisseria meningitidis Z2491
MRILLTGSKSQLARCLRDRLPEDWETIATDSASLDITDADAVCNMVKSFQPDAIVNTAAYTAVDKAEGDAAAAFAVNASAVYNLALAAHRAHARFIHISTDYIFDGKGKRPYQESDFTNPSNVYGQSKTAGELLALSANPDSLILRTSWLFSEYGDNFVRTMLNLARERSPLSAVHNQIGCPTYAGDLSAAIIRLLQQSNPVRGIYHYVGGKSVSWYEFAQHIFQAASQQQTSFPVPELTAVSDKEYPTAAPRPAYSILDCRKIENDFSIKPSDWQKALAQVVSKLL

SEQ ID NO: 49594 - DNA, 909 bp, Xylella fastidiosa 9a5c
  CDS (1)..(909): transl_table=11
gtgacggtgttggtctttggggcgggtggtcagattggtcaggagttgctgcggtcactgagtgggcgtgtggtgtgtgccgtcacgcgcagtggacggttgccgaatgggagggagtgtgtgcaggcggattttgataggcctgagacattgcgcccgttgctcgacgcgcagcggccagcacaggtggtgaacgcggctgcttatacggcggttgaccgtgcggaatctgagcctgatgtggtgttccgtatcaatgcgcaggcaccaggtgtaatcgcgcattggtgtgcgaggcatggggtgccgttggtgcattattccactgactatgtgtttgatgggcagggtacgtctccgtacggtgtggatgatcctgtcgcgccgttaaatatttatggtgcgagtaagctggctggggagcgtgcggtccgggcggcgggcgggtgttctctgatcttgcgtacgtcctgggtttacgcggcgcatggccacaattttttacgcactatgctgcgtttgggtgcgacatccgagcgcttgccggtggtggcggatcagatcggcacgccgactgcagcggggttgattgcggatgtcactgcgcagttgctggcggggggggggcaaagtcggcatgcgggtatttggcatctgacggcgaccggtcaaacgagttggcatggttttgctgaggagattttcgcgcaggcgcaggcatgcggtttgatgatgcgggtcccgcaggtacaggccattgcgagtgttgggtatccgactgcggcgcggcgtccggcgtattcgtgtctggatacgacggcgttggtggaaacgtttgggatcgtgctaccggattggcgtcagggcgtgcggggtgtgttggacgacatcgtcaacaggtcgcgttaa

SEQ ID NO: 49595 - protein, 302 aa, Xylella fastidiosa 9a5c
MTVLVFGAGGQIGQELLRSLSGRVVCAVTRSGRLPNGRECVQADFDRPETLRPLLDAQRPAQVVNAAAYTAVDRAESEPDVVFRINAQAPGVIAHWCARHGVPLVHYSTDYVFDGQGTSPYGVDDPVAPLNIYGASKLAGERAVRAAGGCSLILRTSWVYAAHGHNFLRTMLRLGATSERLPVVADQIGTPTAAGLIADVTAQLLAGGGQSRHAGIWHLTATGQTSWHGFAEEIFAQAQACGLMMRVPQVQAIASVGYPTAARRPAYSCLDTTALVETFGIVLPDWRQGVRGVLDDIVNRSR

SEQ ID NO: 49596 - DNA, 915 bp, Mycobacterium tuberculosis CDC1551
  CDS (1)..(915): transl_table=11
atggcgggcaggtcagaaaggctagtcatcaccggtgcgggcgggcagctgggcagccatctgacggcacaggccgcccgggaaggccgcgatatgctggcgctgacttcctcgcagtgggatatcaccgaccccgctgcggccgagcggatcatccgacacggtgacgtggtgatcaattgcgccgcctacaccgacgtcgacggcgccgagagcaatgaggcagtcgcctatgcggtcaatgccactggcccgcaacacctcgcccgtgcgtgcgctcgtgtgggtgctcggttaatccacgtctccaccgactacgtattcgatggcgacttcggcggcgccgagccccggccctacgagcccaccgatgaaaccgcgccgcagggcgtgtatgcccgcagcaaactcgccggcgagcaggctgtgctggcagcgttcccggaggctgccgtggtacggaccgcctgggtctacaccggcgggaccggcaaggatttcgtcgccgtcatgcgccggctggccgccggacacggtcgggtggatgtggtcgacgaccagaccgggtcgccgacctacgtcgccgacctggccgaggcgctgctggcgttggccgacgcgggcgtgcgcggacgcgtgttgcacgccgctaacgagggcgtggtctcccggttcggtcaagcccgcgcggtgttcgaagaatgcggtgccgacccacagcgggtgcgtccggtcagcagcgcgcagtttccgcggcccgcgccgcgttcgagctattccgcgctgtcgagcaggcagtgggcgctggcgggcttgacgccgctacggcactggcgcagcgcactggccacggcgctggcagcacctgcgaactcaacttcgatcgatcgacggttaccctcaacgcgtgactga

SEQ ID NO: 49597 - protein, 304 aa, Mycobacterium tuberculosis CDC1551
MAGRSERLVITGAGGQLGSHLTAQAAREGRDMLALTSSQWDITDPAAAERIIRHGDVVINCAAYTDVDGAESNEAVAYAVNATGPQHLARACARVGARLIHVSTDYVFDGDFGGAEPRPYEPTDETAPQGVYARSKLAGEQAVLAAFPEAAVVRTAWVYTGGTGKDFVAVMRRLAAGHGRVDVVDDQTGSPTYVADLAEALLALADAGVRGRVLHAANEGVVSRFGQARAVFEECGADPQRVRPVSSAQFPRPAPRSSYSALSSRQWALAGLTPLRHWRSALATALAAPANSTSIDRRLPSTRD

SEQ ID NO: 49598 - DNA, 681 bp, Sulfolobus solfataricus P2
  CDS (1)..(681): transl_table=11
ttggaggatttcataattaagactaggcctgatgttataataaacactgcagctatgactgacgtagacaagtgcgaggtagaaagagaaaaggcttataaaataaatgccgaagcagtaaaacacatggtaagagctagtagggtagtggaagcttactttattcacgtgagtacggactacgtttttgacggcacgaaggggaattacaaagaggatgacttaccaaatccaataaactactatgggctgacaaagttattaggagagacctttgccttatcatacgacgacagcctcgttataaggacttctggggtattcagacacaaggggtttccagtatatgtgtacaaaacgttaaaggaagggaagacagtcttcgcgtataaaggttattactcgcccatttcagcgaggaaactagcatcagcaatagaagagttactggcccttaggaaaactggtttactaaatgttgcaggagagagaatatcgcgttacgagctggctctaaagattaaggaaaagttcaatttgccaggagaagtgaaggaagtagatgaggttaaaggatggacagctaggaggccctttgactcctctttggactactcaaaagctaagaaaatcttatccgtcgatttttacagtttagacctagaaggtatggtgttgtga

SEQ ID NO: 49599 - protein, 226 aa, Sulfolobus solfataricus P2
MEDFIIKTRPDVIINTAAMTDVDKCEVEREKAYKINAEAVKHMVRASRVVEAYFIHVSTDYVFDGTKGNYKEDDLPNPINYYGLTKLLGETFALSYDDSLVIRTSGVFRHKGFPVYVYKTLKEGKTVFAYKGYYSPISARKLASAIEELLALRKTGLLNVAGERISRYELALKIKEKFNLPGEVKEVDEVKGWTARRPFDSSLDYSKAKKILSVDFYSLDLEGMVL

SEQ ID NO: 49600 - DNA, 843 bp, Clostridium acetobutylicum ATCC 824
  CDS (1)..(843): transl_table=11
atgaaaatacttataacaggagcaaatggacaattaggaagagaaattcaaaaacagctaaaaggaaaaaatgtagaggttatacctacagatgtacaagatttagatataactaatgttttagctgtaaataaattttttaatgaaaagaaaccaaatgtggtaattaattgtgcagcacatacagcagttgataaatgtgaggaacagtatgatttagcttataaaataaatgctataggacctaaaaatcttgcagcagcagcatacagtgttggagctgaaattgttcagatttcaacagattatgtttttgatggagaggcgaaggaacctataacagaatttgatgaagtgaatcctcaatcagcttatggaaaaacaaagcttgaaggagaaaactttgtaaaagcattaaatcctaaatattacatagttagaacagcgtggctttatggagatggaaataattttgtaaaaaccatgataaatttaggcaaaactcatgatgaattaaaagttgtgcatgaccaggttggaacacctacaagtacagttgatttagctagagtagttctcaaagtaatagacgaaaaaaattatggaacatttcattgtacatgtaaaggaatatgttcttggtatgattttgctgtagagatattcagacttacaggaattgatgtaaaggtaactccatgtactactgaagaatttccaagaccagctaaaagaccaaaatattcagtacttagaaactatatgttagaacttacaacaggtgatattacaagagagtggaaagagtctctaaaagaatatatagacttacttcaaatgtag

SEQ ID NO: 49601 - protein, 280 aa, Clostridium acetobutylicum ATCC 824
MKILITGANGQLGREIQKQLKGKNVEVIPTDVQDLDITNVLAVNKFFNEKKPNVVINCAAHTAVDKCEEQYDLAYKINAIGPKNLAAAAYSVGAEIVQISTDYVFDGEAKEPITEFDEVNPQSAYGKTKLEGENFVKALNPKYYIVRTAWLYGDGNNFVKTMINLGKTHDELKVVHDQVGTPTSTVDLARVVLKVIDEKNYGTFHCTCKGICSWYDFAVEIFRLTGIDVKVTPCTTEEFPRPAKRPKYSVLRNYMLELTTGDITREWKESLKEYIDLLQM

SEQ ID NO: 49602 - DNA, 822 bp, Sulfolobus tokodaii str. 7
  CDS (1)..(822): transl_table=11
atgcgaacactaataactggtgcatcgggacagttaggcatagaactctcacgcttactctcagaaagacatgaagtaataaaagtctacaattcttcagaaattcaaggaggttacaaactcgaccttaccgatttcccgcgactagaggacttcataataaagaaaagaccagacgtaataattaatgcagcagcaatgactgacgtagacaaatgcgaaatagagaaggagaaggcatataaaataaacgctgaggcagttagacacatagttagagcgggaaaagtaatagattcctacatagtccacatcagtaccgattacgtgtttgacggagaaaaaggtaactataaagaagaagatatacctaatcccataaattattacggtttaagcaagcttttaggggaaacatttgctctacaagatgatagtttaataatcagaacttctggtatttttaggaataaggggtttccaatttacgtttataaaactcttaaggaagggaagactgtattcgcttttaagggctattactctcctatctcagcaagaaaacttgcttctgcaatacttgaacttttagaattaagaaagactgggatcattcacgttgccggtgagaggatttcacgttttgaattagctttaaagattaaggagaagtttaatttaccgggagaagttaaagaagttgatgaagttagggggtggatagctaaaaggccttacgattcctctctcgattcttcaagggctaggaaaatactttcaacagatttttacacattggatctagacggtatggtggtgtga

SEQ ID NO: 49603 - protein, 273 aa, Sulfolobus tokodaii str. 7
MRTLITGASGQLGIELSRLLSERHEVIKVYNSSEIQGGYKLDLTDFPRLEDFIIKKRPDVIINAAAMTDVDKCEIEKEKAYKINAEAVRHIVRAGKVIDSYIVHISTDYVFDGEKGNYKEEDIPNPINYYGLSKLLGETFALQDDSLIIRTSGIFRNKGFPIYVYKTLKEGKTVFAFKGYYSPISARKLASAILELLELRKTGIIHVAGERISRFELALKIKEKFNLPGEVKEVDEVRGWIAKRPYDSSLDSSRARKILSTDFYTLDLDGMVV

SEQ ID NO: 49604 - DNA, 903 bp, Caulobacter crescentus CB15
  CDS (1)..(903): transl_table=11
atgaccgacaagacgcatattctcgtcaccggcggcgccggacaggtggggttggagcttttgggcgccgcatggccggacgggatcgtgctgcatgcgccgtcccgcgccgcgttggacctgacgaacgagacgtcgatccgggccgccttcgaggcgaggcccttcgccgcggtgatcaattcggccgcctggacggccgtggacaaggccgagagcgaggtcgcggccgccttcgccgccaacgccatcggaccagccctgctggctgaggtgacgcgggcgaggggcgttccgctgattcaggtctccaccgactatgtgttcgacggcgacaagccgggaccctatacagaggatgacccggtcggtccgatcgggatctatggcgcctcgaagctggccggcgagatggccgtgcgcctgggcaatccgcgctcggtcgtgctgcggaccgcctgggtgctcagcgcccatcgcgccaactttctgaagaccatgctccgcctcgccgccgaccgcccggtcgtgcgcgtcgtcgaagaccagctgggctgtccgacctcggcgcgcgacatcgccgaggcgctgcaaaccatcacgctggggatgatcgccgacccacaagcgccgaacggcgtctatcatttcgtcaattcgggcgaggccagctgggcggatctggcgcgggaaatctttcgtctcagccacgcccacggaggcgttcatgccgaggtcgagggcattccgagtagtgaatatccaacgccggcccgtcgtccgcgtaactcacgcctgttgaccaaccggatcgcagcggactacgccatccacccccggccctggacagaggccgtggcggacatcatcgcggacttgcgcgtacagggagcccctgcatga

SEQ ID NO: 49605 - protein, 300 aa, Caulobacter crescentus CB15
MTDKTHILVTGGAGQVGLELLGAAWPDGIVLHAPSRAALDLTNETSIRAAFEARPFAAVINSAAWTAVDKAESEVAAAFAANAIGPALLAEVTRARGVPLIQVSTDYVFDGDKPGPYTEDDPVGPIGIYGASKLAGEMAVRLGNPRSVVLRTAWVLSAHRANFLKTMLRLAADRPVVRVVEDQLGCPTSARDIAEALQTITLGMIADPQAPNGVYHFVNSGEASWADLAREIFRLSHAHGGVHAEVEGIPSSEYPTPARRPRNSRLLTNRIAADYAIHPRPWTEAVADIIADLRVQGAPA

SEQ ID NO: 49606 - DNA, 882 bp, Caulobacter crescentus CB15
  CDS (1)..(882): transl_table=11
atgaagatcctgcagtttggccgaaccggccaggtcgccaccgccctgcgggcggcggcgcagggacggtcggagatcatcgccctgtctcgcgccgactgcgatcttgccgatcccgagcgcttgcgcgcgacgatcctggccgccgactgcgatcttgtcgtcaacgccgccgcatttactcaggtggacccggccgaggccgcgccggaggcggccttcgccgtcaatgcgcgcgcgcccgccgccatggccgcagcctgcgccgaacgggggctgccgttcgcgcacctgtcgaccgacgcggtgttcgacggccgaaccgaccgcgcctatgttgagaccgatcgcgccgagccgatcaatgtttatggccgctccaagctggccggcgagcaggcggttctggctcaccccagaaccgtcgtgctgcggatctcgtgggtcttctcgcgatatgggcgcaactatgtgagcttcatgctcaagctcgcccgcgagcgcgagacgctgaaggtggtggccgaccagttcggcacgccgaccgatggcgaggccttggctgactttctggtcgcgaccgcgccgcgctgggcggctgcgcccgccgatgatccggccttcggcctgttccatttcgccaatgcgggcgagaccagccggttcgacttcgccaaggccgccattgaccgcgacccgatgacgaaggcccggctggagccgacgacccaggccgccttcgccgagcccgcgccgcgcccgccgcgctcgccgctcgataccgccaagctgcgcgcggtgttcggtttctcacccgaggcgtggcgaccggcggtggagcgcaccgctgaccggttggtctccacgggcctcgccggctaa

SEQ ID NO: 49607 - protein, 293 aa, Caulobacter crescentus CB15
MKILQFGRTGQVATALRAAAQGRSEIIALSRADCDLADPERLRATILAADCDLVVNAAAFTQVDPAEAAPEAAFAVNARAPAAMAAACAERGLPFAHLSTDAVFDGRTDRAYVETDRAEPINVYGRSKLAGEQAVLAHPRTVVLRISWVFSRYGRNYVSFMLKLARERETLKVVADQFGTPTDGEALADFLVATAPRWAAAPADDPAFGLFHFANAGETSRFDFAKAAIDRDPMTKARLEPTTQAAFAEPAPRPPRSPLDTAKLRAVFGFSPEAWRPAVERTADRLVSTGLAG

SEQ ID NO: 49608 - DNA, 903 bp, Sinorhizobium meliloti 1021
  CDS (1)..(903): transl_table=11
gtgagaattgccgtgaccggctgcgagggccaattggccctcggcctcgtggaacggtctcataggcggtcgggaatggaggtcgttacgatcgggcggccgcacctcgatctcacagagccggcaacgatcctgccggcgatcgagcgatgccggccggacctcgtcgtctcggcggcagcttacacggccgtcgaccaggccgaaagcgagccggaggcggctttcgcggtcaacgcgttcggggctggcgcggtcgctgaggcggccgcctgcctcgaagtgcccatcgtccatatttcgacggattatgtcttcgacgggagcaaaccgcggagctatgcagagggcgacacaccggctccgcttagcgtctacggcgcttccaagcttgccggagaaagcgcggttgccgaggcaactccccgccatctcatcctgcgcacgggctgggtctacagccccttcgggaagaatttcgtcaagaccatcctgcggctcgcagaggagcgcgaagatatcgccgtcgttgcggatcaacggggaaatccgtcatcggcgatcgaccttgcggacgcgatcctcgatatttccgcgcggctcacgaaatcccgtcaggacgccgcttttggcctctaccacctcgctggctcgggcgtcgtaagccgggccgatttcgcgcggcatgctcttgcggcgagccgtgccgcaggcggtccctgggcgcatgttcgggacatcgcgacgggtgggtttccgacacctgcaagccgccctgcaaactcgtcgctgtcgagcgccaaattcaacgcgaccttcggccaggccatgcctgcctggcagggttccgtggagcgaaccgtgaggcggcttgtcgagagcatttcgagtgaaaccagttag

SEQ ID NO: 49609 - protein, 300 aa, Sinorhizobium meliloti 1021
MRIAVTGCEGQLALGLVERSHRRSGMEVVTIGRPHLDLTEPATILPAIERCRPDLVVSAAAYTAVDQAESEPEAAFAVNAFGAGAVAEAAACLEVPIVHISTDYVFDGSKPRSYAEGDTPAPLSVYGASKLAGESAVAEATPRHLILRTGWVYSPFGKNFVKTILRLAEEREDIAVVADQRGNPSSAIDLADAILDISARLTKSRQDAAFGLYHLAGSGVVSRADFARHALAASRAAGGPWAHVRDIATGGFPTPASRPANSSLSSAKFNATFGQAMPAWQGSVERTVRRLVESISSETS

SEQ ID NO: 49610 - DNA, 843 bp, Synechocystis sp. PCC 6803
  CDS (1)..(843): transl_table=11
gtgggacgagaattagccattcctttgtcctgttttggttcagtgcaagaagcaactagggctagctttgatttggcccagccggatgtcttaggggagaaaattcgtgcttttgccccggacattattgtcaactccgcggcctatactgctgtggacagggccgaaacagaaccggaattagcctacgcagttaacgcccttgctccccaggcgatcgccaaagtggccaaggaaatcggtgcctatgtggtgcatatttccactgactatgtgtttgatggtagccagagttctccctaccgagaaacggatgccaccaatcccctcggggtttatggccaaagcaaattccagggggaaatagccattgccgacagtggttgtaattttcttattgtccgcactgcctgggtttatggagtccatggatcgggcaattttgtcaaaaccatggtgcgtttaggcaaagaacggcaaaaagtcagggtggtggcggatcaaattggtgggcccacctgggcaaaggatctggccgaggcgatcgccgctttgacggaacaacgggcccagggcatttaccactacagcaacagtggggtggccagttggtacgattttgccgtggctatttttgaggaagttgaaaatctaggtattccccttaaggtgcgtcaggtggtgcccattgccacagctgcctatcccaccccggcccgacggccagcctattctgttttatcccatcaaaaaatagtagaaactttgggttctgcccctccccattggcgggcttcgttacgggccatgctccaccaagctatcagtgaggggattgtctga

SEQ ID NO: 49611 - protein, 280 aa, Synechocystis sp. PCC 6803
MGRELAIPLSCFGSVQEATRASFDLAQPDVLGEKIRAFAPDIIVNSAAYTAVDRAETEPELAYAVNALAPQAIAKVAKEIGAYVVHISTDYVFDGSQSSPYRETDATNPLGVYGQSKFQGEIAIADSGCNFLIVRTAWVYGVHGSGNFVKTMVRLGKERQKVRVVADQIGGPTWAKDLAEAIAALTEQRAQGIYHYSNSGVASWYDFAVAIFEEVENLGIPLKVRQVVPIATAAYPTPARRPAYSVLSHQKIVETLGSAPPHWRASLRAMLHQAISEGIV

SEQ ID NO: 49612 - DNA, 831 bp, Listeria monocytogenes EGD-e
  CDS (1)..(831): transl_table=11
atgagtattttagtaacaggagcaaatgggcagctcggaacggagctagttcaattattaaaagaacataatttaaccgtgactgagtgggacaaagattctgtagatattgtggataaagcagctgtaaaaaaagcaatgcttgatttaaagcctgaatggattatccattgtgccgcttttactaatgtagaagcagcagaagatgaattaaaaaacgttaactgggaagtaaacgtggatgggactgaaaatatcagtgaagctgcagaaatagttggagctaaacttgtatatatcagtacagattatgttttcgatggtactaaaaaagaagcatatttaccagatgataaaacaaatccacttaatcaatatggaattgctaaattagcaggagaaaaagttgctttagaaaaaaatagccaaacttatgttattcgtacttcatgggtgtttggtaaatatggtaataattttgtatacagtatgcttaaactagctgaaacgcataaagaactaaaagtagtaaatgatcaattaggtcgcccaacatacacatatgatttagctgacttcattcgttttgttattgagaagaatccggcatatggtatttaccaattctctaatagtggaactgcgacatggtttgagtttgcaacagaaattttgaaagataaagatgttactgtgaatccatgtacttcagatgaatttccacaaaaagctgaacgtccaaaaacatctattatgagtttggaaaaagtagagaaactaggttttaacattccaacttggcaagatgctttagttcgttttaaaaaataa

SEQ ID NO: 49613 - protein, 276 aa, Listeria monocytogenes EGD-e
MSILVTGANGQLGTELVQLLKEHNLTVTEWDKDSVDIVDKAAVKKAMLDLKPEWIIHCAAFTNVEAAEDELKNVNWEVNVDGTENISEAAEIVGAKLVYISTDYVFDGTKKEAYLPDDKTNPLNQYGIAKLAGEKVALEKNSQTYVIRTSWVFGKYGNNFVYSMLKLAETHKELKVVNDQLGRPTYTYDLADFIRFVIEKNPAYGIYQFSNSGTATWFEFATEILKDKDVTVNPCTSDEFPQKAERPKTSIMSLEKVEKLGFNIPTWQDALVRFKK

SEQ ID NO: 49614 - DNA, 885 bp, Nostoc sp. PCC 7120
  CDS (1)..(885): transl_table=11
atgaatgaaccaatcctactactaggtagcaacggtcaagtaggtcaagaaatccaaaatctccttgcacctagatacaaaattatctcagtcgcacgaccaaggatagacctgactcaagccgatagtctgcgtcaaatcatcagagaagtccaaccacagataattattaacgccgccgcttacactgctgtagacaaagccgaaactgaacccgaaatagctacagctatcaatgctacagcaccccaaattatcgccgaagaaagccaaaaactcggctcgttcttaattcacatatccacagattacgtttttgatggtcagcaaagtcacccttaccaagaaactgaccccactaaccccttaagtgtttatggtaagaccaaactagccggagaaatagccattcaacaaactcaccctcatcacattattctgcgtacagcttgggtttatggcagttttggtaaaagtaactttgtcaaaaccatgctgcgactgggtgcagaacgccaagaaattcgggtagtaaaagatcaaattggctcccctacttgggcgcaagatatcgctgacaccatagcccaagtgataccccaaataccagaaatttctgggacttaccactacacaaatactggtgtaattagctggtacgaatttgctgttgctatttttgcagaatctcaaaaactaggttttcctctcacagtccaacaaattattcctattaccaccgccgaatatccgactttagctccccgtcctgcctattctgtcctggcttgtgagaagatgtcacaagttctgggaactgctccccctcattggcaacaaagactgcggttgatgctgcaagactggctctccaaatattcttga

SEQ ID NO: 49615 - protein, 294 aa, Nostoc sp. PCC 7120
MNEPILLLGSNGQVGQEIQNLLAPRYKIISVARPRIDLTQADSLRQIIREVQPQIIINAAAYTAVDKAETEPEIATAINATAPQIIAEESQKLGSFLIHISTDYVFDGQQSHPYQETDPTNPLSVYGKTKLAGEIAIQQTHPHHIILRTAWVYGSFGKSNFVKTMLRLGAERQEIRVVKDQIGSPTWAQDIADTIAQVIPQIPEISGTYHYTNTGVISWYEFAVAIFAESQKLGFPLTVQQIIPITTAEYPTLAPRPAYSVLACEKMSQVLGTAPPHWQQRLRLMLQDWLSKYS

SEQ ID NO: 49616 - DNA, 918 bp, Ralstonia solanacearum GMI1000
  CDS (1)..(918): transl_table=11
atgcagcataaggcgcaccctgttccgaagctgctggtcacgggaagcaacggccaggtcggctttgagctgcgccgcagcctggcgcccctgggcgaggtgatcgcgctggaccgggccgcctgcgacctgacccggcccgatgcgctgcgccggctggtgcgcgagcaccgccccgacgtgatcgtcaacccggcggcctacactgctgtcgacaaggccgagaccgatgccgaaacggcattcgccgtcaacggcatggcggccggtgtcctggccgaggaagcccgcgcgctgggcagcctgctggtgcactacagcaccgattacgttttcgacggcagcaaggccgccgcctacgtcgagaccgatgcggtcaacccgcagtccgtctacggcaagagcaagctcgcgggcgagcaggcgatcgccgcctcgggcgcggcggcgctggtgctgcgtacctgctgggtggccggcgcgcacggcggcaatttcgccaagacgatgctcaagctgggccgcgagcgggacagcctgcgcgtgatcgccgaccagttcggcgcgcccaccacggccgcgctgatcgccgacgtgaccgcgcagatcgtcgcgcgcttctggctgtcgggcgatcgcgccgcatttccgggcggcctgtatcacctggccgcggcgggcgagacgacctggcacggctatgccacggccgtgctgcgctatgccaaggtgcgcggactggagctgaaggtcgaccccgagcgcatcgaagccattccggcgacggcgtatccgctgcccgcgccgcggcccgccaactcccgcatggacaccggcaagctcactgaaacgttcggcatccacctgccggactggcagcagggtgtccatctcctgctggaccagatcttttcctga

SEQ ID NO: 49617 - protein, 305 aa, Ralstonia solanacearum GMI1000
MQHKAHPVPKLLVTGSNGQVGFELRRSLAPLGEVIALDRAACDLTRPDALRRLVREHRPDVIVNPAAYTAVDKAETDAETAFAVNGMAAGVLAEEARALGSLLVHYSTDYVFDGSKAAAYVETDAVNPQSVYGKSKLAGEQAIAASGAAALVLRTCWVAGAHGGNFAKTMLKLGRERDSLRVIADQFGAPTTAALIADVTAQIVARFWLSGDRAAFPGGLYHLAAAGETTWHGYATAVLRYAKVRGLELKVDPERIEAIPATAYPLPAPRPANSRMDTGKLTETFGIHLPDWQQGVHLLLDQIFS

SEQ ID NO: 49618 - DNA, 894 bp, Agrobacterium tumefaciens str. C58
  CDS (1)..(894): transl_table=11
atgcggctggcagttaccggcagaaacggacaggtcgtgagcgcccttcaagctttggcgggcgcagatcttgaaatcgtgaccttaggaagacccgaactcgatctcgtgcggccggagaatgtcctgcaggcgcttcgtgaggccaagccagatgtcgtggtatcggctgccgcctacaccgccgtcgacaaggcagaaagcgagccggacatcgcttttgccgtcaatcgggatggagcaaaggcggtcgcgcaggcggcaaaagaacttggcgttcccgtcattcatctttccacggactatgttttcgacggcagcaaggccacggcttatgtggaaagtgatccgacaggtcctacttctatttacggacgctcaaagctcaagggcgaaagagccgtttcggaggcaaccgacaattatgtggtattgcggacggcatgggtctactcggaatatggcaataacttcgtgaaaaccatgctcaaactgagcgagagtcgcgacgagattaatgtggtcgcggaccagttcggatgccctacctcagccaccgatattgctgctgcggtggtagcaattgcaagaaagctcgtggaagattcctccgcttctcttcgtgggatttttcatctgtctggaacaggcgaaacgacctgggcgaattttgcgaaacagatattcgcattttcagcggaaaacggcggaaagtcgatgatcgtcaacgacatcacgactaagcaatacccaactccggccccacgcccggcaaactcgcggcttaactgtaggaagctagaagagatttacggactaaagcttcccagttggcaaacatcaactcgcgaggtggtcaccgctcttgcgcagaccaaaaaggaaaagtcatga

SEQ ID NO: 49619 - protein, 297 aa, Agrobacterium tumefaciens str. C58
MRLAVTGRNGQVVSALQALAGADLEIVTLGRPELDLVRPENVLQALREAKPDVVVSAAAYTAVDKAESEPDIAFAVNRDGAKAVAQAAKELGVPVIHLSTDYVFDGSKATAYVESDPTGPTSIYGRSKLKGERAVSEATDNYVVLRTAWVYSEYGNNFVKTMLKLSESRDEINVVADQFGCPTSATDIAAAVVAIARKLVEDSSASLRGIFHLSGTGETTWANFAKQIFAFSAENGGKSMIVNDITTKQYPTPAPRPANSRLNCRKLEEIYGLKLPSWQTSTREVVTALAQTKKEKS

SEQ ID NO: 49620 - DNA, 885 bp, Clostridium perfringens str. 13
  CDS (1)..(885): transl_table=11
atgaaaatattaataacaggttcaaatggacaattaggaaatgaacttcaatcaataataaaaagtggaaaagcagaaataggttcagttagtgaaaatataaaaaactcagaagttattgctttagatgttgataaattagatataactagcttagaaaatgttaaaaatgtacttaatgaagaaaaaccagatgtagtaataaactgtgcagcggcaacaaatgttgacggatgtgaaagtaatgaagattttgcatttaaagttaattctttaggagcaagaaatttagctatggtttgtgaagaaattggagctaaattagttcaagtttcaacagattatgtatttagtggttttggtgaaaaaccattaactgagtttgatttaactgcaccttatagtgtttatggaaaaacaaaacttttaggtgaaaattatgttaaagagttttgttcaaaatattatatagttagaaccgcttggttatatggatatgtgggacataactttgtttacacaatgatgagacttggaaaagaaaaagaatcattaaatgtagttaatgatcaaaaaggaaatccaactcacgcaaatgatttagcatatcatatattaaagcttatagaaacagaagaatacggaatataccattgtacaggaaaaggggaatgtacttggtatgattttgctaaagaaataatggagttagctggcaataagtgcattgttaacccatgtacttcagaagaatataaaacaccagctaaaagaccagaatattcatcattagataatatgatgcttagatgtacaattggtgatgaaatgagagattggaaggaagctttaaaaagcttttttgaaaatcaacaaaatcaataa

SEQ ID NO: 49621 - protein, 294 aa, Clostridium perfringens str. 13
MKILITGSNGQLGNELQSIIKSGKAEIGSVSENIKNSEVIALDVDKLDITSLENVKNVLNEEKPDVVINCAAATNVDGCESNEDFAFKVNSLGARNLAMVCEEIGAKLVQVSTDYVFSGFGEKPLTEFDLTAPYSVYGKTKLLGENYVKEFCSKYYIVRTAWLYGYVGHNFVYTMMRLGKEKESLNVVNDQKGNPTHANDLAYHILKLIETEEYGIYHCTGKGECTWYDFAKEIMELAGNKCIVNPCTSEEYKTPAKRPEYSSLDNMMLRCTIGDEMRDWKEALKSFFENQQNQ

SEQ ID NO: 49622 - DNA, 1362 bp, Corynebacterium glutamicum ATCC 13032
  CDS (1)..(1362): transl_table=11
atggaatacggtaaacaactcacctcccacaccaccgacatcgaaggcctactggttttcgatttccccgtccacggcgacaaccgcggctggttcaaggaaaattggcagcgcaccaagatgaccaacctggggctgcccgattttggccccgtccaaaacaacatgagtttcaacgccaccgccggcacgactcgcggcatgcacgctgagccgtgggataaatttgtgtccgtcgcggtgggttccgttttcggagcttgggtggatctgcgcgcgggctcgagcacgtacggtaacgtcgtaacgcaaaaaattacccctgacgtgggagtttacgtcccgcgtggtgtggcaaacggcttccaggcgctcgaggacggcacgctgtacacctacctcgtcaacgatcattggtcccccgacgcgcattacgccaacgtcaacctcaacatgatcgactggccgctgcccatcaccgagatctccgaaaaagataaaaaacatccagcgcttatcgacgccacccccctgcccgcccgcaaggttctcgtggtcggcgccggcggacaactgggaaccgcgctacgcgcgcagttcccagacgcggaatttgtcacgcgccaagaactcgatatcacctcagatctcaccgaggctcgcgcgtggaaacaatactccaccatcataaacgccgccgcctacactgccgttgaccaggcagaacacgaccgcgcagcagcgtgggacatcaacgcagcggcagtggctaacctcgcgaccatcgcgcgcgacaacaacctcaccctcgtgcacgtgtcctcagattatgtcttcgacggtgcggccgaatcctacgatgaaaacgcaccgttttccccactcggcgtgtacggccaatccaaagcagccggcgacatcgcagccaccaccgcaccgcgccactacattgtgcgcaccagctgggtgattggcgatggcaataattttgtccgcaccatgaaatccctcgacgaacgcggcatcgcaccatcagtagttgatgatcaaatcggccgcctatccttcaccgaagacatcgcagccggcatcgcgcaccttttggaagtgggtgcagcatatggcacctacaacctcaccaacaccggcgaacccgcaagctgggccgatgttgcccgcgcagtattttccgaccccaccaaagttaccggcgtgagcaccgccgagtacttcgccaacaaagacgcagcgccccgcccactgaactccgttttggatctcggcaaaatcgaagccaccggatttagcgcaccgacctggcagacccgcctcaacgactacctcaaggaactctcaaagtga

SEQ ID NO: 49623 - protein, 453 aa, Corynebacterium glutamicum ATCC 13032
MEYGKQLTSHTTDIEGLLVFDFPVHGDNRGWFKENWQRTKMTNLGLPDFGPVQNNMSFNATAGTTRGMHAEPWDKFVSVAVGSVFGAWVDLRAGSSTYGNVVTQKITPDVGVYVPRGVANGFQALEDGTLYTYLVNDHWSPDAHYANVNLNMIDWPLPITEISEKDKKHPALIDATPLPARKVLVVGAGGQLGTALRAQFPDAEFVTRQELDITSDLTEARAWKQYSTIINAAAYTAVDQAEHDRAAAWDINAAAVANLATIARDNNLTLVHVSSDYVFDGAAESYDENAPFSPLGVYGQSKAAGDIAATTAPRHYIVRTSWVIGDGNNFVRTMKSLDERGIAPSVVDDQIGRLSFTEDIAAGIAHLLEVGAAYGTYNLTNTGEPASWADVARAVFSDPTKVTGVSTAEYFANKDAAPRPLNSVLDLGKIEATGFSAPTWQTRLNDYLKELSK

SEQ ID NO: 49624 - DNA, 855 bp, Streptococcus pyogenes MGAS8232
  CDS (1)..(855): transl_table=11
atgattttaattacaggaagcaatggtcaattagggacagaacttcgatacttattagatgaacgaagtgttgattatgtagccgttgatgtcgcagaaatggacatcacaaatgaagacaaagtcgaagctgtttttgcgcaggtcaagccaacattggtctatcattgtgctgcttatacggcagttgatgcagcagaagacgaaggaaaagccttgaatgaggctattaatgtaacaggctcagaaaatattgccaaggcttgtggaaaatatggggctacccttgtttatatttcaacagactacgtatttgatggcaataaaccagtcggtcaagaatgggtagaaacagatcgtccagaccctaagacagaatatggccgtacaaaacgtttaggagaactagctgttgaaggatacgcagagcatttttatattatccgtactgcttgggtatttggaaattatggtaaaaactttgtctttaccatggagcagttagcagaaaatcactcccgtttgactgttgtcaatgaccaacacggtcggccaacgtggacaagaaccttggcagaattcatgtgttatttgacagagaatcaaaaagcctttggttactatcacttgtcaaatgatgctaaggaagacaccacttggtatgattttgccaaagaaatcttaaaagacaaggctgttgaagtggtgccagttgattcatcagctttcccagcaaaagccaaacgtcctttaaattcaaccatgaatcttgataaggcaaaagcaacagggtttgttattccaacatggcaagaagccttgaaggcattttaccaacaaggactgaaaaagtaa

SEQ ID NO: 49625 - protein, 284 aa, Streptococcus pyogenes MGAS8232
MILITGSNGQLGTELRYLLDERSVDYVAVDVAEMDITNEDKVEAVFAQVKPTLVYHCAAYTAVDAAEDEGKALNEAINVTGSENIAKACGKYGATLVYISTDYVFDGNKPVGQEWVETDRPDPKTEYGRTKRLGELAVEGYAEHFYIIRTAWVFGNYGKNFVFTMEQLAENHSRLTVVNDQHGRPTWTRTLAEFMCYLTENQKAFGYYHLSNDAKEDTTWYDFAKEILKDKAVEVVPVDSSAFPAKAKRPLNSTMNLDKAKATGFVIPTWQEALKAFYQQGLKK

SEQ ID NO: 49626 - DNA, 810 bp, Methanosarcina mazei Go1
  CDS (1)..(810): transl_table=11
atggtggtgggaaccattaaaacgctgatcatcggctccagcgggatgctcgggtcagacctgtgcaaagtctttcccgatgctgttaaactgacacaccatgacctcgacatcacagacagagagcaggttattgaatccattttaaaaataaaacctgatgttgtaataaacgcagcagcctacaccaatgtggacggctgtgaagacaacaaggaacttgcgttccaggtcaacggatccggacccggatacattgcagaagcctgcgccagagcaggtgcaaaactcgttcatttcagtactgattatgtttttgacggctccaaaaaagagtatgtggagtctgacatcccggatccgattaatgtatacggtgattcaaaacttctcggtgaaaagaagatcatcgagaatatggatgattacaggattgtaagaatttcctggctttttggaatacatgggaaaaatttcgttgaaaccatgctgaaactatcaggagaaatggataccgtaaaggttgtcaatgaccagttcggcaaacccacctacacaatggaccttgccagaaaagtaaaggaaataattgaactcgaacccggaatttatcatattacaaatgatggaatctgttcctggtacgaatttgcctcttctattatcgataatgttattccgtgcaccagtgaagaatttcaaaggaaagcaaaacgtccaatgtattcagttcttgtgaatactaaaaccggacccatgagacactggagagaagcacttaaggactatttgcaggggagaaatatatga

SEQ ID NO: 49627 - protein, 269 aa, Methanosarcina mazei Go1
MVVGTIKTLIIGSSGMLGSDLCKVFPDAVKLTHHDLDITDREQVIESILKIKPDVVINAAAYTNVDGCEDNKELAFQVNGSGPGYIAEACARAGAKLVHFSTDYVFDGSKKEYVESDIPDPINVYGDSKLLGEKKIIENMDDYRIVRISWLFGIHGKNFVETMLKLSGEMDTVKVVNDQFGKPTYTMDLARKVKEIIELEPGIYHITNDGICSWYEFASSIIDNVIPCTSEEFQRKAKRPMYSVLVNTKTGPMRHWREALKDYLQGRNI

SEQ ID NO: 49628 - DNA, 909 bp, Xanthomonas campestris pv. campestris str. ATCC 33913
  CDS (1)..(909): transl_table=11
gtgaccacgctggtgttcggtgcgaacgggcaggtaggggcggaactgctacgcgcattggctgccgatggcgcggtgcaggcgacgacacgcagtggccgattgcctgatggtagcgcgtgcgagaccgcagacttcgacgcaccggaaactttgccagccttgctggaccagattggcccgtcgcttgtcgtcaatgctgcggcctacacggcagtggatcgcgccgagcaggatcgcgtcagcgcgatgcgggcgaatgcgcaggcacctttgaccattgcggcatggtgtgccgcccgtgacgtgccgctggtgcattactcgaccgattacgtcttcgacggccagggcaccgccccctatcttgaggatgcccaaacctcgccgctaggcgtgtatggcgaaaccaagctcgctggtgagaacgccatccgtgcttccggcgcgcagcatctgatcctgcgtacggcatgggtgtacgcatcgcacggcgggaatttcctgcgcaccatgttgcgtgtcggcgccgagcgcgacgagctacgcgtggtggccgatcagatcggaacgccgacgccggcggcgttgatcgccgatatcactgcacagttgcttcggcaacgcaccgccgaaacatcgggtacctggcatctcactgctgcagggcagaccagctggcatggctttgccgaggcgatcttcgaagaggctgtgagcgcaggactgctgccgcgtgcgccgcgcgtggtaccgatcaccaccgcagactatccgacccctgcgaagcggccggcgtattcgcggttgtcgatcgagaaactgcagcgcgatttcgacatcgtgctgccggaatggcgacctggcttgcagcgcgtgattgccgaagtcgccgctgccagacagtaa

SEQ ID NO: 49629 - protein, 302 aa, Xanthomonas campestris pv. campestris str. ATCC 33913
MTTLVFGANGQVGAELLRALAADGAVQATTRSGRLPDGSACETADFDAPETLPALLDQIGPSLVVNAAAYTAVDRAEQDRVSAMRANAQAPLTIAAWCAARDVPLVHYSTDYVFDGQGTAPYLEDAQTSPLGVYGETKLAGENAIRASGAQHLILRTAWVYASHGGNFLRTMLRVGAERDELRVVADQIGTPTPAALIADITAQLLRQRTAETSGTWHLTAAGQTSWHGFAEAIFEEAVSAGLLPRAPRVVPITTADYPTPAKRPAYSRLSIEKLQRDFDIVLPEWRPGLQRVIAEVAAARQ

SEQ ID NO: 49630 - DNA, 900 bp, Xanthomonas axonopodis pv. citri str. 306
  CDS (1)..(900): transl_table=11
atgaccacgctggtactgggagccaatggacaggtcggcacggaattgctgcgggcattggcagccaatggcccgatcctgggtagcacccgcagtggtcggttgccggatggtgcagcgtgtgaggtagccgactttgacgcaccgcatcgcctgagcgaattgctggatcgcttgcagccaagttgcgtcgtcaacgcagccgcctacacggccgtcgatcgtgccgagcaggagcgtgatgcggccttccgcgccaatgccgaagcgcctggcgtgatagcgcaatggtgcgcgcgcgccgatgtgcccctggtccattactcgaccgactatgtcttcgatgggcagggcacgcgcccctatcggccggacgatgccaccgcgccgctcggcgtgtacgggcaaagcaaactggcgggcgagcaggcagtgcaggcggccggcggccgtcatctgatcttccgcactgcctgggtctacgcggcgcatggacacaatttcctgcgcacgatgctgcgcgtgggcgccgagcgcgatgtgctgcgcgtggtcgccgaccagatcggcacgccaacgccagcggcgttaatcgccgacatcacggcgcacgcgctccgccagccgggcgaaccctccggcttgtggcatctgactgccgccgggcagaccacctggcacggtttcgccgaagccatcttcgcgcaggcgcgcgcgcgcggcctgctcgcccgcacgccgcgcgtggaggcgatcggcaccgccgactatcccacgccggccacgcgcccggcctattcgcgactggatacccacagcctgcaggacaccttcggcgtccgcctgccggactggcaggatggactgagccaggtgctggacacgctcgcccaacggtga

SEQ ID NO: 49631 - protein, 299 aa, Xanthomonas axonopodis pv. citri str. 306
MTTLVLGANGQVGTELLRALAANGPILGSTRSGRLPDGAACEVADFDAPHRLSELLDRLQPSCVVNAAAYTAVDRAEQERDAAFRANAEAPGVIAQWCARADVPLVHYSTDYVFDGQGTRPYRPDDATAPLGVYGQSKLAGEQAVQAAGGRHLIFRTAWVYAAHGHNFLRTMLRVGAERDVLRVVADQIGTPTPAALIADITAHALRQPGEPSGLWHLTAAGQTTWHGFAEAIFAQARARGLLARTPRVEAIGTADYPTPATRPAYSRLDTHSLQDTFGVRLPDWQDGLSQVLDTLAQR

SEQ ID NO: 49632 - DNA, 879 bp, Chlorobium tepidum TLS
  CDS (1)..(879): transl_table=11
atgaatattcttgtcaccgggagccgtgggcagcttggttccgaactgcaaaaactgcaagaagtgcatggctggcaggagtggtttttcatggatctgccggaactcgacattaccgatgcgctggcggtggagcgtgtttgccgggatcgacggattggcgcgattgtcaactgtgcggcctatacggcggtggacagggctgagagcgatgcggaagcagcgttcagagtgaaccgtgacggcgcggcggtgctggccgcggttgcaatggaggttggcgcactgttgctgcatgtttcgaccgattatgttttcgatggcagctcgaaccgaccttattgcgaggatgacccggttgcgccttgcggtgtttatggcctgtccaaatgggagggtgaagaggcgatccgggcgagcggctgctcgtatatcattctacgcaccgcctggctctactcggtttacgggcagaacttcgtgaagactatgcttcgtcttggtagcgagcgccagtcgctcggcgttgtgtttgatcaggtgggcagtccgacatgggcggcggatctggccgggacgatcgtttcgatactcgaccaatgcgatccggttcggagctacagcgagacttttcactactcgaatgaaggagtctgttcctggtacgactttgccaaatcgattatggatgccgaagggctttcgtgcaaggtgttgccaatcgagagcagtaactatccgacgccagccagaaggccgcatttcagtgtgctgaacaaacgaaaaatcaagagtacattggggcttgaaatcccgtactggcacgacagtctgttgcggatgctgacagagttgcggaagacggctggcaaatcgtaa

SEQ ID NO: 49633 - protein, 292 aa, Chlorobium tepidum TLS
MNILVTGSRGQLGSELQKLQEVHGWQEWFFMDLPELDITDALAVERVCRDRRIGAIVNCAAYTAVDRAESDAEAAFRVNRDGAAVLAAVAMEVGALLLHVSTDYVFDGSSNRPYCEDDPVAPCGVYGLSKWEGEEAIRASGCSYIILRTAWLYSVYGQNFVKTMLRLGSERQSLGVVFDQVGSPTWAADLAGTIVSILDQCDPVRSYSETFHYSNEGVCSWYDFAKSIMDAEGLSCKVLPIESSNYPTPARRPHFSVLNKRKIKSTLGLEIPYWHDSLLRMLTELRKTAGKS

SEQ ID NO: 49634 - DNA, 915 bp, Thermosynechococcus elongatus BP-1
  CDS (1)..(915): transl_table=11
gtgaatcaaggagggcaaaagatgcgcctactcattttgggggcaacgggacaggtgggctggcaattggtgcagcaggcaccccctagggttgaagtgattcccgttgctcgccaaggcaccgccgtcaccctggacctggaagatttagatgctatttctcccttgctgaaaacccttcgccccgatgtggtcatcaatgcggcagcctatactgcggtggatcaggcggaacaggaaaccgagcgggcacaacggattaatagcaccgccgttggcctcttggcagcaaccatggctgagctaggagggttgctgattcactactccacagactatgtctttgcgggcaatcaatccctgccctatcgcgaaaccgatgcccctgcccccctcaatgcctatggctacactaagtggctaggggagcaggcgatcgcccgccatcaccccgcccacctgattttgcgcaccagttgggtttatgacctgcgggggaagaactttctgcggacaatggttcgccttgcccaaacccgtcctttggtgcgggtggttgccgatcaaatcggtacgcccacggctgctcccttcattgcccaagtcacctatcaactgctggaacactggcaggcgactccctccctcagtggcctctatcacctgacaccccgaggcagcacgagttggtatggcttcgcagcaaaaattttcgatcacctgcgggccaagggctatgccgccgccaccctggaggcgattcccagcagtgagtatcccacacgggccaagcgacccgccttttccaccctcaactgcgagaagttggagaccgttcttgggactcccctccccccttgggaagcggtccttgaaccacttttgcagcaattggatcctcaatccgttctttag

SEQ ID NO: 49635 - protein, 304 aa, Thermosynechococcus elongatus BP-1
MNQGGQKMRLLILGATGQVGWQLVQQAPPRVEVIPVARQGTAVTLDLEDLDAISPLLKTLRPDVVINAAAYTAVDQAEQETERAQRINSTAVGLLAATMAELGGLLIHYSTDYVFAGNQSLPYRETDAPAPLNAYGYTKWLGEQAIARHHPAHLILRTSWVYDLRGKNFLRTMVRLAQTRPLVRVVADQIGTPTAAPFIAQVTYQLLEHWQATPSLSGLYHLTPRGSTSWYGFAAKIFDHLRAKGYAAATLEAIPSSEYPTRAKRPAFSTLNCEKLETVLGTPLPPWEAVLEPLLQQLDPQSVL

SEQ ID NO: 49636 - DNA, 855 bp, Streptococcus agalactiae 2603V/R
  CDS (1)..(855): transl_table=11
atgattttaattacaggggcaaacgggcaattaggtagtgaattacgtcaccttttagacgaacgaactcaagagtatgttgctgttgatgtagctgaaatggatattacaaatgccgagatggtggacaaagtctttgaagaggtgaagccatctttagtttaccattgtgcagcttacacagctgttgatgcggcagaagatgaaggaaaagagctagactttgcaatcaatgtcactggtacagagaatgtcgctaaggctgctgctaaacatgatgcaacacttgtttacatttcgacggactacgtgtttgatggtgaaaaaccagtggggcaagaatgggaagtagatgatctgcctgatcccaaaacagagtacggtcgtacaaaacgtatgggtgaagagttagttgaaaaatatacttcaaaattctataccattcgcacagcgtgggtatttggtaactatggtaaaaactttgtctttacgatgcaaaaccttgcaaaaacacacaaaactctaactgttgttaacgaccaacatggacgaccaacatggacacgtactttggctgagtttatgacttatttagctgaaaatcaaaaagattttggttactatcatttatcaaatgatgctaaagaagatacaacatggtatgattttgcggttgaaatcttaaaagacacagatgtggaggttaagcctgttgattctagtcaattcccagcaaaagcaaaacgtcctttaaattcaactatgagtttggaaaaagcgaaagcaacaggatttgtgattcctacttggcaagatgctttaaaagagttctacaagcaggaagttaaaaaataa

SEQ ID NO: 49637 - protein, 284 aa, Streptococcus agalactiae 2603V/R
MILITGANGQLGSELRHLLDERTQEYVAVDVAEMDITNAEMVDKVFEEVKPSLVYHCAAYTAVDAAEDEGKELDFAINVTGTENVAKAAAKHDATLVYISTDYVFDGEKPVGQEWEVDDLPDPKTEYGRTKRMGEELVEKYTSKFYTIRTAWVFGNYGKNFVFTMQNLAKTHKTLTVVNDQHGRPTWTRTLAEFMTYLAENQKDFGYYHLSNDAKEDTTWYDFAVEILKDTDVEVKPVDSSQFPAKAKRPLNSTMSLEKAKATGFVIPTWQDALKEFYKQEVKK

SEQ ID NO: 49638 - DNA, 849 bp, Oceanobacillus iheyensis HTE831
  CDS (1)..(849): transl_table=11
ttgtggtttacaatgagatttctgattacaggttgtgagggtcaacttgggaaagcgttcatttccaagttaggtcttggtattaacataaagcgcctctcaaaaaaagagatggatataaccgatccaattaaaattgaacaacaaatacaatcctttcaaccagactacgttatccatactgctgcatatacagcagttgatcttagcgaaaaacacccaattcttgctctacaagtaaatgcgattgggacattacatcttgctcgtgcttgtaaaaaatacggagcaaagcttgttttttttagttctgattacgtatttgatggagaaaaaaacaccccttatattgaatccgatcgtccaaatcccaaaaataattatggtttaagtaagtggctagcagaggagtttattctacaaacattaccagagagttatattatacgaacatcatggttgtttggggatggcgaaaataactttgttaatacgattaaaaaaaatgcctacaaaagaaaaccattaaaagttatcaatgatcaaattgggagtccgacctatacctatgatttagttgaagcttgcataccattgctgcaacttccttttggtatttaccatatacgaaatgatggtatttgtagttggtactcctttgcacaaacaatttatgaggaatgcggaactgacccaactttaattacacctgttacgtctaaggaatataaaactctagcaaagagaccgagttactctgttttaagtatgaataagctgaaatcctctggaactaaactccctcgtttttggaaagaagccctttgtaactttattaataaggagtag

SEQ ID NO: 49639 - protein, 282 aa, Oceanobacillus iheyensis HTE831
MWFTMRFLITGCEGQLGKAFISKLGLGINIKRLSKKEMDITDPIKIEQQIQSFQPDYVIHTAAYTAVDLSEKHPILALQVNAIGTLHLARACKKYGAKLVFFSSDYVFDGEKNTPYIESDRPNPKNNYGLSKWLAEEFILQTLPESYIIRTSWLFGDGENNFVNTIKKNAYKRKPLKVINDQIGSPTYTYDLVEACIPLLQLPFGIYHIRNDGICSWYSFAQTIYEECGTDPTLITPVTSKEYKTLAKRPSYSVLSMNKLKSSGTKLPRFWKEALCNFINKE

SEQ ID NO: 49640 - DNA, 1443 bp, Bifidobacterium longum NCC2705
  CDS (1)..(1443): transl_table=11
atggatttcgaaaaagatctgagggctgtggagacgaacatcccgggcttgatcgtgttcgacctgccggtgcatggcgacaaccgtggctggttcaaggagaactggcagcgggcgaagatgaccgcgctcggcctgccggatttcggtccggtgcagaacaacatcagcttcaacgcgaagaagggcgtgacgcgaggcatccacgcggaaccgtgggacaagtacatctcgatcgccacgggcagcgtgttcggcgcgtgggtggacctgcgccccggcgactcgttcggccaggtgtacacgaccgtattggatccatcgaaggcgatctacgtgccgcgtggcgtgggtaacagcttccaggcgttggaggacggcaccgcgtacacgtatctcgtgaacgcgcattggagtctggagcagaagaagacatacacgttcgtgaacctcgccgacccggacctgaacatccagtggccgatcccgctggaggactccgaacgctccgaagcggacctgcaccatccgatgctcagggacgccaagcccatggccccgcgccgcacgatggtcaccggctgcaacggccagctcggccgcgcgatccgcgcctacgtggacgcgcatggtttggagggtttcgagttccacgacatcgacacgttcgacttctccgacccggcccagtacgaccggttcgactggtcgctgtacggcacggtcatcaacgcgggcgcgtacaccgcggtcgacaaggcggagaccccggaggggcgcgtgctggcgtggaaggcgaacgcacagggccctgccctgctcgccaaagtcgcccgcgagcacaacatcaccctggtgcacgtgtcgagcgattacgtgttcgacgggaccgccgaattgcatgacgaggaggaggcgttcgcgccgttgggcgtgtacgggcagtcgaaggccgcgggcgacatcgcggtcgcgaactgtccgcgccattacatcctgcgttcgagctgggtgatcggtgagggccataacttcgtgaagaccatgatgggcctgtccgacagggtcgcgaagggcgaattgccggaggtgacggtggtggacgaccagtacggccgcctcacgttcaccaaggacatggccgaggcgatcttccacctgttcgacggcggcgcggcgtacggcacgtacgacctgaccggttccgggactgtgaagagttgggcggacatcgcgcgcacggtattcgatctgacgaacggcaacggtgggaaggtcaagccgatctcgaccgcggagtatttcgcgaacgcgaaggcgccggtgagccctcgtccgacgtattccgcgctggacctggccaagatcgaggccacgggcctggacgtgcctgattgggaggagtccctgaaggcatacgtcaccaaggaactcaagaagtag

SEQ ID NO: 49641 - protein, 480 aa, Bifidobacterium longum NCC2705
MDFEKDLRAVETNIPGLIVFDLPVHGDNRGWFKENWQRAKMTALGLPDFGPVQNNISFNAKKGVTRGIHAEPWDKYISIATGSVFGAWVDLRPGDSFGQVYTTVLDPSKAIYVPRGVGNSFQALEDGTAYTYLVNAHWSLEQKKTYTFVNLADPDLNIQWPIPLEDSERSEADLHHPMLRDAKPMAPRRTMVTGCNGQLGRAIRAYVDAHGLEGFEFHDIDTFDFSDPAQYDRFDWSLYGTVINAGAYTAVDKAETPEGRVLAWKANAQGPALLAKVAREHNITLVHVSSDYVFDGTAELHDEEEAFAPLGVYGQSKAAGDIAVANCPRHYILRSSWVIGEGHNFVKTMMGLSDRVAKGELPEVTVVDDQYGRLTFTKDMAEAIFHLFDGGAAYGTYDLTGSGTVKSWADIARTVFDLTNGNGGKVKPISTAEYFANAKAPVSPRPTYSALDLAKIEATGLDVPDWEESLKAYVTKELKK

SEQ ID NO: 49642 - DNA, 921 bp, Leptospira interrogans serovar Lai str. 56601
  CDS (1)..(921): transl_table=11
atgatttattatactggaaaaaacggtcagttaggttgggaattggccgaaagatttaaatctaatggattggaagcagtaggatttggtagggaagaatgggatcttgcagatcttgattctgccgcacgaattttgaaggattctcctcggattttagttcattgtggagcttatactgcggtagataaggcagagtccgactcagagaacgcttacaaaatcaattcgttatctgtaaaaaaaatttcggaagaatgtctaaaaagaaaaatccatttaatttatgtatccactgattttgtgtttgatgcaaactcggaaacgatcggtgatacgattcgtttttggaaaccggattctacactttctccaaaaggaatctacggattatcaaaggcggaaggggaaaagtggattcgaaatacatttgtagattctaaacaagcaaatatagttcgtaccagttgggtatattcctctcatggaaataattttccaaaaacaattgtgaaacttttacaagattccaatcgtcatgaattaagagtgatcgaagatcaattgggaagacctacttgggctggtaggcttgcggattttataatattcttaatttatggaattctaaaaggagaatcttatcctgagattctacatttttctaactcaggagttgcgagctggtacgattttgcacttgcggttcgggatttttcacattctttttcattgatagaaaatttgaagccgatttatccaattcctacggaaggttatccaacacctgcacctaggcctagatattcaattttagatttagaagaaactcgaaaaatttttggcgttgttccgcattggagagaggatttaaccctttgtctgaaagaacttgccgaagtttccggaaaaaaagtatga

SEQ ID NO: 49643 - protein, 306 aa, Leptospira interrogans serovar Lai str. 56601
MIYYTGKNGQLGWELAERFKSNGLEAVGFGREEWDLADLDSAARILKDSPRILVHCGAYTAVDKAESDSENAYKINSLSVKKISEECLKRKIHLIYVSTDFVFDANSETIGDTIRFWKPDSTLSPKGIYGLSKAEGEKWIRNTFVDSKQANIVRTSWVYSSHGNNFPKTIVKLLQDSNRHELRVIEDQLGRPTWAGRLADFIIFLIYGILKGESYPEILHFSNSGVASWYDFALAVRDFSHSFSLIENLKPIYPIPTEGYPTPAPRPRYSILDLEETRKIFGVVPHWREDLTLCLKELAEVSGKKV

SEQ ID NO: 49644 - DNA, 987 bp, Shewanella oneidensis MR-1
  CDS (1)..(987): transl_table=11
atgcaggatgtcactcccgcgcgaccaacagtcctcttaactggcgcgcacagccaactggcgaaagcattaatccgaacgcatctcaatggtggattagtatttaatctccatccgcttacgcatgcagccttagatatcagcgataaatacagtgtggctgaggtgtttgcgcaggtgaaacccgactgggtgattaactgcgcggcctataatgcggtcgacaaggctgagacggcggtggatgaggcttatcgcgtcaatagcctcggcccagaattattggcaaccgaatgtgcgctcacgggcgcgcggttagtgcatatttccagtgattatgtttttagcggtctgcttacgggagttgaggcaaatgccttaagtgaaactgtgacaccttcaccattatccgtttatggcaagagtaagctcgccggagagcaagcggtgcagcgtatcttgggtgagcgcgcaattgttattcgtaccgcatggctgtacggggtcgatgggcataattttgtgaaaaccatgctgaggttgatggccgccacgcccgatgctcagccgctctttgtgattgacgatcaaattggctcacctacgtgggtcgatgccctcgcgtcgcttatctggcaactgatgctaaggggcgagtcggggctattccattacgctgggcaggggcaatgcagttggtatgaatttgctgctgaaattcagcagcaagcgttggctctgaagttattaaagaaagccgtgcctatcattgccactgatagcctcagttatgccgccaaagcgcttgagaaaggcaatgtgctggcacaaaggccgagttacagcgcgcttaatagcgctaaactacgagatacgctagggaaggataatcttgccgcaatacaatgtcctgaagtttggcaggattggcgagtacaactcaactgcatgcttaacgcccttataacacaaagtgcaaaaccttaa

SEQ ID NO: 49645 - protein, 328 aa, Shewanella oneidensis MR-1
MQDVTPARPTVLLTGAHSQLAKALIRTHLNGGLVFNLHPLTHAALDISDKYSVAEVFAQVKPDWVINCAAYNAVDKAETAVDEAYRVNSLGPELLATECALTGARLVHISSDYVFSGLLTGVEANALSETVTPSPLSVYGKSKLAGEQAVQRILGERAIVIRTAWLYGVDGHNFVKTMLRLMAATPDAQPLFVIDDQIGSPTWVDALASLIWQLMLRGESGLFHYAGQGQCSWYEFAAEIQQQALALKLLKKAVPIIATDSLSYAAKALEKGNVLAQRPSYSALNSAKLRDTLGKDNLAAIQCPEVWQDWRVQLNCMLNALITQSAKP

SEQ ID NO: 49646 - DNA, 921 bp, Shewanella oneidensis MR-1
  CDS (1)..(921): transl_table=11
atggcaaatatcatggtgacgggcgcaaccggattgctcggcagggcggtggttaaacagttaactgccgcagggcatcgggtgatagccaccggctttagctgcgccgaagcgaatatccataaactcgatttaacccaagcgattgcggtagaagcctttattgcccgcgaacggccagaggttatcgtgcactgcgccgcagagcgtcgccccgatgtgtctgagcagtctccggaacaggctttggcgcttaatcttagtgctagccaaaccctagctaaggccgctaaacagcatggagcttggctgctgtatatctcaaccgactatgtgtttgatggcacaacgccgccctatgccgaagatgccgcgcccaatccggttaacttttatggtgagtctaaattacagggcgaaacctgtgtgctgaataccgacagccgttttgcggtattacgtttaccgatactctacggcgaagtgactcaactgagcgaatctgcggtattagtgttaatcaatcaattgttggatagcaggccgcagcgggtcgatgcttgggctattcgttcgcctacctcgacggcggatattgctggcgccatcgctaagttgatcaagcggcagttacatgctgccgatgtgttagggatttatcattttagttcgccgcaaaccatgactaagtaccaaatgctactgagcttaggtgagttattggcgattgacaccgcgcatttaactccagaacttacaccgatggatagcgctaaaaggccgcagaactgcaccttaagttgcgggcgtttagcggcgctgggcatttattctgagttggaatttagcgcagggcttaatcaggcgctcgctcaatccagtgcagcacttgcagctgttggccttaagcttaaggaataa

SEQ ID NO: 49647 - protein, 306 aa, Shewanella oneidensis MR-1
MANIMVTGATGLLGRAVVKQLTAAGHRVIATGFSCAEANIHKLDLTQAIAVEAFIARERPEVIVHCAAERRPDVSEQSPEQALALNLSASQTLAKAAKQHGAWLLYISTDYVFDGTTPPYAEDAAPNPVNFYGESKLQGETCVLNTDSRFAVLRLPILYGEVTQLSESAVLVLINQLLDSRPQRVDAWAIRSPTSTADIAGAIAKLIKRQLHAADVLGIYHFSSPQTMTKYQMLLSLGELLAIDTAHLTPELTPMDSAKRPQNCTLSCGRLAALGIYSELEFSAGLNQALAQSSAALAAVGLKLKE

SEQ ID NO: 49648 - DNA, 855 bp, Streptococcus mutans UA159
  CDS (1)..(855): transl_table=11
atgattttaatcacaggaagtaatggtcaattaggtacagaattacgtcatttacttgatgaacgtaatgaagactatgtggctgttgatgttgcagagatggatattacaaaagctgaaaaagtggatgaagtctttttacaggttaaaccgagtcttgtctaccattgtgcagcctatacagcagttgatgctgcagaagatgaaggtaaagagttggattatgctatcaatgtgacaggaactgaaaacattgctaaggcttgtgagaaatataatgcaactttggtttacatttcaactgattatgtgtttgatggtgaaaagccagttggtcaagaatgggaagtggatgataagccagatcctaagactgagtatggtcggacaaagcgtttaggtgaagaagcagttgaaaaatacgttaagaacttttacatcatccgtacagcttgggtatttggtaattatggtaaaaattttgtttttactatgcaacatcttgctaaaagtcataacagtttaacggttgttaatgatcagcatggtcgtccgacttggacacgaactttagctgaatttatgacttatctggctgaaaatcaaaaagaatatggttactatcatttatcaaatgatgcaactgaggatacgacttggtatgattttgcacttgaaattttaaaggataccgatgttgtcgtaaaacctgttgactctagtcagttccctgctaaagccaaacggccgttaaattcaactatgagtttgacaaaggctaaggcgacaggatttgttattccgacttggcaagaagctttacaagaattttataagcaggatgtcaaaaaatag

SEQ ID NO: 49649 - protein, 284 aa, Streptococcus mutans UA159
MILITGSNGQLGTELRHLLDERNEDYVAVDVAEMDITKAEKVDEVFLQVKPSLVYHCAAYTAVDAAEDEGKELDYAINVTGTENIAKACEKYNATLVYISTDYVFDGEKPVGQEWEVDDKPDPKTEYGRTKRLGEEAVEKYVKNFYIIRTAWVFGNYGKNFVFTMQHLAKSHNSLTVVNDQHGRPTWTRTLAEFMTYLAENQKEYGYYHLSNDATEDTTWYDFALEILKDTDVVVKPVDSSQFPAKAKRPLNSTMSLTKAKATGFVIPTWQEALQEFYKQDVKK

SEQ ID NO: 49650 - DNA, 855 bp, Streptococcus agalactiae NEM316
  CDS (1)..(855): transl_table=11
atgattttaattacaggggcaaacgggcaattaggtagtgaattacgtcaccttttagacgaacgaactcaagagtatgttgctgttgatgtagctgaaatggatattacaaatgccgagatggtggacaaagtctttgaagaggtgaagccatctttagtttaccattgtgcagcttacacagctgttgatgcggcagaagatgaaggaaaagagctagactttgcaatcaatgtcactggtacagagaatgtcgctaaggctgctgctaaacatgatgcaacatttgtttacatttcgacggactacgtgtttgatggtgaaaaaccagtggggcaagaatgggaagtagatgatctgcctgatcccaaaacagagtacggtcgtacaaaacgtatgggtgaagagttagttgaaaaatatacttcaaaattctataccattcgcacagcgtgggtatttggtaactatggtaaaaactttgtctttacgatgcaaaaccttgcaaaaacacacaaaactctaactgttgttaacgaccaacatggacgaccaacatggacacgtactttggctgagtttatgacttatttagctgaaaatcaaaaagattttggttactatcatttatcaaatgatgctaaagaagatacaacatggtatgattttgcggttgaaatcttaaaagacacagatgtggaggttaagcctgttgattctagtcaattcccagcaaaagcaaaacgtcctttaaattcaactatgagtttggaaaaagcgaaagcaacaggatttgtgattcctacttggcaagatgctttaaaagagttctacaagcaggaagttaaaaaataa

SEQ ID NO: 49651 - protein, 284 aa, Streptococcus agalactiae NEM316
MILITGANGQLGSELRHLLDERTQEYVAVDVAEMDITNAEMVDKVFEEVKPSLVYHCAAYTAVDAAEDEGKELDFAINVTGTENVAKAAAKHDATFVYISTDYVFDGEKPVGQEWEVDDLPDPKTEYGRTKRMGEELVEKYTSKFYTIRTAWVFGNYGKNFVFTMQNLAKTHKTLTVVNDQHGRPTWTRTLAEFMTYLAENQKDFGYYHLSNDAKEDTTWYDFAVEILKDTDVEVKPVDSSQFPAKAKRPLNSTMSLEKAKATGFVIPTWQDALKEFYKQEVKK

SEQ ID NO: 49652 - DNA, 1380 bp, Corynebacterium efficiens YS-314
  CDS (1)..(1380): transl_table=11
atgacctcattcaataaggagttaaccgtccgcgacaccgcgatcgacggcctgctcattgtcgatttccccgtccacggcgacaaccgcggctggttcaaggagaactggcagcggcagaaaatgctagctgtgggcctgcccgatttcggccccgtgcagaacaacatgagtttcaacgccaccgctggcaccacccgtggcctgcatgccgagccgtgggacaagttcgtctccgtcggcaccggccgcgtgttcggtgcgtggtgcgatctgcgggaggggtctgccacctacggcgcggtggtcacgcaggagattaccccggatatcggcgtctacgtcccgcgcggggtggccaacggtttccaggcgctggaggatgagaccctctacacctacctggtcaacgatcactggtcgcccgacgcgcagtactccaacgtcaacctcgccgacccggcgctcggcatcgagtggccgctccccctgactgagatgtccgagaaggacaaaaaccaccccatgcttgtcgacgctaccggcgtcccagcccgcaaggttctggtgacgggcgcgggtggccagttgggcaccgccctgcgggcggtgttcccggatgcggagttcgtcagccggcaggatctggacatcacctccgacctgagttcggcgcgcccgtggaagcagtactccgcgatcatcaacgctgccgcctacaccgcggtggacaaggccgagggtgagggccgcgcggatgcctgggccgtcaacgccaccgccgtggcgaacctcgctgcggtggcacgggagaacaacctcaccctggtgcatgtgtcctcggattatgtcttcgacggcaccgcacctggtgagtacaccgaagatgcaccgttgtccccactcggggtctacggccagaccaaagcagccggtgacctggctgccaccggcgcaccgcagcactatgtggtgcgcacctcctgggtgatcggcgatggtggcaacttcgtgcgcaccatgaaatccctggatgcccgcggtatcaccccatctgtggtggatgatcagatcggtcgcctgagcttcacccaggacatcgccgccggcatcaagcacctgctggacacccgtgccgcgtatggcacatacaacctcaccaactccggggagccggcatcgtgggcggatgtggcgcggatgatcttccgtgaccctgctgcggtgacgggagtgagtacggcggagtatttcgtcgataagcagggcgccgccccgcgcccgctgaactcgcggctggaccttggcaaactgaccgcgacggggttcaccgcgccggattggcgcgcacggctggccgactacctggaggagttataa

SEQ ID NO: 49653 - protein, 459 aa, Corynebacterium efficiens YS-314
MTSFNKELTVRDTAIDGLLIVDFPVHGDNRGWFKENWQRQKMLAVGLPDFGPVQNNMSFNATAGTTRGLHAEPWDKFVSVGTGRVFGAWCDLREGSATYGAVVTQEITPDIGVYVPRGVANGFQALEDETLYTYLVNDHWSPDAQYSNVNLADPALGIEWPLPLTEMSEKDKNHPMLVDATGVPARKVLVTGAGGQLGTALRAVFPDAEFVSRQDLDITSDLSSARPWKQYSAIINAAAYTAVDKAEGEGRADAWAVNATAVANLAAVARENNLTLVHVSSDYVFDGTAPGEYTEDAPLSPLGVYGQTKAAGDLAATGAPQHYVVRTSWVIGDGGNFVRTMKSLDARGITPSVVDDQIGRLSFTQDIAAGIKHLLDTRAAYGTYNLTNSGEPASWADVARMIFRDPAAVTGVSTAEYFVDKQGAAPRPLNSRLDLGKLTATGFTAPDWRARLADYLEEL

SEQ ID NO: 49654 - DNA, 903 bp, Pseudomonas putida KT2440
  CDS (1)..(903): transl_table=11
gtgaaaatcctgctgttggggaaaaacgggcaagtaggctgggagctacagcgcgccttggcgccgctgggtgaggtcattgcgctggatcgtcagggggccgagggcttatgtggcgacttgtccaacctggacggcttggccgctacgattcgtcagctggcgccggacgtgatcgtcaacgctgctgcctacactgcagtggataaagctgagagcgatcaggcactggctgcaatgatcaatgccgcggctcctgctgtattagcacgtgaaacagcagctttgggcgcctggttgattcactattccaccgattatgtatttgacggcagcggcagtcagcgctgggaggaaactgcgcctaccggccccctttcggtctacggccggaccaagctggaaggcgagcatgccattctcgccagcggcgccaaggccgtggtactgcgcaccagctgggtgtatgctgcgcgcgggcacaattttgccaagaccatgctgcgcctggcggcggagcgtgagacgttgagcgtggtagcagaccaatttggcgcacccacgggcgctgacctgatcgccgacgttactgcacacatcctgcggcaaatcttcaatgggcaagacaaccgtcacctggcagggatttaccacttggctgcgtccggtgaaacctcttggcatggttttgctcagttcgtgctggcgcatgctcaacgcactggcgtagcgctgaaagtgacagctgataaggttgccgcaatcagcaccgaagcttatccagtacctgcaccacgtccgcgcaactcgcgcctggcactgggcaaactggaaaacacgttcaatttcaaaatgccgctttgggagcaaggcgtgcaacgtatgctggacgaaatccagtaa

SEQ ID NO: 49655 - protein, 300 aa, Pseudomonas putida KT2440
MKILLLGKNGQVGWELQRALAPLGEVIALDRQGAEGLCGDLSNLDGLAATIRQLAPDVIVNAAAYTAVDKAESDQALAAMINAAAPAVLARETAALGAWLIHYSTDYVFDGSGSQRWEETAPTGPLSVYGRTKLEGEHAILASGAKAVVLRTSWVYAARGHNFAKTMLRLAAERETLSVVADQFGAPTGADLIADVTAHILRQIFNGQDNRHLAGIYHLAASGETSWHGFAQFVLAHAQRTGVALKVTADKVAAISTEAYPVPAPRPRNSRLALGKLENTFNFKMPLWEQGVQRMLDEIQ

SEQ ID NO: 49656 - DNA, 909 bp, Xylella fastidiosa Temecula1
  CDS (1)..(909): transl_table=11
gtgacggtgttggtctttggggcgggtggtcagattggtcaggagttgctgcggtcactgagtggtcgtgtggtgtgtgccgtcacgcgcagtggacggttgccgaatggggtggggtgtgtgcaggcggattttggtcagcccgagacgctgcgcgcattgcttgacgcgcagcggccagtgcaggtggtgaatgcggctgcttatacggcggttgaccgtgcggaatctgagcctgatgtggtgttccgtatcaatgcccaggcaccaggtgtgatcgcgcattggtgtgcggagcatggggtgccgctggtgcattattccactgactatgtgtttgatgggcagggtacgtctccgtacggtgtggatgatcctgtcgcgccgttgaatatttatggtgcgagtaagctggctggggagtgtgcggtccgggcggcgggcgggtgttctctgattttgcgtacgtcctgggtttatgcggcgcatggccacaattttttacgcactatgctgcgtttgggtgcgacatccgagtgtttgcgggtggtggcggatcagatcggcacgccgactgcggcggggttgattgcggatgttactgcgcagttgttggtggagcaggtgcaaagtcggcatgcgggtatttggcatctgacggcggccggtcaaacgagttggcatggttttgctgaggagattttcgtgcaggcgcaggcatgcggtttgatgatgcgggtcccgcaggtacaggccattgggagtgttgtgtatccgactgcggcgcggcgtccggggtattcgtgtctggatacgacggcgttggtggaggcgtttgggatcgtgttaccagattggcgtcagggcgtgcgcggtgtgttggacgagatcgtcaagaggtcgcgttaa

SEQ ID NO: 49657 - protein, 302 aa, Xylella fastidiosa Temecula1
MTVLVFGAGGQIGQELLRSLSGRVVCAVTRSGRLPNGVGCVQADFGQPETLRALLDAQRPVQVVNAAAYTAVDRAESEPDVVFRINAQAPGVIAHWCAEHGVPLVHYSTDYVFDGQGTSPYGVDDPVAPLNIYGASKLAGECAVRAAGGCSLILRTSWVYAAHGHNFLRTMLRLGATSECLRVVADQIGTPTAAGLIADVTAQLLVEQVQSRHAGIWHLTAAGQTSWHGFAEEIFVQAQACGLMMRVPQVQAIGSVVYPTAARRPGYSCLDTTALVEAFGIVLPDWRQGVRGVLDEIVKRSR

SEQ ID NO: 49658 - DNA, 843 bp, Lactobacillus plantarum WCFS1
  CDS (1)..(843): transl_table=11
atggctaaagtaatgattgttggtgccaatggtcagttaggtcatgagttacaacgactattaaatgaacaagagattgcatttgacgcgctgactgaaaaagaattggatattacagacttagacgcagtcaaagctaagattgccgaattacaaccagcggtcttatatgattgtgcggcttacacagcagttgataaggcggaagatgaaggcaaagccctcaattggctggtcaatgttgatggaacaaaaaatttagcccaagtagcagctgaacagggtgttaaattggtttatgtttctactgactacatttttgatggcactaataaaggtgaatatttagaagatgatccagccaaccccaagaatgagtatgggcgtgctaagtgggctggtgaagaagccgttcgtcacagcggtgctgattactatattgttcggactagctgggttttcggtgaatttgggcataactttgtcttcacaatgcagaatttagcaaagacgcatgacaagttgacagtcgtcaatgatcaactcggacggccaacctggacgcgaacattagcagaatttatggcccacctggtgaaaactgaagccgcttcagggacctatcaattaagtaacgataatacagctacttggtatgactttgcgaaggaaattttgaagaatactgatgtggaagtagcaccagttacttctgaacaattcccacaaaaggcttaccggccacagcattcagtgatgaatttggataaggctaaagcaactggttaccatattttgacctggcaggaagcactgagtgagtttctagagagccttgggtag

SEQ ID NO: 49659 - protein, 280 aa, Lactobacillus plantarum WCFS1
MAKVMIVGANGQLGHELQRLLNEQEIAFDALTEKELDITDLDAVKAKIAELQPAVLYDCAAYTAVDKAEDEGKALNWLVNVDGTKNLAQVAAEQGVKLVYVSTDYIFDGTNKGEYLEDDPANPKNEYGRAKWAGEEAVRHSGADYYIVRTSWVFGEFGHNFVFTMQNLAKTHDKLTVVNDQLGRPTWTRTLAEFMAHLVKTEAASGTYQLSNDNTATWYDFAKEILKNTDVEVAPVTSEQFPQKAYRPQHSVMNLDKAKATGYHILTWQEALSEFLESLG

SEQ ID NO: 49660 - DNA, 864 bp, Tropheryma whipplei str. Twist
  CDS (1)..(864): transl_table=11
ttgagtttaaagtgccttataaccggtggcggtggtatgttggggcgggatatacggtctgtgttcccagagagcgttgccctaacgcatgacgagcttgatataacggatgaatatgctgttcttgacgccgccagaaataaagaccttttaattaattgtgctgcatatacacaggttgatgcggcagaaagtaatgctgcaaaagcctatgcggtaaatgaagcgggtgcaagggctgtcgccaaagctgcagcaaggcgttcaattcgagtagtgcatatctcaactgattatgttttttcaggaacggcaatacgtccatacccagaagaccacccgcattctcccctttcggtctacggaaaatctaaggctgctggagaaaaggcagtgttggaggaatattccaaaggaagctttatcatccgtactgcttggctctatggacaatacggcaataacttcgtaaaaagcattctgaaagcgtgtagaacacaggatatcgtcacagttgttaacgaccaatatgggcaaccaacttggagtctggaccttgcaaaacagataaagcttcttgccgagagtgacgctccatgtggcgtgtaccatggaacaaacagcggtaaaacaacctggtttgattttgccgggaaagtggctgccttaggtgggtacgacccgaaacgcattattcccattagctccgcacaatttgtgcgcccagcacgcaggcctggatactcttgtctgggccatgatgcatggactgcagttggcctggaacccatgagaccttgggaagatgccctgaatgatgcatgggctgcgggtgtgtttgcggagtgtatagctgggcagtga

SEQ ID NO: 49661 - protein, 287 aa, Tropheryma whipplei str. Twist
MSLKCLITGGGGMLGRDIRSVFPESVALTHDELDITDEYAVLDAARNKDLLINCAAYTQVDAAESNAAKAYAVNEAGARAVAKAAARRSIRVVHISTDYVFSGTAIRPYPEDHPHSPLSVYGKSKAAGEKAVLEEYSKGSFIIRTAWLYGQYGNNFVKSILKACRTQDIVTVVNDQYGQPTWSLDLAKQIKLLAESDAPCGVYHGTNSGKTTWFDFAGKVAALGGYDPKRIIPISSAQFVRPARRPGYSCLGHDAWTAVGLEPMRPWEDALNDAWAAGVFAECIAGQ

SEQ ID NO: 49662 - DNA, 906 bp, Pseudomonas syringae pv. tomato str. DC3000
  CDS (1)..(906): transl_table=11
atgaaaattcttctgctgggaaaaaacggccaggtcggctgggagctgcaacgctcgctcgcggtattgggcgaagtcgtagcgctcgatcgtcataccgcctcgacggtctacggcgacctttctggcgacctgtccagtctggacgggttgcgcaatacgattcgctgcgttaaacctcaggttatcgtcaacgccgcggcctataccgccgtcgacaaagcagagaccgagcaagagcttgcacacacggtcaacgctctggccagccaggttctggcagaagaagcgcgtcagctcgatgccctgctcgttcattactcgaccgactacgtgttcgacggcaccggaaccagcgcatggaaagaaagcgatgcggtgtcgccggtcaactactacggtgcaaccaagcttgagggtgaacagctcattgtggcgtcaggctgcaaacatctgattttccgcaccagctgggtgtatgcggcacgcggtaacaactttgccaagaccatgctgcgccttgcaaaagatcgtcctgcgctgaatgtgatcgccgatcagattggcgcgcctacaggtgcagagctgctggccgatatagcgacagcggcgctgcagcagacgcttgcaaggccagagctgtgcggtatctaccacctcgcacctgccggcgaagtgtcatggcatgcttatgcgcaatacgtcattgatttcgcccgcgcccacggggaacccttggcggtggaaacgatcaatccaatcggcacgattgaatacccgacacccgcgcaacgccctctgaattcgcgtctgaacacagaaaagctgcgccacaatttttctctgcacctgcctgactggcaaagtggtgtagcccgaatgctcatggaagctctgaataaatga

SEQ ID NO: 49663 - protein, 301 aa, Pseudomonas syringae pv. tomato str. DC3000
MKILLLGKNGQVGWELQRSLAVLGEVVALDRHTASTVYGDLSGDLSSLDGLRNTIRCVKPQVIVNAAAYTAVDKAETEQELAHTVNALASQVLAEEARQLDALLVHYSTDYVFDGTGTSAWKESDAVSPVNYYGATKLEGEQLIVASGCKHLIFRTSWVYAARGNNFAKTMLRLAKDRPALNVIADQIGAPTGAELLADIATAALQQTLARPELCGIYHLAPAGEVSWHAYAQYVIDFARAHGEPLAVETINPIGTIEYPTPAQRPLNSRLNTEKLRHNFSLHLPDWQSGVARMLMEALNK

SEQ ID NO: 49664 - DNA, 855 bp, Streptococcus pyogenes SSI-1
  CDS (1)..(855): transl_table=11
atgattttaattacaggaagcaatggtcaattagggacagaacttcgatacttattagatgaacgaggtgttgattatgtagccgttgatgtcgcagaaatggacatcacaaatgaagacaaagtcgaagctgtttttgcgcaggtcaagccaacattggtctatcattgtgctgcttatacggcagttgatgcagcagaagacgaaggaaaagccttgaatgaggctattaatgtaacaggctcagaaaatattgccaaggcttgtggaaaatatggggctacccttgtttacatttcaacagactacgtatttgatggcaataaaccagtcggtcaagaatgggtagaaacagatcgtccagaccctaagacagaatatggccgtacaaaacgtttaggagaactagctgttgaacgatacgcagagcatttttatattatccgtactgcttgggtatttggaaattatggtaaaaactttgtctttaccatggaacagttagcggaaaatcactcccgtttgactgttgtcaatgaccaacacggtcggccaacgtggacaagaaccttggcagaattcatgtgttatttgacagagaatcaaaaagcctttggttactatcacttgtcaaatgatgctaaggaagacaccacttggtatgattttgccaaagaaatcttaaaagacaaggctgttgaagtcgtgccagttgattcatcagctttcccagcaaaagccaaacgtcctttaaattcaaccatgaatcttgataaggcaaaagcaacagggtttgttattccaacatggaaagaagccttgaaggcattttaccaacaaggactgaaaaagtaa

SEQ ID NO: 49665 - protein, 284 aa, Streptococcus pyogenes SSI-1
MILITGSNGQLGTELRYLLDERGVDYVAVDVAEMDITNEDKVEAVFAQVKPTLVYHCAAYTAVDAAEDEGKALNEAINVTGSENIAKACGKYGATLVYISTDYVFDGNKPVGQEWVETDRPDPKTEYGRTKRLGELAVERYAEHFYIIRTAWVFGNYGKNFVFTMEQLAENHSRLTVVNDQHGRPTWTRTLAEFMCYLTENQKAFGYYHLSNDAKEDTTWYDFAKEILKDKAVEVVPVDSSAFPAKAKRPLNSTMNLDKAKATGFVIPTWKEALKAFYQQGLKK

SEQ ID NO: 49666 - DNA, 855 bp, Bacteroides thetaiotaomicron VPI-5482
  CDS (1)..(855): transl_table=11
atgaatattctagtaactggagctaatgggcagcttggtaatgaaatgcgatgcatagcagctacaagtttgaataattatatatttactgatgttgcagagttggatattacagatttagatgctattcgtaatatgatacatttggataatataaaggtaattgttaactgtgctgcttatacgaatgtagataaagcagaagatgattatgatatggcagacttattgaataataaagctgtagagaatttggctattgctgcaaaagaagttaatgctactttaattcatatttcgactgattatgtatttcaaggtgataagaatatgccatgtggagaagactgtgaaactaatcctttaggtatttatggtaaaacaaaaagagcaggagaacaaagcatccaacgtgtgggctgtaattatttgatttttcgtacagcttggctgtattctcaatttggtaagaattttgttaagactatgcgacagttaaccgctgataaagataaattgagagttgtttttgatcagattggtacacctacatatgcaaaagatttggctgatattatttatagagtgattgagggggatcaatatcacaaacaaggtatctatcatttcagtaatgagggtgtttgttcatggtatgattttgctaaagaaatctgtgaattgagtggaaatagttgtgatattcaaccttgccatagtgatgaatttcctagtaaagtaaaacgtcctcatttctcagtattagataaaacaaaattgaagctggcttttggtgtagagattccttattggaaagattctcttgtgaaatgtattaataaagaaaataattaa

SEQ ID NO: 49667 - protein, 284 aa, Bacteroides thetaiotaomicron VPI-5482
MNILVTGANGQLGNEMRCIAATSLNNYIFTDVAELDITDLDAIRNMIHLDNIKVIVNCAAYTNVDKAEDDYDMADLLNNKAVENLAIAAKEVNATLIHISTDYVFQGDKNMPCGEDCETNPLGIYGKTKRAGEQSIQRVGCNYLIFRTAWLYSQFGKNFVKTMRQLTADKDKLRVVFDQIGTPTYAKDLADIIYRVIEGDQYHKQGIYHFSNEGVCSWYDFAKEICELSGNSCDIQPCHSDEFPSKVKRPHFSVLDKTKLKLAFGVEIPYWKDSLVKCINKENN

SEQ ID NO: 49668 - DNA, 909 bp, Bacteroides thetaiotaomicron VPI-5482
  CDS (1)..(909): transl_table=11
atgaagaatataataattatcggtgccaatggattcaccggacgccaaatactgaatgacctgtcgagcaaggcacaatataaggtaacaggatgttccctgcatccggatatccttccgaagaatggaggcaactatcatttcatcaccacagatatacgggatgaagcagtcgtaaagcaactttttaaagacgtacaacccgatgtagtcatcaactgttccgccttatccgtccccgattattgcgaaacgcatcacgaagaagcctggctaacaaatgttacggcagtagaacaattggcacatctttgcgaaagttacaaaagccggttcattcatttatctacagacttcgtctttgacggaaagatagacgagaagtccggacagctttatacagaaaaaagtctccctgctcccgtcaactattacggtttcaccaaatggaaaggagaagagaaagtgactgaaatctgtagtaactatgctattgcccgcgtagagattgtctacggaaaagcattgccgggacaacatggaaacatcgtgcaactggtgatgaatcgtttgaatgcaggacaagaaatccgtgtcgtatcagatcaatggcgcacgcccacctatgtaggtgacgtatcagccggagtacaacacctggtagaaaatgccgcaaacggaatttttcatatctgtggcgaggaatgcctgaccatcgcagaaattgcttttcaggtagcagactacatgaagctggaccgttcgctcgttcaccctgccacaacagaagaaatgcaagaagctactccccgtccccgtttcagtgggatgagtatagcaaaagcccggactatacttggttaccagccacgaaagctgaaagacatcctcatggagtggaaacattaa

SEQ ID NO: 49669 - protein, 302 aa, Bacteroides thetaiotaomicron VPI-5482
MKNIIIIGANGFTGRQILNDLSSKAQYKVTGCSLHPDILPKNGGNYHFITTDIRDEAVVKQLFKDVQPDVVINCSALSVPDYCETHHEEAWLTNVTAVEQLAHLCESYKSRFIHLSTDFVFDGKIDEKSGQLYTEKSLPAPVNYYGFTKWKGEEKVTEICSNYAIARVEIVYGKALPGQHGNIVQLVMNRLNAGQEIRVVSDQWRTPTYVGDVSAGVQHLVENAANGIFHICGEECLTIAEIAFQVADYMKLDRSLVHPATTEEMQEATPRPRFSGMSIAKARTILGYQPRKLKDILMEWKH

SEQ ID NO: 49670 - DNA, 849 bp, Bacteroides thetaiotaomicron VPI-5482
  CDS (1)..(849): transl_table=11
atgagaattttagtgacgggtgccaatggtcagcttggcaatgaaatgcaagttcttgcaaaagagaatccgcaacatacgtattatttcacagatgtgcaggagctggacatctgtaataaggacgctgtttgggcatatattgctgaaaagcggattgagcttattgttaattgtgcggcatatacagcagtagataaagcggaagatgattcggaactggcttacaagctgaacagtgaagctcctaaaacgctggcatgtgcagcgcagtttaatggtgcggcgatgattcaggtgtctaccgactatgtttttgacggcaccgctcatattccttatacagaagaatgcgatccatgtccgaattcggtatatggaacaacgaaacttgaaggagaatatgaggtactgaatcattgcgaaaagtcagtcgttatccgtaccgcatggctttattccacttttggcaacaacttcgtgaagacgatgatccgtctgggcaaagagcgtgatagtctgggagtcattttcgatcaggtaggaactcctacttacgccaatgacctggcacaggccatctttgctattattaataaaggcatcgttcgtggagtctatcatttcagcaacgaaggagtctgctcctggtatgactttacggtagctattcatcgtttggcaggaatcacttcatgcaaagtgaaaccgctgcatacggcggaatatcctacaagagcgaaccgccctgcatattccgtactcgataaaacaaaaataaaaacaacgttcggcatcgaaatacctcattgggaggaaagcctgaaaagatgcatcgatactttataa

SEQ ID NO: 49671 - protein, 282 aa, Bacteroides thetaiotaomicron VPI-5482
MRILVTGANGQLGNEMQVLAKENPQHTYYFTDVQELDICNKDAVWAYIAEKRIELIVNCAAYTAVDKAEDDSELAYKLNSEAPKTLACAAQFNGAAMIQVSTDYVFDGTAHIPYTEECDPCPNSVYGTTKLEGEYEVLNHCEKSVVIRTAWLYSTFGNNFVKTMIRLGKERDSLGVIFDQVGTPTYANDLAQAIFAIINKGIVRGVYHFSNEGVCSWYDFTVAIHRLAGITSCKVKPLHTAEYPTRANRPAYSVLDKTKIKTTFGIEIPHWEESLKRCIDTL

SEQ ID NO: 49672 - DNA, 900 bp, Enterococcus faecalis V583
  CDS (1)..(900): transl_table=11
atggcaaagtacaaaagctactttgccctgcctttttttcaagaaggagcgaaaaaaatgattttaattactggtggaaatggccaattgggcacagaattacgtcacctattagacgaacaaggaattgagtatgtttcaacggattccacagaattagatattactgatgcggatagtacgttggcaaaagtgaaagaaattcaaccaagcgtcatttatcattgtgctgcttatacagctgttgataaagcagaagacgaaggcaaggaattagatgaaaaagtgaatgtagatggcacacgtcatgttgcagaagctgctaaagcagtgggggcgacacttgtttacgtaagtacagattatatttttgatggaactaaaaaagaaggcgtctatgcgattgatgatcaaccgaatcctttaaatgagtatggtcggacgaagttattaggtgaacaagcggtccaagaaatcctggacgactattatattattcgaacatcatgggtatttggtcaatacggtcataactttgtctttaccatgcaaaaattagcggaaacaagagaccaactaaaggtagtggacgatcagtttggccgcccaacttggacaagaacgttagccgaatttatggcatttgttattgcagaaaaagcgccatttggtgtttatcatttgtctaatgaaaacagctgtagctggtatcagtttgctaaagaaattttaaaagatactgaagtggaagtattgccagtggattcaactcaatttccacaaaaggcgcaaagaccacaatattctgtcatggatttaagtaaaacagaagcgttaggctttaaaattcctacttggcaagaagccttagcacaaatgttagaaaatgttcaacaataa

SEQ ID NO: 49673 - protein, 299 aa, Enterococcus faecalis V583
MAKYKSYFALPFFQEGAKKMILITGGNGQLGTELRHLLDEQGIEYVSTDSTELDITDADSTLAKVKEIQPSVIYHCAAYTAVDKAEDEGKELDEKVNVDGTRHVAEAAKAVGATLVYVSTDYIFDGTKKEGVYAIDDQPNPLNEYGRTKLLGEQAVQEILDDYYIIRTSWVFGQYGHNFVFTMQKLAETRDQLKVVDDQFGRPTWTRTLAEFMAFVIAEKAPFGVYHLSNENSCSWYQFAKEILKDTEVEVLPVDSTQFPQKAQRPQYSVMDLSKTEALGFKIPTWQEALAQMLENVQQ

SEQ ID NO: 49674 - DNA, 855 bp, Bacillus cereus ATCC 14579
  CDS (1)..(855): transl_table=11
atgaaagagagggttatcataacaggagcaaacggtcaattaggaaagcaactatttgaagagttagactctgaagaatatgatatatatccatttgataaaaagttattagatgtgacaaatatatcccgaatacaacaagtggtacaagaaataaaaccacatataattattcattgtgctgcctatacgaaagtagatcatgcggagaaagaacaggatcttgcatatagaataaatgcaatcggagctcgaaatgtagcggttgcttcacaattagtaggggcgaagctagtttatattagtactgattatgtatttcaaggcgccagaccagatggatacgacgaatttcatagtccagcgccgataaatatatatggggcctctaagtatgcgggggagcagttcgtcaaagagttacataataaatattttatcgttcgcacatcgtggctatatggtaaatatgggaataatttcgtgaaaacgatgatgcgattaggaaaagaaagagatgaaatatctgttgtagcggatcaagttggctctcctacgtatgtggcggatttgaatatggttattaataagctcattcatacttctttatacggtacataccacgtatcaaacagaggctcatgctcttggtttgaatttgcacaaaagatattttcgtacgccaatatgaaagtgaatgtattacctgtttcaacggaagaattcggggctgcggctgcgaggcccaaatattctatttttcaacataacatgctaagattaaatggtttttcacaaatgccgtcttgggaagaaggattagagcggttttttatagaaaccaaaagtcattaa

SEQ ID NO: 49675 - protein, 284 aa, Bacillus cereus ATCC 14579
MKERVIITGANGQLGKQLFEELDSEEYDIYPFDKKLLDVTNISRIQQVVQEIKPHIIIHCAAYTKVDHAEKEQDLAYRINAIGARNVAVASQLVGAKLVYISTDYVFQGARPDGYDEFHSPAPINIYGASKYAGEQFVKELHNKYFIVRTSWLYGKYGNNFVKTMMRLGKERDEISVVADQVGSPTYVADLNMVINKLIHTSLYGTYHVSNRGSCSWFEFAQKIFSYANMKVNVLPVSTEEFGAAAARPKYSIFQHNMLRLNGFSQMPSWEEGLERFFIETKSH

SEQ ID NO: 49676 - DNA, 915 bp, Nitrosomonas europaea ATCC 19718
  CDS (1)..(915): transl_table=11
atgccagatcggacgaccccaataaaaattctgctctttggcaagaacggtcaggttggctgggagctgcagcgcagtctggctccgctaggggagttgattgctccggacaaacaggacttgcgctattgtggtgatctggcagacttagcagggattactcatacactgcaaaccatccgtcctgacatcattgtcaatgcagcagcatataccgcagttgaccaggcagaaagtgaaccggagctggcctttcgtatcaatgccgaggcacccgaattactggcgcagcaggctgaacaaattggagcctggttgattcattactctaccgattacgtattcaacggcaatggtaattgtccctggcaggaaacagaccttacttcacctatcaatatttatggcctgagtaaattacggggagaagaacagatccgaaaatcaaactgcaaatatatgatcctgcgtaccagttgggtctatgccgctcgcggaaagaatttcatcaaaactattttgcgacttgcccgggaaaaagaacaactgacgatcatcgatgatcagatcggggcgcctaccggagcagaactactggctgatataacagctcaggccattccacaactattggaataccctgataaatcaggcgtttatcatgttgctgccagcgaggaagtctcctggtacagctatgcccggtttttactggactttgcccgtgaacacgatattccgatcaaggtccacccggatgcagtcatcccggttcacagcgaagcttttgtcacggcagccaggcgtcccttgaactcacgtctgaatacagagaaattctgtaatacgttccagctttgtcttcctcactggcaaaccggagtaactcgggtgctcgaagaaatttacctgtga

SEQ ID NO: 49677 - protein, 304 aa, Nitrosomonas europaea ATCC 19718
MPDRTTPIKILLFGKNGQVGWELQRSLAPLGELIAPDKQDLRYCGDLADLAGITHTLQTIRPDIIVNAAAYTAVDQAESEPELAFRINAEAPELLAQQAEQIGAWLIHYSTDYVFNGNGNCPWQETDLTSPINIYGLSKLRGEEQIRKSNCKYMILRTSWVYAARGKNFIKTILRLAREKEQLTIIDDQIGAPTGAELLADITAQAIPQLLEYPDKSGVYHVAASEEVSWYSYARFLLDFAREHDIPIKVHPDAVIPVHSEAFVTAARRPLNSRLNTEKFCNTFQLCLPHWQTGVTRVLEEIYL

SEQ ID NO: 49678 - DNA, 855 bp, Bacillus anthracis str. Ames
  CDS (1)..(855): transl_table=11
atgaaagagcgggttatcataacaggagcaaatggtcaattaggaaagcaactacaagaagagttaaatcctgaagaatatgacatatatccatttgataaaaagttgttagatataacaaatatatcccaagtgcagcaagtggtacaagaaataaggccacatatcattattcattgtgcagcgtatacgaaggttgatcaagctgagaaagagcgagatcttgcttatgtaataaatgcaataggggctcgaaatgtagcggttgcttcacaattagttggggcgaagttagtttatattagtacggattatgtatttcaaggcgacagaccggaggggtacgatgaatttcataatccggcaccgatcaatatatacggggcttctaaatatgcgggagagcagttcgtcaaagagttacataataaatactttatcgttcgtacatcgtggttatatggtaagtatggaaataattttgtgaaaacgatgatacgattagggaaagaaagagaagaaatatctgttgtagcggatcaaatcggttctcctacgtatgtggcggatttaaatgtgatgattaataagctcattcatacttctttatacggtacgtatcacgtatccaatacaggatcatgttcttggtttgaatttgcaaagaaaatattttcgtatgcaaatatgaaggtgaatgtgttacctgtttcaaccgaagaatttggggctgcagcagcaaggccgaaatattctattttccaacataacatgctacgattaaatggttttttgcaaatgccttcttgggaagaaggattagagcgtttttttatagaaaccaaaagtcattaa

SEQ ID NO: 49679 - protein, 284 aa, Bacillus anthracis str. Ames
MKERVIITGANGQLGKQLQEELNPEEYDIYPFDKKLLDITNISQVQQVVQEIRPHIIIHCAAYTKVDQAEKERDLAYVINAIGARNVAVASQLVGAKLVYISTDYVFQGDRPEGYDEFHNPAPINIYGASKYAGEQFVKELHNKYFIVRTSWLYGKYGNNFVKTMIRLGKEREEISVVADQIGSPTYVADLNVMINKLIHTSLYGTYHVSNTGSCSWFEFAKKIFSYANMKVNVLPVSTEEFGAAAARPKYSIFQHNMLRLNGFLQMPSWEEGLERFFIETKSH

SEQ ID NO: 49680 - DNA, 849 bp, Ruegeria sp. PR1b
  CDS (1)..(849): transl_table=11
atgagcattcttgtgtttggcgcaaccggccaggtggcgcgggaactggcaacgcatgacggggtggtctgccttggccgcgatcaggcggatctgtcggatcccggcgcctgcgctgcggccattcgcgcccatgctccgcgggcggtgatcaatgccgccgcctatacggcggtggacaaggccgagggtgaggaagagctggcccggatcatcaatggggcggcgcccggtgcgatggcggcggcctgcgtgcagctgggcgtgcctttggtgcagatttccaccgattatgtctttgccggcagcggcgagatgccctggcgtcccgaggatccggtggcgccgcccaatgcctatgggcgcagcaagcgcgcgggcgaagaggcggtgattgcggcgggcgggacttatgcgatcctgcgcacctcctgggtggtctcgtgccatgggcataattttgtcaagaccatgctcaggctgggggccgagcgggaccagctgaccattgtcggggatcagatcggcgcgccgaccccggcccgtgacattgccgccgcctgcatcagcatggcagagcagctgatcgcggatcccggcaaatcggggatctatcactttcagggcgcgccctgtgtgagctgggcggattttgcccgcgagatctttgcccaggcggggctgagctgcgcggtggcggatatcccgacctccgactacccgacgcccgcggcgcgcccgctgaactcaaggctcgattgcgccttgttagacactgtttttggcatcccgcagccggattggcgcgttgggctccgcgagatattgaaggacttggaaacggcatga

SEQ ID NO: 49681 - protein, 282 aa, Ruegeria sp. PR1b
MSILVFGATGQVARELATHDGVVCLGRDQADLSDPGACAAAIRAHAPRAVINAAAYTAVDKAEGEEELARIINGAAPGAMAAACVQLGVPLVQISTDYVFAGSGEMPWRPEDPVAPPNAYGRSKRAGEEAVIAAGGTYAILRTSWVVSCHGHNFVKTMLRLGAERDQLTIVGDQIGAPTPARDIAAACISMAEQLIADPGKSGIYHFQGAPCVSWADFAREIFAQAGLSCAVADIPTSDYPTPAARPLNSRLDCALLDTVFGIPQPDWRVGLREILKDLETA

SEQ ID NO: 49682 - DNA, 897 bp, Bordetella pertussis Tohama I
  CDS (1)..(897): transl_table=11
atgaacatcctgctgctgggccgcaccggacagatcggcgatgcgctgctggcgcacccgccggcatgggcgcggctggccgcgctggaccgccgccaggccgacctgcgcgacctgggccggctggccgccgtgctcgatgcctacgcgccgcgcatactgatcaacgccgccgcctataccgaagtcgaccgcgccgaggccgagccggagctggcgctgcgcatcaatgcccaggcggtggcggtcatggcggactatgcgcgccgcaacaatgcattgctggtgcactattccaccgactacgtgttcgacggcaagcgcgcccgcgcctaccgggaaaccgacgccgcacatccgctgaacgcctacggccgctccaagctggccggcgaacaggccatcgcggccagcggctgcccgcacctgatactgcgcaccagctgggtctacgccagccatggcgccaatttcgtcaagaccatcctgcgcctggcgcgcacccgcgccgagctgtccgtggtcgccgaccagcacggcgccccgatctgggcgggccgtatcgccgccgtcacctggcaggcgatcgatgcgcaccggcgccgccgcctgcccgacggcctgtggcacctgagcgcgggcggccatgtcagctggcacgggctggcctgccacatcgtggcgcgggcccggcgcgccgggctggcgctgagcctggacccggcgcacatccggcccgtcacggcggcgcaatacccgctgccggcgccacggccggccaattcgcggctggactgcggcgcgctacgcgatgccctggagcccgagctgcccgactggcaagtcgacctggatgcggtcgtggatgccctggccgcgcgggcgcataccctgtag

SEQ ID NO: 49683 - protein, 298 aa, Bordetella pertussis Tohama I
MNILLLGRTGQIGDALLAHPPAWARLAALDRRQADLRDLGRLAAVLDAYAPRILINAAAYTEVDRAEAEPELALRINAQAVAVMADYARRNNALLVHYSTDYVFDGKRARAYRETDAAHPLNAYGRSKLAGEQAIAASGCPHLILRTSWVYASHGANFVKTILRLARTRAELSVVADQHGAPIWAGRIAAVTWQAIDAHRRRRLPDGLWHLSAGGHVSWHGLACHIVARARRAGLALSLDPAHIRPVTAAQYPLPAPRPANSRLDCGALRDALEPELPDWQVDLDAVVDALAARAHTL

SEQ ID NO: 49684 - DNA, 906 bp, Prochlorococcus marinus str. MIT 9313
  CDS (1)..(906): transl_table=11
atgacgatcaaggtcttgctcaccggtgctgccggtcagcttggtcaggccttgcaagcgtcctgtccgtcgtctgttgagttggtctccaccagtcgaatgggtgatggtttgttgcagcccttggatttggccgatgctcaggcatgtcgggcagcagtgttccagcaccgtcctgactgggttctcaatgcaggggcttacaccgcagtcgatcatgcggagcaggagcccgatctggcattagctgttaatgcaagtgcaccgcgtgctttggcggaaggtttattggagacgggcgggcggatgttgcaggtaagtacggattttgtgtttaacggcgctcaagggcacccttaccgtcctaatcagcctcgagatcctttgggggtctatggcgcgactaaagccgccggggaagaggcagtggaacaaattctcggtgcgcaaggacgagcggtaactttgcgcaccagctgggtttatggccctgtgggtaggaattttttgctcaccatgctgaggttgcatcgcgaacgtgaacagctgaatgtggttgtcgatcaagtgggttgccccacaagcacaattacactagccactgcatgttgggcgttgatgaaagaacctcaacagccgtatcttccgccagtattgcactggtgtgatgctggagcggcatcttggtatgacttcgcagtggctattggtgaattgggcgttgccaagggcttgttgcagcgggcagccgtcgtgaacccgataatcacggcggaataccccacgcccgcccagcgtcccagctactcccttcttgactgctcagagactcgtcaacttcttggcttgcacgcatgccattggcgagttgcattggaacaggtgattgctgatgtagagagttag

SEQ ID NO: 49685 - protein, 301 aa, Prochlorococcus marinus str. MIT 9313
MTIKVLLTGAAGQLGQALQASCPSSVELVSTSRMGDGLLQPLDLADAQACRAAVFQHRPDWVLNAGAYTAVDHAEQEPDLALAVNASAPRALAEGLLETGGRMLQVSTDFVFNGAQGHPYRPNQPRDPLGVYGATKAAGEEAVEQILGAQGRAVTLRTSWVYGPVGRNFLLTMLRLHREREQLNVVVDQVGCPTSTITLATACWALMKEPQQPYLPPVLHWCDAGAASWYDFAVAIGELGVAKGLLQRAAVVNPIITAEYPTPAQRPSYSLLDCSETRQLLGLHACHWRVALEQVIADVES

SEQ ID NO: 49686 - DNA, 909 bp, Synechococcus sp. WH 8102
  CDS (1)..(909): transl_table=11
atgaaggtgttgctcaccggtgcagcggggcagcttgggcaggccttgattggaaggatgcctgatggcattgaactggtggcgagcagccgcagcggcggcaatggcttggtggcactcgacctggctgatgcaacggcatgccggcaggtggtggaggagcaccgccccgattgggtgctgaatgccggggcttacaccgcagtggacaaggcagaagcggaaccggagctggcccatgccgtgaatggaggcgcaccgcgcgcttttgcagaagcgatccaggcgcacggcggccgaatgctgcagctgagcaccgactttgtgttcaacggtcagcagggctccccttaccgggtggatcaaagccgagatcccctgggggtctacggcgccagcaaggccagcggagagaaggcggtggaagagctgcttgggaccagtggccaaggtgtggtgctgcgcaccagctgggtgatgggtccggtgggcaaaaactttgcactcacgatgctgcgactgcatcgtgagaaagagcaattgggggtggtggccgatcaggtgggctgcccgagcagcacgttgaacctggcgacggcgtgctgggcggtgatcaccagcagccgcgatgaggtggaactcccccctgtgctgcactggtgtgatggcggtgccgccagctggtacgacgtgtccgtcgcggtgggcgagctggcgatggaccttggcctgctgcagcgcgccgccacggtgaatccgatcagcacagctgactatccaaccccagccactcgtcccggctattcgttgctggattgccaggccagccgacaagtactgcaactggaggcccagccctggcgggcagccctcaaggatgtgctgcaggccatccccacgaacccttga

SEQ ID NO: 49687 - protein, 302 aa, Synechococcus sp. WH 8102
MKVLLTGAAGQLGQALIGRMPDGIELVASSRSGGNGLVALDLADATACRQVVEEHRPDWVLNAGAYTAVDKAEAEPELAHAVNGGAPRAFAEAIQAHGGRMLQLSTDFVFNGQQGSPYRVDQSRDPLGVYGASKASGEKAVEELLGTSGQGVVLRTSWVMGPVGKNFALTMLRLHREKEQLGVVADQVGCPSSTLNLATACWAVITSSRDEVELPPVLHWCDGGAASWYDVSVAVGELAMDLGLLQRAATVNPISTADYPTPATRPGYSLLDCQASRQVLQLEAQPWRAALKDVLQAIPTNP

SEQ ID NO: 49688 - DNA, 933 bp, Chromobacterium violaceum ATCC 12472
  CDS (1)..(933): transl_table=11
atgatgaccatgccccgcatactgataaccggcaaaaacggccaggtcggccacgaattgctgcgcgcgctggcgccgctgggcgagctgatcgccaccgacaggcgggagctggacctcacgtgggacgacgcgcgcatcgagcaggcgctggaccagcatgggcccgacatcatcgtcaacccggccgcctataccgcggtcgacaaggcggaaagcgacgaggcaacggcgcacgccgtcaacgcctgcgcggtcggcgtcatcgcgcgctggaccgcccgccatggcgcgttgcttgtccactactccaccgactacgtgttcagcggagacggcgaacgcccctggcgggaagacgacgcaaccggcccgcaatcggtatatggacgcagcaagctggcgggcgaagaagccatccggcatgccgcgcctcgccacctgatactccgcaccagctgggttttcggcgcgcatggcgccaatttcctgaaaaccatgctgaagctgggacaggaacgggattcgctcaaggtcgtcaacgaccagatcggcgcgccagcctccgccgccatgatcgccgacgtcagcgccgaactgattcgccgctacctggccgccccctccggcttcgcctttggaacctaccatctggcgccccggggggaaaccagctggcacggctatgcaagctatctgctgcagcgagccgcgtcctacggactaccactgaaaatcgatcccgcaaacatccagggcattcccagcagcgactatccgctgccagccaagcgcccagccaactccaggctgagttgcgacaagctgaaaagcgctttcggcatcgagctgccggaatggagaagcggcgtggaccaggtgctggctcaattgctccccacctacgacagcggtgccccagcccgggaatga

SEQ ID NO: 49689 - protein, 310 aa, Chromobacterium violaceum ATCC 12472
MMTMPRILITGKNGQVGHELLRALAPLGELIATDRRELDLTWDDARIEQALDQHGPDIIVNPAAYTAVDKAESDEATAHAVNACAVGVIARWTARHGALLVHYSTDYVFSGDGERPWREDDATGPQSVYGRSKLAGEEAIRHAAPRHLILRTSWVFGAHGANFLKTMLKLGQERDSLKVVNDQIGAPASAAMIADVSAELIRRYLAAPSGFAFGTYHLAPRGETSWHGYASYLLQRAASYGLPLKIDPANIQGIPSSDYPLPAKRPANSRLSCDKLKSAFGIELPEWRSGVDQVLAQLLPTYDSGAPARE

SEQ ID NO: 49690 - DNA, 858 bp, Porphyromonas gingivalis W83
  CDS (1)..(858): transl_table=11
atgaaccgaatactggtaaccggagccgatggtcagttgggtagtgaacttcggttgttggcttcggctgacagccgttttgttttcaccgacttagcggaactggatattagagataaagatgctgtcctccgttttatggaggaatatagcatcgggatcattatcaactgtgccgcatatacagctgtggacaaagctgaggacgatgaagcctctgccgagaaagtcaatcaccaagctgcggctcatctggcagcggctgctgcgaagtatgatgccctgctgatacatatttctacggattatgtatttgatggtacggctaatatcccctatagggaagacatcccgacagctcctctcggtgcgtatggccgtaccaagctaaaaggagaacaggctgtgctggcagccgactgccgatacatgatactgcgcacatcgtggctgtactcatcgttcggcaataattttgtgaaaacgatgcttcggctgacagctgaacgcgatacattaaacgtagtcttcgatcaggtcggtactcctacctatgctgcggacttggctgctttcatacaccgtctggctataggacaactgcccgttaagacggggctgtatcactttagcaacgaaggtgtatgctcctggttcgactttgcagtggccattgcccgaatgagtggtcatacagcatgcaggatcagcccttgccatagcgatgaatatccgacaagagtaagacggccgcattattccgtcttggataagacgcttattaaaaacactttcgacatcagcatccctcactggcaggattctttggctgcgtgtctgaatctgctaaaacattga

SEQ ID NO: 49691 - protein, 285 aa, Porphyromonas gingivalis W83
MNRILVTGADGQLGSELRLLASADSRFVFTDLAELDIRDKDAVLRFMEEYSIGIIINCAAYTAVDKAEDDEASAEKVNHQAAAHLAAAAAKYDALLIHISTDYVFDGTANIPYREDIPTAPLGAYGRTKLKGEQAVLAADCRYMILRTSWLYSSFGNNFVKTMLRLTAERDTLNVVFDQVGTPTYAADLAAFIHRLAIGQLPVKTGLYHFSNEGVCSWFDFAVAIARMSGHTACRISPCHSDEYPTRVRRPHYSVLDKTLIKNTFDISIPHWQDSLAACLNLLKH

SEQ ID NO: 49692 - DNA, 903 bp, Gloeobacter violaceus PCC 7421
  CDS (1)..(903): transl_table=11
gtgcgcttttcccgaccgatacagaagtgttttatgtatttgattaccggcgcgggcggacaactgggcaaggagctgtgcgcgctgcttgaagcgcgggaagagcctttcgtcgcctatgggcgggcacagctcgatatcgccgattccggagccgtccggcaggcccttgagcagagcggtgcagcggtgcttttcaactgcgccgcttatacccgcgtcgacaaggccgaatcggaagctgaagaagcgcaccgggtcaacgccaccggagcaagggttcttgcggaagcttgcagcgcggcgggcagccggttggtccacgtttctaccgactatgtctttgatggaagtgcgtgtcggccttacccggaagacgctccaacccaaccgctcgggatctacggccagagtaagcgcgatggcgaagtggcggtgctcgaaggggacggggagcatctggtggtccgcactgcctgggtctacggcgtcggcgggccgaattttgtgcgcacgatcttgcgcctggcgggcgaacgcgaacagttgcgcgtggtggccgatcaggtgggctctcctacctggaccttcgacctggccgcagcgctcgtgggattgacaaaggcccaggccgaaggcggcatctaccacgtgaccaatagcggggtgaccagctggtacgacttcgcggtcgcaattgtcgaggaggcgcaggcgctcggtcgtgccctcaagctgcaaagcgtggtaccgatcaccaccgccgagtacccgacacccgcagcgcggcctgcctattcggtgctctccaacacccgggctctgcgggtgctgggtggtcccctgccgcagtggcgccaatcgctgcggcgcatgctccaacagctcgacaaggaggggtga

SEQ ID NO: 49693 - protein, 300 aa, Gloeobacter violaceus PCC 7421
MRFSRPIQKCFMYLITGAGGQLGKELCALLEAREEPFVAYGRAQLDIADSGAVRQALEQSGAAVLFNCAAYTRVDKAESEAEEAHRVNATGARVLAEACSAAGSRLVHVSTDYVFDGSACRPYPEDAPTQPLGIYGQSKRDGEVAVLEGDGEHLVVRTAWVYGVGGPNFVRTILRLAGEREQLRVVADQVGSPTWTFDLAAALVGLTKAQAEGGIYHVTNSGVTSWYDFAVAIVEEAQALGRALKLQSVVPITTAEYPTPAARPAYSVLSNTRALRVLGGPLPQWRQSLRRMLQQLDKEG

SEQ ID NO: 49694 - DNA, 882 bp, Vibrio vulnificus YJ016
  CDS (1)..(882): transl_table=11
atgagagtgttgattgttggatcaagtggacaactgggccactgtttggtgagatctctgcagactgagcatgacattttggcgctggatcgccagcagctggatatttgtgaagagcaagctgtggaaaaggtatttgcaacctttcagccccagtttgtgattaacgcggctgcttatacggcggttgataaagcggaaagtgagccagagatggcttatcgggttaatgaggaaggccccaaattattggctcaagaatgccatcatcatggctgtcctctggtacatatctctacagactatgtctttgatggcgataaaaatggcctttactgcgaagatgatcgtcctgcgccaggtaatatttacgggatgagtaaactcgccggagagcatgcggtacaacacgcttgttcacagtactatattttgcgtacctcttgggtgttttctgagtttggcaataacttcgtcaaaaccatgttaaggcaaggggctgaaagaacacaattgggtattgtttctgatcaagtcggtgggccaacctacgctggagatatcgcgcgtgtgatcggaaggttacttgaacgctttcagtttggcgagcccgttgagtatggtctgtaccatttttcgggcatgccacacgtgagttggtttgagtttgctcaagcgatttttgggttggcgcacgagcaaggagtgttgaaaaggaaggttgagttaaaaccactgagcacacgagagtacccgaccgccgcaataaggccgatgaactcaaggttagattcaacaaaacttaagagccaactgcagcttgaagcgagtgattggaaagcggcacttaaccaactcgatcgctatgtggagcaaaaataa

SEQ ID NO: 49695 - protein, 293 aa, Vibrio vulnificus YJ016
MRVLIVGSSGQLGHCLVRSLQTEHDILALDRQQLDICEEQAVEKVFATFQPQFVINAAAYTAVDKAESEPEMAYRVNEEGPKLLAQECHHHGCPLVHISTDYVFDGDKNGLYCEDDRPAPGNIYGMSKLAGEHAVQHACSQYYILRTSWVFSEFGNNFVKTMLRQGAERTQLGIVSDQVGGPTYAGDIARVIGRLLERFQFGEPVEYGLYHFSGMPHVSWFEFAQAIFGLAHEQGVLKRKVELKPLSTREYPTAAIRPMNSRLDSTKLKSQLQLEASDWKAALNQLDRYVEQK

SEQ ID NO: 49696 - DNA, 1347 bp, Corynebacterium diphtheriae NCTC 13129
  CDS (1)..(1347): transl_table=11
atgcaggttcgccccactgccattgccggtgttgttattgtcgacctcgatctccacggcgataatcgtggatggtttaaggagaactggcagcgggagaaaatggtggcggcgggcttgccggatttccaaccagtacaaaacaacatttctttcaatgctgaacgtggcgtaacgcgtggtttacatgctgagccgtgggacaagtttgtttcggtggctcatggtgaggtgtttggtgcgtggtgtgacctgcgcgagggttctgacaccttcggcgaggtagttacctgcaccattacccctcatactgcggtgtttgtgccgcgtggggtggccaatggttttcaggcactggtagacaacacaagttacacctacttggtcaacgaccattggtcgccggacgctacttatactgcggtgaatctggacatgattgattggccgcttcctcccacggagatttcggaaaaggatcgttgccacccccagcttgccgaggccaccccgatgccaccacgtcgcattctcatcaccggcgcccatggccagttggggcgtgcgctagccgagttgttgccggatgccgagttgtgttcgcatgtggatttcgatgtggttcatcccccgcagcgctcgtggcgccagtatgaggcgattattaactgcgcggcctataacaatgtggatgcggcagaagatgatcgtgctcgcgcatgggaggtcaatgctgttgccccagcaaggctggcccagattgctacggagaataatctgacgttggtgcatgtgtcgacggatttcattttcgacggcaccacgtccgtgcatgaggagacggaagcgccgtcgccgttgtcggtgtatggggcgtcgaaggcggcgggtgatattgcggctgctgtgacaccgaaacactatgtggtgcgtacgtcgtgggtctttggccaaggtggcaactttgtggaaaccatgcgttcgttggcgcagcgcgggattcgccccaatgtgattagcgaccagcgtggtcgtccaacccatgcagcggatttggcggccggtattgtgcatttgctgcgcagcagcgcagattatggtgtgtacaacctttctaattctggcgatgtggtcggccgcgatgatcttgcccgcgcagtatttgaacactgtggggtatccggtgaggcggtcacatctgttaccacagccgagtacgaggtccacagaggcccgttggccaagcgccccgcggagtcgacgttcaacttggacaagattgtggccacgggttttcaaccgcgcccatggcgggatgctgtgcgggattacttgggcaccaagtag

SEQ ID NO: 49697 - protein, 448 aa, Corynebacterium diphtheriae NCTC 13129
MQVRPTAIAGVVIVDLDLHGDNRGWFKENWQREKMVAAGLPDFQPVQNNISFNAERGVTRGLHAEPWDKFVSVAHGEVFGAWCDLREGSDTFGEVVTCTITPHTAVFVPRGVANGFQALVDNTSYTYLVNDHWSPDATYTAVNLDMIDWPLPPTEISEKDRCHPQLAEATPMPPRRILITGAHGQLGRALAELLPDAELCSHVDFDVVHPPQRSWRQYEAIINCAAYNNVDAAEDDRARAWEVNAVAPARLAQIATENNLTLVHVSTDFIFDGTTSVHEETEAPSPLSVYGASKAAGDIAAAVTPKHYVVRTSWVFGQGGNFVETMRSLAQRGIRPNVISDQRGRPTHAADLAAGIVHLLRSSADYGVYNLSNSGDVVGRDDLARAVFEHCGVSGEAVTSVTTAEYEVHRGPLAKRPAESTFNLDKIVATGFQPRPWRDAVRDYLGTK

SEQ ID NO: 49698 - DNA, 894 bp, Rhodopseudomonas palustris CGA009
  CDS (1)..(894): transl_table=11
gtgcggatcgtcgtcaccggtcgtcacgggcaggtcgcgcaggcgctctacgagcgcgccgccggaaccaatgccgagatcgtcctgctgtcccggccggagattgacctgacgcgccagagcgacatcgaaacagcattgagcgcagtcaagccggacgcggtcgtcaatgctgcggcctacacggccgttgatcaggccgagagtgagcccgacctcgcttatgcgatcaacgccgagggtgcgggcgccgtggctcgcgcggccgcgaagctcggtgtgccgatggtgcagctgtcgaccgactacgtgttcgacggcaccgccgagcagccgtatcgcgagaccgatccgaccaacccgctcagcgtctatggcgccagcaagctggccggcgagcgggcggtggcgaaagccacacccgatcatgcggtgttgcggacctcctgggtgtatagcccgttcggcaagaatttcgtccgcaccatgctggccctggcccggcagcgcgatgaggtgcgggtggtctgggatcaggtcggctccccgaccagcgcgctcgatatcgccgacggtgtgctgggcgtcgtccggaatctgctggcggagccaacacgttccgatctgcggggcatcttccacatgactgcggacgggaccgccacatgggcagcgttcgccgaagcgattttcgccgcatcacgagcagccggcggaccatccgcgaaagtgatcccgattccgaccaccgagtacccgacccccgccaagcggccgacgaattccaggctcgacagctcggcgctcgccgccgctcacggcattcgcctgccgcactggcggcaatcgctgcagccgtgtatcgagcggctgctagcgcaggacgcgaactga

SEQ ID NO: 49699 - protein, 297 aa, Rhodopseudomonas palustris CGA009
MRIVVTGRHGQVAQALYERAAGTNAEIVLLSRPEIDLTRQSDIETALSAVKPDAVVNAAAYTAVDQAESEPDLAYAINAEGAGAVARAAAKLGVPMVQLSTDYVFDGTAEQPYRETDPTNPLSVYGASKLAGERAVAKATPDHAVLRTSWVYSPFGKNFVRTMLALARQRDEVRVVWDQVGSPTSALDIADGVLGVVRNLLAEPTRSDLRGIFHMTADGTATWAAFAEAIFAASRAAGGPSAKVIPIPTTEYPTPAKRPTNSRLDSSALAAAHGIRLPHWRQSLQPCIERLLAQDAN

SEQ ID NO: 49700 - DNA, 843 bp, Geobacter sulfurreducens PCA
  CDS (1)..(843): transl_table=11
atgatcctggtggtcggtgccaagggaatgctcggccgcgacctcatgcgggtgctgccgggggacgtgcggggggtcgatatcgaagagatcgacattacctcgccggaatcggtacggcgggtcattctgaccctgaagccgcgggtggtggtgaactgtgccgcctacaccgatgtggacggctgcgagaccaacgcggaccttgccatggcggtgaacggcgagggggtggggcacctggccgccgtgacccgcgagatcggggcgctgctcgttcagatgagcaccgattacgtgttcgacggcgtcaaggagagcccgtttctggaggatgatccgcccaatcccctgagcgtgtacggcagatcgaagcttatgggcgaggaacaggcccgtgaaacccccgatcacctcatcgtccggacccagtggctctatgggctcggcggcaagaacttcgtggaaaccatgctgcgcctgtcgacggagcggagcgaaatcgccgtggtggacgaccagatcggctcccccacctggacagtggaccttgccctggccatcagcgaactgatagagaacaactgccgcggcacctatcatgcggccaacagggggatctgttcctggttcgatttcgcccgcgccatttttgccgaagcaggagtggagatgaccgtccggccccagaccaccgcccaactgggccggccggccccgcgtcccctctattcggctctctgctgcgacaagttgacccgggacacggggctcgaactggaaggctggcgcgaggcacttgccacctatttggaaaagcggcgcgaagccggattgtcctga

SEQ ID NO: 49701 - protein, 280 aa, Geobacter sulfurreducens PCA
MILVVGAKGMLGRDLMRVLPGDVRGVDIEEIDITSPESVRRVILTLKPRVVVNCAAYTDVDGCETNADLAMAVNGEGVGHLAAVTREIGALLVQMSTDYVFDGVKESPFLEDDPPNPLSVYGRSKLMGEEQARETPDHLIVRTQWLYGLGGKNFVETMLRLSTERSEIAVVDDQIGSPTWTVDLALAISELIENNCRGTYHAANRGICSWFDFARAIFAEAGVEMTVRPQTTAQLGRPAPRPLYSALCCDKLTRDTGLELEGWREALATYLEKRREAGLS

SEQ ID NO: 49702 - DNA, 924 bp, Mycobacterium avium subsp. paratuberculosis K-10
  CDS (1)..(924): transl_table=11
atgtcaggcaggatcgtgatcgccggcgccggtgggcagctgggcggctatttgagcgcgctggcggctggtcagggccgtgacgtggtggcgctgacgtccgcgcagtgggacatcaccgacccggcggcggccgaacacatcgtgcggcccggcgacgtggtgatcaactgcgcggcctacaccgacgtcgacggcgccgagagcgacgaggcgggcgccttcgcggtcaacgaggccggccccgggcatatcgcgcgggcctgcgcgcgcgccggcgcccggctgctccacgtctccaccgactacgtgttcggcggcgagtccccggccggtgccccggaccggccgcgcccctacgagcccggcgaccccgtcgccccgcagggcgtgtacgcccgcagcaaggtcgcgggggagcgggcagtgctggcggcgctgccggatcccgcgcagggcgtcgtggtgcgcaccgcctgggtctacaccggcggcaccggcaaggacttcgtcgccgtcatgcgccggctggccgcgggggagggcccggtgcaggtggtcgacgaccagatcgggtcgccgacctacgtcggcgacctggcggccgcgttgctgcagatcgtcgacgaccgggtgcccgggccggtcctgcacgccgccaatgagggcgcggtgtcccgcttcgagcaggcccgcgcggtcttcgaggaatgcggcgccgacccggcgcgggtgcggccggtgggcaccgagcactttccccggccggcgccgcggccgacctactcggcgctgggcagccgcgagtccgccgcggccgggctgcgcccgctaaggccctggcgccctgcgcttgtcgccgcgctcaccaacgctggtagcccggccgcggcggatcgaccgttaccctctacgcgtgactga

SEQ ID NO: 49703 - protein, 307 aa, Mycobacterium avium subsp. paratuberculosis K-10
MSGRIVIAGAGGQLGGYLSALAAGQGRDVVALTSAQWDITDPAAAEHIVRPGDVVINCAAYTDVDGAESDEAGAFAVNEAGPGHIARACARAGARLLHVSTDYVFGGESPAGAPDRPRPYEPGDPVAPQGVYARSKVAGERAVLAALPDPAQGVVVRTAWVYTGGTGKDFVAVMRRLAAGEGPVQVVDDQIGSPTYVGDLAAALLQIVDDRVPGPVLHAANEGAVSRFEQARAVFEECGADPARVRPVGTEHFPRPAPRPTYSALGSRESAAAGLRPLRPWRPALVAALTNAGSPAAADRPLPSTRD

SEQ ID NO: 49704 - DNA, 987 bp, Lactobacillus johnsonii NCC 533
  CDS (1)..(987): transl_table=11
atgaaagtttttgtaactggcgttaatggtcaacttggccatgacgtaatgaatgaacttgctaaacgtggctatgaaggtgtgggatcagacttagcacctgaatatgccggtgtagctgacggcaccgctgtgactaaggctccatacgtttccttagatattactgatgcagacgcagtagacaaggttatttctgaagtaaagccagatgttattgttcactgtgctgcttggactgcagttgacatggctgaagatgatgataaggtagctgctgttcgtaaagttaacgttgatggaactcaaaacatcgctaatgttgctaaaaagctagatgctccaatggtttacttatcaactgactacgtctttgatggtcaaggaactactccttgggaacctgactttaagggttacaagccattaaatgtttacggtgaaactaagcttggtggagaagaagctgttgctaataccttggacaagtacttcatcgttcgtattgcttgggtatttggtgtaaatggttctaactttattaagacaatgcttaaagttggttcaaaccatgaggaagttaaggttgttagcgaccaagtaggtacaccaacctatacttttgatttagctcgtttattggtagacatgattgaaactgataagtacggctactaccatgcaactaatgcggaattgccagcaagtgaaggcgaccatgacgaaaatggtactaagactggctatatttcttggtacgatttcactaaagaaatctatcgtcaagcaggctacaagactagggtaactcctgtaactacggaagaatacggcttatcaaaggctgttcgtccatttaactcacgccttgacaagagtaagttagaagaaaacggctttaagccacttccaacttggccagatgctatcagtcgctacttagatattttaaaggccgacggcttctttgatgagttagggaagtaa

SEQ ID NO: 49705 - protein, 328 aa, Lactobacillus johnsonii NCC 533
MKVFVTGVNGQLGHDVMNELAKRGYEGVGSDLAPEYAGVADGTAVTKAPYVSLDITDADAVDKVISEVKPDVIVHCAAWTAVDMAEDDDKVAAVRKVNVDGTQNIANVAKKLDAPMVYLSTDYVFDGQGTTPWEPDFKGYKPLNVYGETKLGGEEAVANTLDKYFIVRIAWVFGVNGSNFIKTMLKVGSNHEEVKVVSDQVGTPTYTFDLARLLVDMIETDKYGYYHATNAELPASEGDHDENGTKTGYISWYDFTKEIYRQAGYKTRVTPVTTEEYGLSKAVRPFNSRLDKSKLEENGFKPLPTWPDAISRYLDILKADGFFDELGK

SEQ ID NO: 49706 - DNA, 921 bp, Leptospira interrogans serovar Copenhageni str. Fiocruz L1-130
  CDS (1)..(921): transl_table=11
atgatttattatactggaaaaaacggtcagttaggttgggaattggccgaaagatttaaatctaatggattggaagcagtaggatttggtagggaagaatgggatcttgcagatcttgattctgccgcacgaattttgaaggattctcctcggattttagttcattgtggagcttatactgcggtagataaggcagagtccgactcagagaacgcttacaaaatcaattcgttatctgtaaaaaaaatttcggaagaatgtctaaaaagaaaaatccatttaatttatatatccactgattttgtgtttgatgcaaattcggaaacgatcggtgatacgattcgtttttggaaaccggattctacactttctccgaaaggaatctacggattgtcaaaggcggaaggggaaaagtggattcgaaatacgtttgcgaattctaaacaagcaaatatagttcgtaccagttgggtatattcctctcatggaaataattttccaaaaacaattgtgaaacttttacaagattccaatcgtcatgaattaagagtgatcgaagatcaattgggaagacctacttgggctggtaggcttgcggattttataatattcttaatttatggaattctaaaaggagaatcttatcctgagattctacatttttctaactcaggagttgcgagctggtacgattttgcacttgcggttcgggatttttcacattctttttcattgatagaaaatttgaagccgatttatccaattcctacggaaggttatccaacacctgcacctaggcctagatattcaattttagatttagaagaaactcgaaaaatttttggcgttgttccgcattggagagaggatttaaccctttgtctgaaagaacttgccgaagtttccggaaaaaaagtatga

SEQ ID NO: 49707 - protein, 306 aa, Leptospira interrogans serovar Copenhageni str. Fiocruz L1-130
MIYYTGKNGQLGWELAERFKSNGLEAVGFGREEWDLADLDSAARILKDSPRILVHCGAYTAVDKAESDSENAYKINSLSVKKISEECLKRKIHLIYISTDFVFDANSETIGDTIRFWKPDSTLSPKGIYGLSKAEGEKWIRNTFANSKQANIVRTSWVYSSHGNNFPKTIVKLLQDSNRHELRVIEDQLGRPTWAGRLADFIIFLIYGILKGESYPEILHFSNSGVASWYDFALAVRDFSHSFSLIENLKPIYPIPTEGYPTPAPRPRYSILDLEETRKIFGVVPHWREDLTLCLKELAEVSGKKV

SEQ ID NO: 49708 - DNA, 885 bp, Parachlamydia sp. UWE25
  CDS (1)..(885): transl_table=11
atgaaaaagatttgggtatgtggcgcatcgggtatgcttggttctcatttcaaacgtttattaaacaaacggcaactgtcttttgttgccaatgatgataaaaaaattgatattaccaatttagaagccgttttagattttgtaagaacagaacaaatcactcatatcatcaattgtgcggcttacacaaaagttgataaagctgaaacagatctcaaacaagcttatctcgtcaatgcctgtggaccacaccatcttggaattgcagctcggcaccagaatgcgcatgtcattcatttctcgactgattatgtgtttgatggaaaagagaacttgccttataccgaagaacatgcttgcgctcccattggagcttatgggataagtaaattagctggagaaatcaaactcttagatgaatttgatcgctcttgtgtcattcgcacatcttggttatttggcttaccaggcaaaaattttgttgaaacaatgttaagattgatgaatgaaaaagcacagatcaagattgtttgcgatcagatgggaagaccgacttatgcgcaagatttagctgaagttgctttacaatttttggataagtcgggaatttatcactttgctaactcttctgaaactaactggtatgagtttgctaaagagatttatagacaaggaaaggaatttcaattgattcaaagggattgtcaaatagaacctattatgactcatgaatatccgacacaggccaaacgacctgcttattctactttaaatactcaaaaaatagagtctgtgcttagatggaaaccacgtccctggcaagaggcattaaaagattatttgacgatatataaaaatttccaagataggcaacaggtgagctaa

SEQ ID NO: 49709 - protein, 294 aa, Parachlamydia sp. UWE25
MKKIWVCGASGMLGSHFKRLLNKRQLSFVANDDKKIDITNLEAVLDFVRTEQITHIINCAAYTKVDKAETDLKQAYLVNACGPHHLGIAARHQNAHVIHFSTDYVFDGKENLPYTEEHACAPIGAYGISKLAGEIKLLDEFDRSCVIRTSWLFGLPGKNFVETMLRLMNEKAQIKIVCDQMGRPTYAQDLAEVALQFLDKSGIYHFANSSETNWYEFAKEIYRQGKEFQLIQRDCQIEPIMTHEYPTQAKRPAYSTLNTQKIESVLRWKPRPWQEALKDYLTIYKNFQDRQQVS

SEQ ID NO: 49710 - DNA, 876 bp, Desulfovibrio vulgaris subsp. vulgaris str. Hildenborough
  CDS (1)..(876): transl_table=11
atgaccgcgcggccgcgtgcggtcgtactggggggacgcaccgggcttctggggcagtccctcgtgcttgcgttgcgaaacggcggctgggatgccgtgcccgtcggacgcgacgatgtcgacgtccttgacgcagaacgcctggccgacttcatcgacaaggcttcgccacaagcggtcttcaacaccgtggcgtggacgcaggtcgaccttgcagaagagcatgagcaggaagccgcccaactgaaccgggcgctgcccgcctctcttggacgcatcgttcgtggtaccggcatgcaccttgtgcatctgagcaccgacttcgtgttcaacggacgcaagacgacgccctactccaccgacgacacccccgacccggcttcagtctacggggcgaccaaactggctggcgaaaccgccctcctgtccatcgcccccgacaactgctgcgtcgtccgcaccgcatggctgttcggtcccggcagacgcaacttcgttcagaccattctgggactgtgcgccgccaaggacgacatacaggtggtgcacgaccagacggggtcgccgacctacacggtggaccttgccgccggttgtgtacgccttgccgaattgcgggcaacgggtcttttccatgtggtcaacgcagggcaggcaagctggtgcgaactggcctccgaagccgtgcatctggcgggcctgcactgcaaggtgcacgccatcacttccaaggactggcctcagaaggccgcccgccctgcctactccgtactcgacacgtcacgtttcacagaagtcaccggcatcgtcccccgcccatggccacaggccttgcgggactacatctacaaggattgcatcccctccgggaactga

SEQ ID NO: 49711 - protein, 291 aa, Desulfovibrio vulgaris subsp. vulgaris str. Hildenborough
MTARPRAVVLGGRTGLLGQSLVLALRNGGWDAVPVGRDDVDVLDAERLADFIDKASPQAVFNTVAWTQVDLAEEHEQEAAQLNRALPASLGRIVRGTGMHLVHLSTDFVFNGRKTTPYSTDDTPDPASVYGATKLAGETALLSIAPDNCCVVRTAWLFGPGRRNFVQTILGLCAAKDDIQVVHDQTGSPTYTVDLAAGCVRLAELRATGLFHVVNAGQASWCELASEAVHLAGLHCKVHAITSKDWPQKAARPAYSVLDTSRFTEVTGIVPRPWPQALRDYIYKDCIPSGN

SEQ ID NO: 49712 - DNA, 810 bp, Picrophilus torridus DSM 9790
  CDS (1)..(810): transl_table=11
atgaaaaaaatattgatatttggatcatccggtcagctgggatcgcaattaataaatttattaaaagatgattatgaattaattaaaatatcacacaaagaccttgacttcaataaattctatttaatagaggatataatattaaaaaacaatcctgatattataataaactgtgcagcattaacagacgttgatagatgcgaaatatataagaatgaggcatataatgtaaatgccggggcagtaaggcatataataagaccgttaaaagtaacagagtcatattttataaatatttcaacagattatgtttttaatggcataacaggaaattacagggaagatgatctacctgatccggttaattattatggccttacaaagctccttggtgatatatacgcaaattcttatgataatactttaataataaggacttccggggtatttcttaacaagggatttccggtatttgtttacaaaaatttaatggagaataaaagggtaacagcaattcctggatattattctccaatatcggcgtttaatctggctatggcaataaaagatattataccattgaatagaacaggaatattgaacatagcaggaaataaaatatcaagatatgatcttgctttaagaatatcagagatgtacaatttaaataaaaatatagatgagaataatattgaattgaaagcaaaaagaccatttgattcatctttgaatatagaaagggcaaaaaaattgattaatttcaatttttatgatatagatataaatttaaaacacatggtaataaaatga

SEQ ID NO: 49713 - protein, 269 aa, Picrophilus torridus DSM 9790
MKKILIFGSSGQLGSQLINLLKDDYELIKISHKDLDFNKFYLIEDIILKNNPDIIINCAALTDVDRCEIYKNEAYNVNAGAVRHIIRPLKVTESYFINISTDYVFNGITGNYREDDLPDPVNYYGLTKLLGDIYANSYDNTLIIRTSGVFLNKGFPVFVYKNLMENKRVTAIPGYYSPISAFNLAMAIKDIIPLNRTGILNIAGNKISRYDLALRISEMYNLNKNIDENNIELKAKRPFDSSLNIERAKKLINFNFYDIDINLKHMVIK

SEQ ID NO: 49714 - DNA, 909 bp, Acinetobacter sp. ADP1
  CDS (1)..(909): transl_table=11
atgaaaatactgatattgggcaaaaatggacaagtcggctgggaattacaacgatcgcttcagcccttaggtgaagttattgctttagatcgatatgaagatgttgagcatggctttagtggtgatatcacaaattttgaagccattgaaaaagtgatacaaacattccaacctgatattgtgctcaatgcaactgcatatacggcggttgataaagcagagtcagaggttgaacaggccgatttggtcaatcatattgctgtgaagcatttggccgagcaatgcaaagcaatagatgctttactcatacattattctacagattatgtatttaatgggcagggcacagcagcttggcaggaagatgatacgacagaacctcaaaatgcgtatggaaaaaccaaacgaaatggtgagattgcgcttgaacaaagtcaggtaaagtttatcaatttacgtacaagctgggtgtatgcttcacgtggtcataactttataaaaaccatgcttaagctggctcaaagtaaagatgaacttagcattattgatgatcagattggtgcacctactggcgcagctttaattgcagatgtgacagcacaaattgttcgttattatgctttgcagccacaacttcagcaaaagcatttgctcggtcattatcatttggccgctcagggtgagacatcttggtatgcttatgcaaattatatctttgatgttgccaaagcacatggattagcacttcagcttaaaacagtgaagccaatatcgacagttgattatcctacaccagcagttcgaccgctcaactcaagattaaatactcagaaactccaacaaatgtttgctttacaccttcctcaatggcagcaaggtgttgagcatatgattaaagagaccctataa

SEQ ID NO: 49715 - protein, 302 aa, Acinetobacter sp. ADP1
MKILILGKNGQVGWELQRSLQPLGEVIALDRYEDVEHGFSGDITNFEAIEKVIQTFQPDIVLNATAYTAVDKAESEVEQADLVNHIAVKHLAEQCKAIDALLIHYSTDYVFNGQGTAAWQEDDTTEPQNAYGKTKRNGEIALEQSQVKFINLRTSWVYASRGHNFIKTMLKLAQSKDELSIIDDQIGAPTGAALIADVTAQIVRYYALQPQLQQKHLLGHYHLAAQGETSWYAYANYIFDVAKAHGLALQLKTVKPISTVDYPTPAVRPLNSRLNTQKLQQMFALHLPQWQQGVEHMIKETL

SEQ ID NO: 49716 - DNA, 852 bp, Erwinia carotovora subsp. atroseptica SCRI1043
  CDS (1)..(852): transl_table=11
atgaaaatattactgacgggtgcaaatgggcaattgggtcgctgttttcaggatcgtcttcccacccactggcaaatatggtcaacggatgctaacgaacttgatatcactgatttaacgcagattgaagcggctatagcacgctatcaaccagacgcgattgttaatgcggcagcctatacagccgttgataaagcagaatcagaatcagtattagcagaaaagataaatgttaccggtccccataatttggctaccgtagcacatcaaaagggaatccgattagtccacgtttcaacggattatgtctttgatggaaatgccacgacgccttatcttgaatccagtaccactaatcccttaagcgtatacggtaaaacaaagttagctggcgagcaggccgtaacgaaagcagcccccgacgccatcatcgttcgtacagcttgggtgttcagtgaatacggtaataatttcgttaagacgatgctgaggctggcaaaagaacgtgacgcattaagtatcgttgccgatcaaaagggatgcccaacttatgcaggggatttagcgcaggcgattatttctcttattgagaaaaatgcggaatgcggaatttatcactattgcggtgataaagaagttagctggtatgaatttgcaaaaaccatttttgaaatggcaaaacagcaagacattatcgataaacagccacagttaactgcaataacaactgagcagtaccctaccccggcccatcggcctcaatactcgtcattatcgtgtgaaaaaatcgcgagattgacaataaaaccatcagactggactgacgcattgtcacaagtcttggcacgttga

SEQ ID NO: 49717 - protein, 283 aa, Erwinia carotovora subsp. atroseptica SCRI1043
MKILLTGANGQLGRCFQDRLPTHWQIWSTDANELDITDLTQIEAAIARYQPDAIVNAAAYTAVDKAESESVLAEKINVTGPHNLATVAHQKGIRLVHVSTDYVFDGNATTPYLESSTTNPLSVYGKTKLAGEQAVTKAAPDAIIVRTAWVFSEYGNNFVKTMLRLAKERDALSIVADQKGCPTYAGDLAQAIISLIEKNAECGIYHYCGDKEVSWYEFAKTIFEMAKQQDIIDKQPQLTAITTEQYPTPAHRPQYSSLSCEKIARLTIKPSDWTDALSQVLAR

SEQ ID NO: 49718 - DNA, 855 bp, Streptococcus pyogenes MGAS10394
  CDS (1)..(855): transl_table=11
atgattttaattacaggaagcaatggtcaattagggacagaacttcgatacttattagatgaacgaggtgttgattatgtagccgttgatgtcgcagaaatggacatcacaaatgaagacaaagtcgaagctgtttttgcgcaggtcaagccaacattggtctatcattgtgctgcttatacggcagttgatgcagcagaagacgaaggaaaagccttgaatgaggctattaatgtaacaggctcagaaaatattgccaaggcttgtggaaaatatggggctacccttgtttacatttcaacagactacgtatttgatggcaataaaccagtcggtcaagaatgggtagaaacagatcgtccagaccctaagacagaatatggccgtacaaaacgtttaggagaactagctgttgaacgatacgcagagcatttttatattatccgtactgcttgggtatttggaaattatggtaaaaactttgtctttaccatggagcagttagcggaaaatcactcccgtttgactgttgtcaatgaccaacacggtcggccaacgtggacaagaaccttggcagaattcatgtgttatttgacagagaatcaaaaagcctttggttactatcacttgtcaaatgatgctaaggaagacaccacttggtatgattttgccaaagaaatcttaaaagacaaggctgttgaagtggtgccagttgattcatcagctttcccagcaaaagccaaacgtcctttaaattcaaccatgaatcttgataaggcaaaagcgacagggtttgttattccaacatggcaagaagccttgaaggcattttaccaacaaggactgaaaaagtaa

SEQ ID NO: 49719 - protein, 284 aa, Streptococcus pyogenes MGAS10394
MILITGSNGQLGTELRYLLDERGVDYVAVDVAEMDITNEDKVEAVFAQVKPTLVYHCAAYTAVDAAEDEGKALNEAINVTGSENIAKACGKYGATLVYISTDYVFDGNKPVGQEWVETDRPDPKTEYGRTKRLGELAVERYAEHFYIIRTAWVFGNYGKNFVFTMEQLAENHSRLTVVNDQHGRPTWTRTLAEFMCYLTENQKAFGYYHLSNDAKEDTTWYDFAKEILKDKAVEVVPVDSSAFPAKAKRPLNSTMNLDKAKATGFVIPTWQEALKAFYQQGLKK

SEQ ID NO: 49720 - DNA, 888 bp, Leifsonia xyli subsp. xyli str. CTCB07
  CDS (1)..(888): transl_table=11
atggcgcgctatctgatcgccggagcccacggccagctcggccaggacctccagcgtgcgctggccggccgagaggtgaccgccctcggccgcgccgatctcgacgtcacggaccgtgacaccgttctggccgccgtcgcgggccacgacgtggtcatcaacgcctccgcctacacgaaggtggatgacgccgagacccacgaggacgacgcctacgcgatcaacgcgaccggcaccgagaacctcgccgtggccgcggcgcaacacggcgcgacgtttgtgacggtctccaccgactacgtcttcgacgggtctggcgccgagccctacgccgaggacgccccgcgcgacccgatcaacgcctacggccgaaccaaagccgccggcgaagagctcgcgctggccacgcatcccggcggcacctacatcgtccgcaccgcgtggctgtacggcgcgggcggcgcgaacttcgccaagacgatggtgagactcgccgagagccacgaaacggtgagcgtcgtggccgaccagatcggccagccgacctggaccggcgacctggccgagcggatcgtgacgctcctcgactcggacgcgccccccggggtgtaccacggcacgaactccggccaggcgagctggttcgcgttcgccaaggcggtcttcagcgccgccgggctggaccctgatagggtccttccgaccgacagcgccgcgttcacccgaccggctccccggccgtcctactcagtgctgggtcacgagggctggaggcgcgccggcctgaaacccatgcggccgtgggaagaagcgctggccgacgcagcacaacatggagtcctggatcaggagcggaatgacgacgacactcagggtggtggtcgatga

SEQ ID NO: 49721 - protein, 295 aa, Leifsonia xyli subsp. xyli str. CTCB07
MARYLIAGAHGQLGQDLQRALAGREVTALGRADLDVTDRDTVLAAVAGHDVVINASAYTKVDDAETHEDDAYAINATGTENLAVAAAQHGATFVTVSTDYVFDGSGAEPYAEDAPRDPINAYGRTKAAGEELALATHPGGTYIVRTAWLYGAGGANFAKTMVRLAESHETVSVVADQIGQPTWTGDLAERIVTLLDSDAPPGVYHGTNSGQASWFAFAKAVFSAAGLDPDRVLPTDSAAFTRPAPRPSYSVLGHEGWRRAGLKPMRPWEEALADAAQHGVLDQERNDDDTQGGGR

SEQ ID NO: 49722 - DNA, 855 bp, Bacillus cereus E33L
  CDS (1)..(855): transl_table=11
atgaaagaacggattatcataacaggagcaaatggtcaattaggaaagcagctacaagaagagttaaatcctgaagaatatgacatatatccatttgataaaaagttgttagatataacaaatatatcccgagtgcagcaagtggtacaagaaataaggccacatatcattattcattgtgcagcgtatacgaaggttgatcaagctgagaaagagcgagatcttgcttatgtaataaatgcaataggggctcgaaatgtagcggttgcttcacaattagttggggcgaagttagtttatattagtacggattatgtatttcaaggcgacagaccggaggggtacgatgaatttcataatccggcgccgatcaatatatacggggcttctaaatatgcgggagagcagttcgtcaaagagttacataataaatactttatcgttcgtacatcgtggttatatggtaagtatggaaataattttgtgaaaacgatgatacgattagggaaagaaagagaagaaatatctgttgtagcggatcaaatcggttctcctacgtatgtggcggatttaaatgtgatgattaataagctcattcatacttctttatacggtacgtatcacgtatccaatacaggatcatgttcttggtttggatttgcaaagaaaatattttcgtatgcaaatatgaaggtgaatgtgttacctgtttcaaccgaagaatttggggctgtagcagcaaggccgaaatattctattttccaacataacatgctacgattaaatggttttttgcaaatgccttcttgggaagaaggattagagcgtttttttatagaaaccaaaagtcattaa

SEQ ID NO: 49723 - protein, 284 aa, Bacillus cereus E33L
MKERIIITGANGQLGKQLQEELNPEEYDIYPFDKKLLDITNISRVQQVVQEIRPHIIIHCAAYTKVDQAEKERDLAYVINAIGARNVAVASQLVGAKLVYISTDYVFQGDRPEGYDEFHNPAPINIYGASKYAGEQFVKELHNKYFIVRTSWLYGKYGNNFVKTMIRLGKEREEISVVADQIGSPTYVADLNVMINKLIHTSLYGTYHVSNTGSCSWFGFAKKIFSYANMKVNVLPVSTEEFGAVAARPKYSIFQHNMLRLNGFLQMPSWEEGLERFFIETKSH

SEQ ID NO: 49724 - DNA, 885 bp, Legionella pneumophila subsp. pneumophila str. Philadelphia 1
  CDS (1)..(885): transl_table=11
atgaaaatattggttacaggtgctaatgggcaagttggtaccgagattatcaagcgattttcttcctctgagcatgaagtatatgcttgtaccagagatattctagattgttccaaactcgaacgggttcatgatgtgttatcggaaatcaagccggatcttatcattaatgcagcagcctatacggctgtagataaggcagaggatgaacctgatttggctcatattgtgaacgccgaatttgtctgtcgcctggtgaattattgtaccttgaaaaacgtccccttgatccatctttcaactgattatgtatttgatggagaaaaggagggagcctatcatgaaaccgatattccgcatccagtaagtacctatgggcgcacgaaatgggaaggagaacaggctattttatcccaacttaaaaagtatattattttgcgagttagctgggtatttggtgaacaagggaaaaattttgtaaaaacgattttaaatttggcttccagcagaaaagaattgaatattgtttcagatcaatcgggaaggcctacttcagctcgcgatatagcaagagtactatttgaaatagtacagaaaatcagacattcttcctttgactattgggggctttaccattatgcagggcagggtgttaccaattggcatgaatttgcaaacgtatttcttaatatggcaaaagagaaacagcttctcttaactttaaccgatttaaatccaattaagtcacaagaatatcctactagggcaacaaggcctaaaaattcggtactggatacaacaaagatagaaacaatattgggtataaaaagctgtagttggaaaaatgatttgccagatgttatcgaccattttacaaaaaagtaa

SEQ ID NO: 49725 - protein, 294 aa, Legionella pneumophila subsp. pneumophila str. Philadelphia 1
MKILVTGANGQVGTEIIKRFSSSEHEVYACTRDILDCSKLERVHDVLSEIKPDLIINAAAYTAVDKAEDEPDLAHIVNAEFVCRLVNYCTLKNVPLIHLSTDYVFDGEKEGAYHETDIPHPVSTYGRTKWEGEQAILSQLKKYIILRVSWVFGEQGKNFVKTILNLASSRKELNIVSDQSGRPTSARDIARVLFEIVQKIRHSSFDYWGLYHYAGQGVTNWHEFANVFLNMAKEKQLLLTLTDLNPIKSQEYPTRATRPKNSVLDTTKIETILGIKSCSWKNDLPDVIDHFTKK

SEQ ID NO: 49726 - DNA, 891 bp, Bacteroides fragilis YCH46
  CDS (1)..(891): transl_table=11
atgaaaaacatattgattatcggtgccaatggatttacggggcgccggatactgaatgacttatcggttaaccctatataccacgtcacaggatgctcgctgagagatgacatttgtcccggcaaagattatcgcttcgtacgtaccgatatccgagacgaaaatgaagtacggaaattatttaaagaatgccggccggatatcgtaatcaacacctctgccctttcggtaccggactattgcgaaacccatcatgcagaagctgaagctacaaatgttacagcagtcgaaacgatagcacatgtttgcgaacagtatggcagccgtttcatccatctttccacggactttgtatttgacggtaaaagtacccggctctacaaggaagaagatgaagcgattccggtgaattattacggtgttacgaaactgaaagccgaaaagattatagccagcatttgtagtaattatgccatagtacgtgtagtcgtcgtttatggaaaagcccttccgggacagcatggcaacatccttcagctagtagccaaccggttgagaaacggagaaacgatccgtgtcgtatccgatcaatggcgtacaccgacctttgttggagatatttcagtaggagtagaaaagctgatgtttcatacagccaacggcatctatcatatttgcggcagcgaatgcctcacaattgccgaaatcgcctaccgggtggctgattttctgaaactggatcgttcattgatcgaacccgtcactaccgaggaaatgaaagagactactccccgcccgcgtttcagcggattaagtatcgaaaaggctaaagccgaaatcgggtacactccgcgcacattggaagaaggtatggaggcttctttgttctaa

SEQ ID NO: 49727 - protein, 296 aa, Bacteroides fragilis YCH46
MKNILIIGANGFTGRRILNDLSVNPIYHVTGCSLRDDICPGKDYRFVRTDIRDENEVRKLFKECRPDIVINTSALSVPDYCETHHAEAEATNVTAVETIAHVCEQYGSRFIHLSTDFVFDGKSTRLYKEEDEAIPVNYYGVTKLKAEKIIASICSNYAIVRVVVVYGKALPGQHGNILQLVANRLRNGETIRVVSDQWRTPTFVGDISVGVEKLMFHTANGIYHICGSECLTIAEIAYRVADFLKLDRSLIEPVTTEEMKETTPRPRFSGLSIEKAKAEIGYTPRTLEEGMEASLF

SEQ ID NO: 49728 - DNA, 897 bp, Burkholderia mallei ATCC 23344
  CDS (1)..(897): transl_table=11
atgaagattttggtgacgggggcaaacggccaagtgggctgggaactcgctcggagtctggcggtattggggcaagttgtcccgctcacgcgtgagcaggccgatctcggccgccccgaaacgcttgctcgaattgttgaggacgcgaagccggatgtcgtcgtcaatgctgcggcatatacggcggtcgatgctgcggaaaccgatggtgctgcagcgaatgtgatcaacggtgaggcggtaggtgtgctggccgccgcgacgaagcgtgtcggcggcttgttcgttcattactcgacggactacgtttttgacggcaccaagccgtcgccatacatcgagacggatccgacgtgtcccgtcaatgcctacggcgccagcaagttgctgggagagttggcggttgcggagaccggcggcgactggctgacgtttcgcaccacgtgggtgttcgccgcacgcggcaagaacttcctgcgaacgatgcttcgtcttgccaaggagcgcgaagagatgaagatcgtggccgatcagttcggcgcgccgacctgggcgcgatcgattgctgacggcacggcccacgcgctcacgaccgcgatgcgtgaacgcgcggcaggcgcgttcacgtccggcgtctatcacatgacatccgcggggcagacttcatggcacggtttcgcggacgcgatcatcgcatcctggcgagcggctccgggggcggcaccgctcgccgtcagccggatcgtgccgattccggcgagcgcctatcccgtgccggcacagcgcccggcaaactcggtactgtcgaacaaggcgctgaaagagcgtttcggtatcgaactgcctgattggcggtatgcagtagggctgtgcgtcaacgatctgctttcccaatga

SEQ ID NO: 49729 - protein, 298 aa, Burkholderia mallei ATCC 23344
MKILVTGANGQVGWELARSLAVLGQVVPLTREQADLGRPETLARIVEDAKPDVVVNAAAYTAVDAAETDGAAANVINGEAVGVLAAATKRVGGLFVHYSTDYVFDGTKPSPYIETDPTCPVNAYGASKLLGELAVAETGGDWLTFRTTWVFAARGKNFLRTMLRLAKEREEMKIVADQFGAPTWARSIADGTAHALTTAMRERAAGAFTSGVYHMTSAGQTSWHGFADAIIASWRAAPGAAPLAVSRIVPIPASAYPVPAQRPANSVLSNKALKERFGIELPDWRYAVGLCVNDLLSQ

SEQ ID NO: 49730 - DNA, 906 bp, Methylococcus capsulatus str. Bath
  CDS (1)..(906): transl_table=11
atgaagatcctcgtcgtcggcaggagcgggcaactggcctgggaactgcggcgcacgctggcctgtttcggcgaggtcgtcgcgctcgatcgccagtcggaaccggcgatcgatctggccgagcccggtgccgttgccgccttggtgcgcgccgtcaggcccgatctgatcgtcaacgcggcagcctataccgcggtcgatcgggccgagcaggagccggatttggcctggaaggtgaacgccgaggcgccggctgtgctggcagcggaagcgacgcgtctgggcataggcctgatccattattcgaccgactacgtttttcccggtgacggcgctgtgccgtaccgggaggacgacccggttggtccgcggaacgtgtatggccgcagcaaactggccggggagcaggccatcgctgcatccggcgccgctcacctcattctccgcaccgcctgggtctatggggtgcgcggccagaacttcctgaggaccatgttgcggctcatggccgagcgcgaggtggtgcgggtcatcgacgatcagttcggagctcccacctgggttcggatgatcgccgaggcgacggcgattctggtggcgagctcactgcgttccggcacggccgatttggcgggggcgagcggtgtctaccatctcacctgcagcggccagaccagctggtacggcttcgcctgcgccatccgggagcatgccgtggccgccggattgctccccgacactgcggcccgggtcgaggccatcccgacttcggaatatcccactccggccaagcggccggctcattcggtgctggatttgggcaagctcgaggcgcgcttcggcatcgtgctccccgtttgggaccaggcgctggagctttgtttggccgatctggccggtcggtga

SEQ ID NO: 49731 - protein, 301 aa, Methylococcus capsulatus str. Bath
MKILVVGRSGQLAWELRRTLACFGEVVALDRQSEPAIDLAEPGAVAALVRAVRPDLIVNAAAYTAVDRAEQEPDLAWKVNAEAPAVLAAEATRLGIGLIHYSTDYVFPGDGAVPYREDDPVGPRNVYGRSKLAGEQAIAASGAAHLILRTAWVYGVRGQNFLRTMLRLMAEREVVRVIDDQFGAPTWVRMIAEATAILVASSLRSGTADLAGASGVYHLTCSGQTSWYGFACAIREHAVAAGLLPDTAARVEAIPTSEYPTPAKRPAHSVLDLGKLEARFGIVLPVWDQALELCLADLAGR

SEQ ID NO: 49732 - DNA, 858 bp, Nocardia farcinica IFM 10152
  CDS (1)..(858): transl_table=11
gtgaccgacgccgtaccgcaccgttcgcccgcccgtctcgtcgtcaccggcgcggccgggcaggtcggccgccacctgatgcgcctggccccgcacgcgcgcggatacgaccgcgcgcacctcgacatcaccgacgccgacgccgtccgcgccgtcgtccacccgggggatgtggtgatcaactgcgccgcctacaccgccgtcgacaaggccgagaccgaacccgacgccgccttcgccgtcaacgggaccggtccggccgtgctggcgtcggcctgcgcacgcgcgggcgcccgactcatccatctgtccaccgactacgtcttcgggggtacccacaccgacccgtacgaacccacggatccgaccgccccggcctcggcgtacgggcgctccaagctggcgggggagcgggcggtgctcgacctggcccccgccgcgcacgtggtgcgcaccgcctgggtctacaccggcgaccggggcgatttcgtcgccaccatgcgccgcttcgccgccgaacgccccaccgtcgacgtggtcgacgaccagatcggatcgcccacctacgccgccgacctggccgcgggcctgctcgaactcgccgccaccccggcggcgccgccgctgctgcacgccaccaacgccgggacggcgagctggttcgagctggcgcgggcggtgttcgccgagatcggcgccgatcccgagcgggtgcggccgtgcgcgtcctcggccttcccgcggcccgcgccgcggccggcctactcggtgctgtcgaaccgggcctgggtcgcggccggtctgaccccgctgcgaccctggcgggcggcactgcacgaggcgttgggcaaccgctga

SEQ ID NO: 49733 - protein, 285 aa, Nocardia farcinica IFM 10152
MTDAVPHRSPARLVVTGAAGQVGRHLMRLAPHARGYDRAHLDITDADAVRAVVHPGDVVINCAAYTAVDKAETEPDAAFAVNGTGPAVLASACARAGARLIHLSTDYVFGGTHTDPYEPTDPTAPASAYGRSKLAGERAVLDLAPAAHVVRTAWVYTGDRGDFVATMRRFAAERPTVDVVDDQIGSPTYAADLAAGLLELAATPAAPPLLHATNAGTASWFELARAVFAEIGADPERVRPCASSAFPRPAPRPAYSVLSNRAWVAAGLTPLRPWRAALHEALGNR

SEQ ID NO: 49734 - DNA, 885 bp, Legionella pneumophila str. Lens
  CDS (1)..(885): transl_table=11
atgaaaatattggttacaggtgctaatgggcaagttggtaccgagattatcaagcggttttcttcttctgagcatgaagtatctccttgtaccagagatattctagattgtttcaaactcgaacgggttcaagatgtgttatcggaaatcaaaccggatcttatcattaatgcagcggcctatacggctgtagataaggcagaggatgaacctgatttagctcatattgtgaacgccgaatttgtctgtcgcctggtcaattattgtagcttcaaaaacatccccttgatccatctttcaactgattatgtatttgatggagaaaaagagggagcctatcatgaaaccgatattccgcatccagtaagtacctatgggcgtacgaaatgggaaggagaacaagctattttatcccaacttaaaaagtatattattttgcgagttagctgggtatttggtgaacaagggaaaaattttgtaaaaacgattttaaatttggcttccagcagaaaagaattgaatattgtttcagatcaatggggaaggcctacttcagctcgcgatatagcaagagtactatttgaaatagtacagaaaatcagccattcttcctttgactattgggggctttaccattatgcagggcagggggttaccaattggcatgaatttgcaaacgtatttcttaatatggcaaaagagaaacagcttctcttgactttaaccgatttaaatccaattaaatccgaagaatatcctactagggcaacaaggcctaaaaattcggtacttgatacaacaaagatagaaacaatattgggtataaaaagctgtagttggaaaaatgatttgccagatgttatcgaccattttacaaaaaagtaa

SEQ ID NO: 49735 - protein, 294 aa, Legionella pneumophila str. Lens
MKILVTGANGQVGTEIIKRFSSSEHEVSPCTRDILDCFKLERVQDVLSEIKPDLIINAAAYTAVDKAEDEPDLAHIVNAEFVCRLVNYCSFKNIPLIHLSTDYVFDGEKEGAYHETDIPHPVSTYGRTKWEGEQAILSQLKKYIILRVSWVFGEQGKNFVKTILNLASSRKELNIVSDQWGRPTSARDIARVLFEIVQKISHSSFDYWGLYHYAGQGVTNWHEFANVFLNMAKEKQLLLTLTDLNPIKSEEYPTRATRPKNSVLDTTKIETILGIKSCSWKNDLPDVIDHFTKK

SEQ ID NO: 49736 - DNA, 873 bp, Streptococcus thermophilus LMG 18311
  CDS (1)..(873): transl_table=11
ttgaattacgaggagaaaaatatgattctagtaacaggtgcaaatggtcaactcggaactgaacttcgtcaccttcttgacgagcgtaacgaagagtatgtagcagtagatgtggcagaaatggacatcactgatgctgacaaagtagatgaagtgtttgcggaagtaaaaccaaccctggtctatcactgtgctgcctacacagctgttgatgctgctgaagatgaaggcaaagaacttgactatgctattaacgtgactggtactgaaaatgtcgctaaggctgcagaaaaacatggtgcaacgcttgtttatatttcaacggactacgtttttaatggtgaaaaaccagtcggtcaagagtgggaagttgatgataaaccagatccacagacagagtatggtcgtacaaaacgcatgggtgaagagctagttgaaaaacatgtgactaactactacattatccgtacttcctgggtgttcggtaactatggtaaaaattttgtcttcactatgcaaaaccttgctaaaactcacaagacgctgacagtcgttaatgaccaacatggccgtccaacttggacacgtactttggcagagtttatgacttatttagctgaaaaccgtaaggaatacggttactatcacttgtcaaatgatgcagcagaagatacaacttggtatgactttgcggtcgaaatcctcaaagatactgatgttgaagtgaaacctgttgattcaagccaattcccagctaaagctaaacgtcctcttaactcaacaatgagtttggctaaggctaaggcaacaggatttgtcatcccaacatggcaagatgctttgaaagagttttacaaacaagaagtgaaataa

SEQ ID NO: 49737 - protein, 290 aa, Streptococcus thermophilus LMG 18311
MNYEEKNMILVTGANGQLGTELRHLLDERNEEYVAVDVAEMDITDADKVDEVFAEVKPTLVYHCAAYTAVDAAEDEGKELDYAINVTGTENVAKAAEKHGATLVYISTDYVFNGEKPVGQEWEVDDKPDPQTEYGRTKRMGEELVEKHVTNYYIIRTSWVFGNYGKNFVFTMQNLAKTHKTLTVVNDQHGRPTWTRTLAEFMTYLAENRKEYGYYHLSNDAAEDTTWYDFAVEILKDTDVEVKPVDSSQFPAKAKRPLNSTMSLAKAKATGFVIPTWQDALKEFYKQEVK

SEQ ID NO: 49738 - DNA, 897 bp, Azoarcus sp. EbN1
  CDS (1)..(897): transl_table=11
gtgaagctgctggtgaccggcgcgaacggccaggtcgggtgggagctcgcgcgcagcctgatgccgctcggcgacgtaatcgcgctcgaccgcagccgctgcgacctgtcgcggccggctgcgctcgcagcgctggtggacgaactcgagccggacgtcatcatcaacgccgcagcctacaccgcagtcgaccgcgccgagagcgacgaagctgcggcgacgctgatcaacggcgtcgcgccgggcgaactcgcgcgcgtcgcgaagcgcaggggcgcgctgctggtgcattactcgaccgactacgtgttcgacggcacgaaatccgcgccgtacgacgaggacgacccggttgcgccgatcaacgcctatggccgcagcaagctcgccggcgaactggcgatcggcgaaagcggctgtgaccacctgattttccgcacgacctgggtgttcgcggcgcgcgggggcaatttcgtgcgcacgatgctgcgcctgggcgccgagcgcgacagcctgcacgtcgtcgccgatcagatcggcgctccgacctgggcgcgcaacattgccgatgcaacggcgcttgcgctcgcccgggcgcaggcggagcggcagcagcgcagcttctcgtcgggcgtgttcaatctcgcgtcccgcggagagaccagctggcacggttttgccgaggcgattttcgccggcgcgcgagcgcagctgcccggcatcggcctgaaagtcgccgccgtggcgccgattccgtcatccgcctatccgacgccggccgcgcgacccgccaactcgcgcctcgctgcgggcaagctgcaggcgcggttcggcatcgtcatgccgcgatgggacgaggcgctcgcgcgctgcctcgatgaactcgcggggcggtga

SEQ ID NO: 49739 - protein, 298 aa, Azoarcus sp. EbN1
MKLLVTGANGQVGWELARSLMPLGDVIALDRSRCDLSRPAALAALVDELEPDVIINAAAYTAVDRAESDEAAATLINGVAPGELARVAKRRGALLVHYSTDYVFDGTKSAPYDEDDPVAPINAYGRSKLAGELAIGESGCDHLIFRTTWVFAARGGNFVRTMLRLGAERDSLHVVADQIGAPTWARNIADATALALARAQAERQQRSFSSGVFNLASRGETSWHGFAEAIFAGARAQLPGIGLKVAAVAPIPSSAYPTPAARPANSRLAAGKLQARFGIVMPRWDEALARCLDELAGR

SEQ ID NO: 49740 - DNA, 870 bp, Synechococcus elongatus PCC 6301
  CDS (1)..(870): transl_table=11
atgaaggttttactgacaggggctgctggacaggtcgggcaagccctccagcgatcgcatcctgatggggtcgatctgattgcctgcggtcgccagcaactcgatctcagtgacgagtctgcgatccgcgcagccattcagacccttcgtcctgactgggtaattaatgccggtgcttataccactgtcgatcgagcagaatctgagccagccctggcgatagcaatcaacagcaattcagtcagaattctggccgaaagtttggctgaaacgggtggaaatttactgcaaatctcgacagattttgtttttaatggcgatcgcaatcggccttatccaaccgatgctgaacgccagcccttgagcgtctatggcacaaccaaagctgccgctgaagaagcaatcctacagtttctgcccgagcgatcgctgattgtacgcacagcttgggtttatggactaggtggccgcaactttgtcaccacgatgctgcgcttgatggcagaacgcgatcacctcactgtcgtctgggatcaggttgggacacccacctggactgatagtttggccgctgctctttggcaagcgatcgcccagaacctcatgggaattcaccactgcaccgatgccggtgtagccagttggtatgactttgccgtagccattcaagaccttgccctagagctgggattacttcagcaggcagtcccgatcgctgccattcccagcagtgactacccgaccccagccacccgcccggcctatagcgtgctggattgtgccgactttaatcgagcgattggccacgatcccctacactggcgccatgccttggctcaaatgctgacgcaagttgcaaagaaccaatga

SEQ ID NO: 49741 - protein, 289 aa, Synechococcus elongatus PCC 6301
MKVLLTGAAGQVGQALQRSHPDGVDLIACGRQQLDLSDESAIRAAIQTLRPDWVINAGAYTTVDRAESEPALAIAINSNSVRILAESLAETGGNLLQISTDFVFNGDRNRPYPTDAERQPLSVYGTTKAAAEEAILQFLPERSLIVRTAWVYGLGGRNFVTTMLRLMAERDHLTVVWDQVGTPTWTDSLAAALWQAIAQNLMGIHHCTDAGVASWYDFAVAIQDLALELGLLQQAVPIAAIPSSDYPTPATRPAYSVLDCADFNRAIGHDPLHWRHALAQMLTQVAKNQ

SEQ ID NO: 49742 - DNA, 894 bp, Gluconobacter oxydans 621H
  CDS (1)..(894): transl_table=11
atgtccagcacaggtcccattctcgtcacgggcggcaacggccagcttgcgacgtctcttcagaatctcggcaacgagcgcatcatccgcgtcggccgtccggaattcgatttcgaccgcccggaaaccattgccgccacgatcgagaagtacaagccgtcagttgtcgtgaacgcagccgcctggacggccgtcgatctggccgaaacggaaaaggacggtgccgaacgcgccaacaattccggcccggcagcgctcgccgcagcctgcgccaaggcggatatcccgttcatccatgtctcgacagactacgttttttccggtgataagggcacgccctataccgaagaggatgccacctctcccgagacggtctatggcagcaccaaggccgaaggcgaacaggccgtcctgaccgccaacatcaagagcatcatcctgcgcacgtcctgggtctattcggcccacggcaaaaacttcgtgcgcacgatgatcaatgcgggcgccaaaaaccccgtgctcaaggtcgtcggtgaccagaagggcaacccgaccagttcggacgatctggccgaagccattctcgccatcatcgccctgatcgagcgcgatggctggaagccggaatatcgcggcattttccatgccagcggaacgggtgagaccacatggcacggcctggccgtcgccgcgctggaagaggccgcaaagcatggccagaccatgccgcaggtcaacgccatccgcaccgaagactggcctacgccggccaagcgtccgcaggactcccggatggacaattcgaagctccatcgcgtcttcggcgtaaaaatgccggactggcgccacagcgtgacgcatatcgtccacaagctgttttctcctgaagcctga

SEQ ID NO: 49743 - protein, 297 aa, Gluconobacter oxydans 621H
MSSTGPILVTGGNGQLATSLQNLGNERIIRVGRPEFDFDRPETIAATIEKYKPSVVVNAAAWTAVDLAETEKDGAERANNSGPAALAAACAKADIPFIHVSTDYVFSGDKGTPYTEEDATSPETVYGSTKAEGEQAVLTANIKSIILRTSWVYSAHGKNFVRTMINAGAKNPVLKVVGDQKGNPTSSDDLAEAILAIIALIERDGWKPEYRGIFHASGTGETTWHGLAVAALEEAAKHGQTMPQVNAIRTEDWPTPAKRPQDSRMDNSKLHRVFGVKMPDWRHSVTHIVHKLFSPEA

SEQ ID NO: 49744 - DNA, 909 bp, Xanthomonas oryzae pv. oryzae KACC10331
  CDS (1)..(909): transl_table=11
gtgaccacgctggtttttggcgcaaatgggcaggtgggtacggaattgctgcgtgcgctggcagtcgatggcgccgtacaggccaccacgcgtagtggccagttgcccgacggcagcgcgtgtgaaacagcagacttcgatgcgcctgagacgctgaccgcattgctggatcgaatcaagccgtcgcgtgtggtcaatgccgccgcttacacggcggtagatcgtgccgagcaggatcgggaaggtgcgacccgtgccaatgcgacggcacccggcgtcgtcgcagcctggtgcgcgtccaatcgtgtgccgcttgtgcattactccaccgattacgtcttcgacgggcagggtaaagcgccatatcgcgaggacgcgcagacgtcgccactcggcgtgtacggcgaaaccaagcttgccggcgagcaggccatccgtgcctccggcgcccagcatctgatcctgcggactgcttgggtctacgcctcgcatggcgcgaacttcctgcgcacgatgttgcgggtaggggcggagcgggacgagttgcgtgtggtggccgatcagatcggaacaccgacgtcggcggcattgattgccgatgtcactgcacaactgctgcgtcagcgcacgcccgatacatcggggacctggcatctcaccgcggctggccagaccagctggcatggatttgccgaggcaatcttcgaagaggcggtcagtgccgggttgctggagcgtgcaccgcgcgtggtgccgatcacgacggccgattatccgacgccagccaggcgtccggcatattcgcggttgtccatcgatacactgcagggcgatttcggtatcgagctgcctgagtggcgcgttggcctgcagcgtgtgattgccgagctgtctgcgacgaagaagtag

SEQ ID NO: 49745 - protein, 302 aa, Xanthomonas oryzae pv. oryzae KACC10331
MTTLVFGANGQVGTELLRALAVDGAVQATTRSGQLPDGSACETADFDAPETLTALLDRIKPSRVVNAAAYTAVDRAEQDREGATRANATAPGVVAAWCASNRVPLVHYSTDYVFDGQGKAPYREDAQTSPLGVYGETKLAGEQAIRASGAQHLILRTAWVYASHGANFLRTMLRVGAERDELRVVADQIGTPTSAALIADVTAQLLRQRTPDTSGTWHLTAAGQTSWHGFAEAIFEEAVSAGLLERAPRVVPITTADYPTPARRPAYSRLSIDTLQGDFGIELPEWRVGLQRVIAELSATKK

SEQ ID NO: 49746 - DNA, 864 bp, Neisseria gonorrhoeae FA 1090
  CDS (1)..(864): transl_table=11
atgagaatcctattgacaggctcgaaaagccaactggcacactgcctgcgcgaccgtcttcctgaagactgggaaaccattgcgacggattccgcatccctagacattaccgatgccgatgccgtctgcaacatggtcaaaagtttccaacccgacgctattgtcaacacggctgcctatactgccgtcgacaaagcggaaggcgatgcggcagcggcatttgccgtcaatgcttccgccgtttacaaccttgccttggcagcacatcgcgcccatgcccgattcatccacatctcaaccgactatgtctttgacggaaaagggaaaataccctatcaggaaagcgactttaccaacccttccaatgtatacggacaatccaaaaccgccggcgaactgctcgcactgtctgccaatcccgacagccttatcctgcggacttcttggctgtttagcgaatacggggacaactttgtccgcacgatgctgaaccttgcgcgggaacgttccccgctgtccgccgtccacaaccaaatcggctgcccgacctatgccggcgacttgtccgccgccatcatccgcctgttgcagcagtccaatcccgttcgcggcatttaccactacgccggcggcaaatccgtatcctggtacgaatttgcccggcacatctttcagacggcattgcaacaggatgcctcttttcccgttcccgaactgaaagccgtttcggatgaaggctctgcggctgccgcccccaggcccgcatacagcattttggactgccgcaaaatcgaaaacgacttcggcatcaaaccgtcagactggcaaaaagcccttgcacaggtcgtttccaagctgctctga

SEQ ID NO: 49747 - protein, 287 aa, Neisseria gonorrhoeae FA 1090
MRILLTGSKSQLAHCLRDRLPEDWETIATDSASLDITDADAVCNMVKSFQPDAIVNTAAYTAVDKAEGDAAAAFAVNASAVYNLALAAHRAHARFIHISTDYVFDGKGKIPYQESDFTNPSNVYGQSKTAGELLALSANPDSLILRTSWLFSEYGDNFVRTMLNLARERSPLSAVHNQIGCPTYAGDLSAAIIRLLQQSNPVRGIYHYAGGKSVSWYEFARHIFQTALQQDASFPVPELKAVSDEGSAAAAPRPAYSILDCRKIENDFGIKPSDWQKALAQVVSKLL

SEQ ID NO: 49748 - DNA, 864 bp, Bacteroides fragilis NCTC 9343
  CDS (1)..(864): transl_table=11
atgaatatattggtcaccggagccaacgggcaacttggcaatgaaatgcaggtacttgccagagaaaacctgcagcatacgtatttttttacggatgtacaggagttggacatttgtgatgaacaggctgtttatgcctatgtgagtgaacataagattgacatcatcgtgaactgcgctgcttatacagcggtagacaaggctgaggataatgtcgaactttgcgacaaactgaataatatagcaccgggatatctggcacgggcggctcaggctaatggcgctgcaatgattcaagtttctaccgattatgtgtttgacggtacagcgcatattccttatacggaagaggaacctacttgtccggcttcggtttatggctctaccaagctggcgggcgaacagaacgtgatggatcattgcgagaaagctatggtaattcgtacggcatggttgtactccatctatggcaataattttgtaaagacaatgattcgtctcgggcaggagcgtgattctttgggagtcattttcgatcagatcggtacaccgacttatgctaatgatttggcccaggctatttttgcagcgatcaataaaggcgttgtccgcggcatttaccatttcagtgacgaaggagtttgttcctggtatgactttaccatagccatccatcgcctggcgggcattgcttcgtgtaaggtaaaaccgttgcataccgccgattatccggcaaaggcaccccgtccacactattccgtactcgataaaacaaagataaaagatacatttggcattgagatcccgcattgggaggagagcctgaagcgttgcattaatcaattaagaatggagacactttga

SEQ ID NO: 49749 - protein, 287 aa, Bacteroides fragilis NCTC 9343
MNILVTGANGQLGNEMQVLARENLQHTYFFTDVQELDICDEQAVYAYVSEHKIDIIVNCAAYTAVDKAEDNVELCDKLNNIAPGYLARAAQANGAAMIQVSTDYVFDGTAHIPYTEEEPTCPASVYGSTKLAGEQNVMDHCEKAMVIRTAWLYSIYGNNFVKTMIRLGQERDSLGVIFDQIGTPTYANDLAQAIFAAINKGVVRGIYHFSDEGVCSWYDFTIAIHRLAGIASCKVKPLHTADYPAKAPRPHYSVLDKTKIKDTFGIEIPHWEESLKRCINQLRMETL

SEQ ID NO: 49750 - DNA, 891 bp, Bacteroides fragilis NCTC 9343
  CDS (1)..(891): transl_table=11
atgaaaaacatattgattatcggtgccaatggatttacggggcgccggatactgaatgacttatcggttaaccctatataccacgtcacaggatgctcgctgagagatgacatttgtcccggcaaagattatcgcttcgtacgtaccgatatccgggacgaaaatgaagtacggaaattatttaaagaatgccggccggatatcgtaatcaacacctctgccctttcggtaccggactattgcgaaacccatcatgcagaagctgaagctacaaatgttacagcagtcgaaacgatagcacatgtttgcgaacagtatggcagccgtttcatccatctttccacggactttgtatttgacggtaaaagcacccggctctacaaggaagaagatgaagcgattccggtgaattattacggtgttacgaaactgaaagccgaaaagattatagccagcatttgtagtaattatgccatagtacgtgtagtcgtcgtttatggaaaagcccttccgggacagcatggcaacatccttcagctagtagccaaccggttgagaaacggagaaacgatccgtgtcgtatccgatcaatggcgtacaccgacctttgttggagatatttcagtaggagtagaaaagctgatgtttcatacagccaacggcatctatcatatttgcggcagcgaatgcctcacaattgccgaaatcgcctaccgggtggctgattttctgaaactggatcgttcattgatcgaacctgtcactaccgaagaaatgaaagaggttactccccgcccgcgtttcagcggattaagtatcgaaaaggctaaagccgaaatcgggtacaccccgcgcacattggaagaaggtatggaggcttctttgttctaa

SEQ ID NO: 49751 - protein, 296 aa, Bacteroides fragilis NCTC 9343
MKNILIIGANGFTGRRILNDLSVNPIYHVTGCSLRDDICPGKDYRFVRTDIRDENEVRKLFKECRPDIVINTSALSVPDYCETHHAEAEATNVTAVETIAHVCEQYGSRFIHLSTDFVFDGKSTRLYKEEDEAIPVNYYGVTKLKAEKIIASICSNYAIVRVVVVYGKALPGQHGNILQLVANRLRNGETIRVVSDQWRTPTFVGDISVGVEKLMFHTANGIYHICGSECLTIAEIAYRVADFLKLDRSLIEPVTTEEMKEVTPRPRFSGLSIEKAKAEIGYTPRTLEEGMEASLF

SEQ ID NO: 49752 - DNA, 849 bp, Sulfolobus acidocaldarius DSM 639
  CDS (1)..(849): transl_table=11
atggtgactctaataatcggtggctctggacaactaggtcaggaacttggaaagttaataaaggacagtatactcacctttagctcaagaccaattgaaggtggtatttacttagatacacgggactacataagggtagaagacttgatcatgaagactaaacctgaagttatcataaacacatctgcaattacagatgtggacaagtgcgaagtggatagaatcaatgcgcatagtgtaaattctttggctgtgaagcacatggtaagagcggcttcaataactaagtcatacttcgttcaaatatctacagattatgtatttgacggaaacagggggaactataatgaagacgatttaccaaaccctttgaattactatgggctcactaagttacttggagagacgtattctttatcttacgactactcacttgtaataaggacttctgggatctatgggagtaacaaggagaattttcctctttatgtcttgaagtcactggagaaggggagtaaggtaagggcagtttgggatatgtattactctcctattaatgttaaacaactagctgaggctatagtacagctgttacctttaaggaaaacgggtattttgaatattgctggggataggatatcaagatatgacttagccctaaaaattgctaaaatgtcctctctaaatgaaaacttgatagaagctgctagttacgaagaaatgtcgtggagggcaaaaagacccaaggactcttccctggactcgtcaactgttaagaaatatgtgagtgtcaatctgtccttagaggagggattaaggaggttgataaacgatgttcagaataaatga

SEQ ID NO: 49753 - protein, 282 aa, Sulfolobus acidocaldarius DSM 639
MVTLIIGGSGQLGQELGKLIKDSILTFSSRPIEGGIYLDTRDYIRVEDLIMKTKPEVIINTSAITDVDKCEVDRINAHSVNSLAVKHMVRAASITKSYFVQISTDYVFDGNRGNYNEDDLPNPLNYYGLTKLLGETYSLSYDYSLVIRTSGIYGSNKENFPLYVLKSLEKGSKVRAVWDMYYSPINVKQLAEAIVQLLPLRKTGILNIAGDRISRYDLALKIAKMSSLNENLIEAASYEEMSWRAKRPKDSSLDSSTVKKYVSVNLSLEEGLRRLINDVQNK

SEQ ID NO: 49754 - DNA, 852 bp, Rhodobacter sphaeroides 2.4.1
  CDS (1)..(852)
atgatcctcgtcttcggccgcaccgggcaggtggcgcgcgaactggcgcggcaggctccggacgcccgcttcctcggccgcgacgaggcggatctcgccgatcccgaggcctgtgcccgcgcgatccgcgaggcaaagcctgacgcggtgatcaatgccgccgcctggaccgccgtcgaccgggccgaggaggaggaggccccggccacagtggtgaacggggaggcccccggcgccatggcgcgggcctgcgccgagctcggcatccccttcgtgcagatctcgaccgactatgtcttcgacggctcgggcacccgcccctggcagcccggcgatccggtggggccgctcggcgcctacggccgctcgaagctcgcgggcgaagaggcggtgcgcgcggccggcggaccccatgcgatcctgcgcacctcctgggtcttctcggcccatggcgcgaatttcgtgaagaccatgctgcgcctcggggccacgcgcgaccggctcaccgtcgtctgcgatcaggtgggcgggcccacgcccgcggccgacatcgccgcggcctgcctcgcgatggcgcgcggccttgcggcccggcccgatctgtcgggcacctaccatctctcgggcggcccggacgtgagctgggccgacttcgcccgcgagatcttccgtcaggcggagctcgactgcctcgtggccgacatcgcgtccgcggactatccgcagaaggcccaccggccggccaattcccggatggactgttccgacctcgcccgcttcggcctctcccgccccgactggcggcagggtctcgcccgtgttctcgccgatctccaggaggtttccgaatga

SEQ ID NO: 49755 - protein, 283 aa, Rhodobacter sphaeroides 2.4.1
MILVFGRTGQVARELARQAPDARFLGRDEADLADPEACARAIREAKPDAVINAAAWTAVDRAEEEEAPATVVNGEAPGAMARACAELGIPFVQISTDYVFDGSGTRPWQPGDPVGPLGAYGRSKLAGEEAVRAAGGPHAILRTSWVFSAHGANFVKTMLRLGATRDRLTVVCDQVGGPTPAADIAAACLAMARGLAARPDLSGTYHLSGGPDVSWADFAREIFRQAELDCLVADIASADYPQKAHRPANSRMDCSDLARFGLSRPDWRQGLARVLADLQEVSE

SEQ ID NO: 49756 - DNA, 891 bp, Nostoc punctiforme PCC 73102
  CDS (1)..(891)
atgagtaaatcaattttgctgattggtagcaacggtcaagtaggtaaagaactgcaacaaatactcccatcctatggcgatattatctcagtagcacgcccaacagtagaccttgcccaacccgataccctccgcagcatcatcagatccaagcaaccacaaatcatcattaacgccgctgcttatactgctgtggacaaagcagaaagcgaacccgaacttgctagcgctattaatgctactgcgcccctaattattgcccaagaaagccaaaaattaggagcttttctaattcatatttcgacagattatgtttttgatggtaatgggtatcgcccttaccaggaaaccgatgcgactaatcccttgagtgtttatggtaaaaccaaacttgctggagaagaagcaattcgggaaacttgcgcccatcacctaatcctccgtactgcttgggtttatggaacctttggcaaaagtaactttgtcaaaaccatgctgcgactaggtgcagaacgtcaagaactccgtgttgtcgccgatcaaattggtagcccgacttgggcgcaagatatagccacagtcatagcccagacgattccccagttaaccccaaaaattggcggcacttatcactacactaatagcggtgttgctagctggtatgactttgcagttgccatttttgaagaagcccaacagctaggcttccctttaaaagttgaacatattgtccctattacaactgccgaatatccgacaccagcccgtcgccctgcttattccgtccttgcttgtggaaaaatttccgcaattgtagggacttatccttcccattggcgacaaagacttcggcaaatgcttgcagatttgaaaattgggtatgcggaatag

SEQ ID NO: 49757 - protein, 296 aa, Nostoc punctiforme PCC 73102
MSKSILLIGSNGQVGKELQQILPSYGDIISVARPTVDLAQPDTLRSIIRSKQPQIIINAAAYTAVDKAESEPELASAINATAPLIIAQESQKLGAFLIHISTDYVFDGNGYRPYQETDATNPLSVYGKTKLAGEEAIRETCAHHLILRTAWVYGTFGKSNFVKTMLRLGAERQELRVVADQIGSPTWAQDIATVIAQTIPQLTPKIGGTYHYTNSGVASWYDFAVAIFEEAQQLGFPLKVEHIVPITTAEYPTPARRPAYSVLACGKISAIVGTYPSHWRQRLRQMLADLKIGYAE

SEQ ID NO: 49758 - DNA, 1452 bp, Bifidobacterium longum DJO10A
  CDS (1)..(1452)
atggcatttgaattcgagaaggaactgaaggtcgagaagacgaacatcccgggccttctggtgttcgacctgccggtgcatggcgacaaccgtggctggttcaaggagaactggcagcgcgccaagatgatgggtctgggactgccggacttcggcccggtgcagaacaacatcagctacaacgcgaccaagggcgtcacccgtggcatccacgcggagccgtgggacaagtacatcagcatcgctgccggcgagatcttcggcgcgtgggttgacctgcgcccgggcgagagcttcggccaggtgtacacgacccgtttggatccgtccaaggcaatctacgtgcctcgcggcgtgggcaacagcttccaggcgctgcaggacggcacggtgtacacgtatctggtgaacgcgcactggtcgctcgagcagaagaagacctacacgttcgtgaaccttgcggatccggaactgaacatccagtggccgattccgctggaggagtccgagcgctccgaggccgatctgcaccacccgatgctcaaggacgccaagcccatggctcccaagcgcaccctggtgacgggctgcaacggccagctgggccacgcgattcgcgcctacgcggaagcgcatggtctggagggcttcgagtacacggacatcgacgagttcgacttctccgacccgaaggcatacgaggcatacgattggagcctgtacggcacgatcatcaacgccggtgcctacacggccgtcgacaaggccgagaccgccgaaggccgtccgatcgcgtggaaggcgaacgcccagggtccggctctgctggccaaggtggccaaggaccaccacatcaccctcgtgcacgtgagttcggattatgtgttcgacggcaccgccaaggaacacacggagacggaggcgttcgccccgctcggtgtgtacggccagaccaaggccgctggcgacatcgccgtggccaacgcacccgagcattacatcctgcgttccagctgggtgatcggcgaggggcacaacttcgtgaagaccatgatgatgctgtccaacaaggtcgccgacccggccgacaagctggaacaggtcaccgtggtggatgaccagtacggtcgcctgaccttcacccgcgacatggccgaggcgatcttccacctgcttgacagccatgccccctacggcacctacaacttgaccggttccggcgcagtgaagtcctgggctgacatcgcggccgaggtgttcgacctgacgaacggcaacggcagcaaggtcaagcccatcagcactgccgagtacttcgcgaacgcgaccaacccggtatctccgcgtccggtcaactccgcactggatcttgctaagatcggtgaagccggatacgtgcccgctgactgggaagagaccctcaagacctacgtgcagaaggaactcggctga

SEQ ID NO: 49759 - protein, 483 aa, Bifidobacterium longum DJO10A
MAFEFEKELKVEKTNIPGLLVFDLPVHGDNRGWFKENWQRAKMMGLGLPDFGPVQNNISYNATKGVTRGIHAEPWDKYISIAAGEIFGAWVDLRPGESFGQVYTTRLDPSKAIYVPRGVGNSFQALQDGTVYTYLVNAHWSLEQKKTYTFVNLADPELNIQWPIPLEESERSEADLHHPMLKDAKPMAPKRTLVTGCNGQLGHAIRAYAEAHGLEGFEYTDIDEFDFSDPKAYEAYDWSLYGTIINAGAYTAVDKAETAEGRPIAWKANAQGPALLAKVAKDHHITLVHVSSDYVFDGTAKEHTETEAFAPLGVYGQTKAAGDIAVANAPEHYILRSSWVIGEGHNFVKTMMMLSNKVADPADKLEQVTVVDDQYGRLTFTRDMAEAIFHLLDSHAPYGTYNLTGSGAVKSWADIAAEVFDLTNGNGSKVKPISTAEYFANATNPVSPRPVNSALDLAKIGEAGYVPADWEETLKTYVQKELG

SEQ ID NO: 49760 - DNA, 909 bp, Pseudomonas aeruginosa UCBPP-PA14
  CDS (1)..(909)
atgaaccggatccttctcctcggcgccaacggccaggtcggctgggagctgcagcgcgccctggcgccgctgggcgaactgctggtctgcgaccgccggcgcgccgatctcgccgaccccgaaggcctggcgcgactggttcgcgccgagcggccgcagttcatcgtcaacgccggcgcctacaccgcggtggacaaggccgagagcgatgccgacaacgcccgcctgatcaatgcccgcgccgtcgcggtactggccgaggaggccgcggcctgcggcgcctggctggtgcattactccaccgactacgtgttcgacggcgcgggcagcgcgcctttcgccgaggacgcgccgaccggcccgctgagcgtctacgggcagaccaagctggaaggcgagcaggccatccgcgccagcggctgccgccacctgatcttccgcaccagttgggtctacgccgcgcgcggcgggaacttcgccaagaccatgctgcgcctggccgggcaacgcgacgaactcaaggtcgtggccgaccagttcggcgcgccgaccagcgccgagctgatcgccgacgtcaccgcccaggccctgcagcgtctgcgctgggatgccgagctggcagcacgggccagcggcacctaccacctggtcgccagcggcgagacgtcctggcacctctatgcgcgcttcgtcatcgaacaggcgctggagcggggctgggaattgcaggcgacgccgcagcgggtcctgccgattgccaccgaggattacccggtgccggcgaagcgcccggccaattcgcgcctcgacaaccacaagctgcaacaggtcttcggcctggtactgcccgactggcgctaccatgccggacgcatgatccaggaactgagcgagcagggaccactatga

SEQ ID NO: 49761 - protein, 302 aa, Pseudomonas aeruginosa UCBPP-PA14
MNRILLLGANGQVGWELQRALAPLGELLVCDRRRADLADPEGLARLVRAERPQFIVNAGAYTAVDKAESDADNARLINARAVAVLAEEAAACGAWLVHYSTDYVFDGAGSAPFAEDAPTGPLSVYGQTKLEGEQAIRASGCRHLIFRTSWVYAARGGNFAKTMLRLAGQRDELKVVADQFGAPTSAELIADVTAQALQRLRWDAELAARASGTYHLVASGETSWHLYARFVIEQALERGWELQATPQRVLPIATEDYPVPAKRPANSRLDNHKLQQVFGLVLPDWRYHAGRMIQELSEQGPL

SEQ ID NO: 49762 - DNA, 894 bp, Fusobacterium nucleatum subsp. vincentii ATCC 49256
  CDS (1)..(894): transl_table=11
atgaaactaatatttggagctaatggtcaattaggaacagattttaaggaattatttgattctattggtgaaaagtatattgctactgataaagatgaagtagatataactaatggagattttttaagagcatatattaaaactatgcatcaaaattacaagatagacacaatcattaattgtgctgcatataatgatgtagataaagctgaaaccgaaaaagaattatgttataaattaaatgcagaagctcctgctaatttagcaatgatagcttcagaaataggagcaacatttataacatattcaacagattttgtttttaatggtcttatagaaggttacctatataatgaaagtacaggatatacagaagaagatgaacctcatccattatcgacctatgcaaaaacaaagtatgaaggagaattactagtatcacaagtaatagaaaatccagaaaatacttcaaagatatatatagtaaggacatcttgggtatttggaaagggaaatatcaattttgttgataagataattgaatggtcaaaacaaaaaaatgaattaaaagtggtagatgatcaagtttcttctccaacttattcaaaagatttagcttatttcagttgggaacttattaaaaaaggatgtgaaagtggcatttaccattttacaaatgatgatatagcttcaaaatatgatcaagctaaatatattttagaaaaaatttcttggaaaggaaatctaataagagctaaaagtgaagactttaatttattagcagaaagacctaaatttagcaaattgagttgtaaaaaaataaaagaaaagttgggtgtttctattcctaattggaaagatgcaatagatagatattttaaggaaaataagtaa

SEQ ID NO: 49763 - protein, 297 aa, Fusobacterium nucleatum subsp. vincentii ATCC 49256
MKLIFGANGQLGTDFKELFDSIGEKYIATDKDEVDITNGDFLRAYIKTMHQNYKIDTIINCAAYNDVDKAETEKELCYKLNAEAPANLAMIASEIGATFITYSTDFVFNGLIEGYLYNESTGYTEEDEPHPLSTYAKTKYEGELLVSQVIENPENTSKIYIVRTSWVFGKGNINFVDKIIEWSKQKNELKVVDDQVSSPTYSKDLAYFSWELIKKGCESGIYHFTNDDIASKYDQAKYILEKISWKGNLIRAKSEDFNLLAERPKFSKLSCKKIKEKLGVSIPNWKDAIDRYFKENK

SEQ ID NO: 49764 - DNA, 891 bp, Anabaena variabilis ATCC 29413
  CDS (1)..(891)
atgaatgaatcgatcctactaataggtggtaacggtcaagtaggtcaagaaatccaccaaatccttgcacctaaatacaaagttatctcagccgcacgacccaggatagacctaactcaagctgatagtctgcgtcaaatcatccaagaagtccaaccgcagataatcattaacgctgccgcttacactgctgtagacaaagccgaaactgaacccgaaatagccacagctatcaacgctacagcaccccaaattatcgccgaagaaagccaaaaactcggctcattcttaattcatatctccacagattacgtttttgatggacagcaaagtcacccttaccaagaaacagaccctactaatcccttaagtgtttacggtaaaaccaaactagccggagaaatagccattcaacaaacccacccccagcacctcattctccgtacagcttgggtttatggcagttttggtaaaagtaactttgtcaaaaccatgctacggttgggtgcagaacgccaagaaattcgggtagttaaagatcaaattggctcccctacttgggcgcaagatatcgctgacaccatagcccaggtgataccccaaataccggaaatttctgggacttaccactacacaaacactggggtaattagctggtatgactttgccgtggctatttttgccgaatcccaaaagctaggctttccgctcacagtccaacaaattattcctatcaccaccgccgaatatccgactttagctccccgccctgcctattctgtcctagcttgtgagaaaatgtcacaagttttgggaactgctcccccccattggcaagaaagactgcggttgatgcttcaagactggctctccaaatattcttcattatga

SEQ ID NO: 49765 - protein, 296 aa, Anabaena variabilis ATCC 29413
MNESILLIGGNGQVGQEIHQILAPKYKVISAARPRIDLTQADSLRQIIQEVQPQIIINAAAYTAVDKAETEPEIATAINATAPQIIAEESQKLGSFLIHISTDYVFDGQQSHPYQETDPTNPLSVYGKTKLAGEIAIQQTHPQHLILRTAWVYGSFGKSNFVKTMLRLGAERQEIRVVKDQIGSPTWAQDIADTIAQVIPQIPEISGTYHYTNTGVISWYDFAVAIFAESQKLGFPLTVQQIIPITTAEYPTLAPRPAYSVLACEKMSQVLGTAPPHWQERLRLMLQDWLSKYSSL

SEQ ID NO: 49766 - DNA, 915 bp, Ralstonia eutropha JMP134
  CDS (1)..(915)
atgcagcgtaagcgtacggtgccgactctactcgtaacaggatgcaacggccaggtcggattcgaactgcgtcgcagcctggccccgctgggcaatgtggtcgcgctggatcgctccgcctgtgacctggcaaatcccgatgcgctgcgccgcgtggtgcgccagtgccggcccgacgtcatcgtcaatccggcggcctatacggctgtagataaagcggaaaccgatgcagaggtcgcattcgccatcaatgccactgcggccggtatcctggccgaagaggcgaaggcccttggcagccttctggtgcactattcgagcgactacgtattcgacggcaccaaggacggcgcttacgtcgagaccgatgcggtcaatccgcaatccgtctacggtaaaagcaagctcgcaggcgaacaggccattgccgctacaggcgtccagtccgttgtgctgcgcacgtgctgggtagccggtgcgcatggcggcaactttgcaaagaccatgctgcgccttggcaaggagcgcgatagcttgcgtgtcatcgccgaccagtttggcgccccgacgaccgcatcgctgattgcagatgtcaccgctcagattgtggctcgtcactggctggcgggcgatcgtcaggcgtttgccaacggcatttatcaccttgcagcagcgggcgagacgacctggcacggctacgccaccgaagttcttcgttatgcgaaagcgcatggtgtggaactcaaggccgatcctgagcaaatcgaagccatccctgcaacggcatatccgcttccggcaccgcgtccgtccaattcgagactggataccacgcgcctgcaggaaaccttcggcatccatctaccggactggaagcagggcgtgcagttcctgctcgatcagattcttccctaa

SEQ ID NO: 49767 - protein, 304 aa, Ralstonia eutropha JMP134
MQRKRTVPTLLVTGCNGQVGFELRRSLAPLGNVVALDRSACDLANPDALRRVVRQCRPDVIVNPAAYTAVDKAETDAEVAFAINATAAGILAEEAKALGSLLVHYSSDYVFDGTKDGAYVETDAVNPQSVYGKSKLAGEQAIAATGVQSVVLRTCWVAGAHGGNFAKTMLRLGKERDSLRVIADQFGAPTTASLIADVTAQIVARHWLAGDRQAFANGIYHLAAAGETTWHGYATEVLRYAKAHGVELKADPEQIEAIPATAYPLPAPRPSNSRLDTTRLQETFGIHLPDWKQGVQFLLDQILP

SEQ ID NO: 49768 - DNA, 897 bp, Rubrivivax gelatinosus PM1
  CDS (1)..(897)
atgaggatcctgctgctcggcaagaacggccaggtgggctgggagctccagcgcgcgctcgcccccctcggcgaactgctcgcgctggcgcgcgacagcgcgccactcgcggccgatctcggctgccccgaggccttggtggcgacggtgcgccacgtgcgcccggacatcatcgtgaatgcagcggcctacaccgccgtcgaccgggccgagcgcgagccggcgctcgcgcgagccgtcaacgccatcgcgcccgcggtgctggcccgcgaggccgcaatgctgggcgccaccttggtgcacttcagcaccgactacgtgttcgacggctcgggcagcgcgccgcgagacgaaagcgcccggaccgccccgatcaacgtctatggtgagagcaagctcgagggagaaatggcgatccgcgccagcggctgccgccacctgatcctgcgctccagctgggttcatgcggcgcgcggcagcaacttcgcgaagaccgtgctgtgcctggccgccgaacgcgagcacctcgagatcgtcgacgaccagatcggagctcccaccggcgccgagctgctggccgacgtcaccgcgcacgccctgtggtcggttcgacaggaaccttcgctcgccgggacttaccacgtgaccgctggcggcgaaaccagtcggcatgcctatgcccttttcgtcatcgagcgggcgcgcgcccacggtcatccgctgaatgtggcagccgacgccgtccgtccggtccccaccagcgtcttcccgacacgcgctcggcgaccgctcaattcgcgcctcgacaccggcaggctgcaatcgcgcttcggcctgcgtcttccgccctggcaggagggcgtcgagcgcctgctgatcgaagtgctggggcactga

SEQ ID NO: 49769 - protein, 298 aa, Rubrivivax gelatinosus PM1
MRILLLGKNGQVGWELQRALAPLGELLALARDSAPLAADLGCPEALVATVRHVRPDIIVNAAAYTAVDRAEREPALARAVNAIAPAVLAREAAMLGATLVHFSTDYVFDGSGSAPRDESARTAPINVYGESKLEGEMAIRASGCRHLILRSSWVHAARGSNFAKTVLCLAAEREHLEIVDDQIGAPTGAELLADVTAHALWSVRQEPSLAGTYHVTAGGETSRHAYALFVIERARAHGHPLNVAADAVRPVPTSVFPTRARRPLNSRLDTGRLQSRFGLRLPPWQEGVERLLIEVLGH

SEQ ID NO: 49770 - DNA, 837 bp, Burkholderia fungorum LB400
  CDS (1)..(837)
ttggcttcgctcggcaacgtggtagcgctcgaccgttcggtctgcgatctgaggagtcccgactccatccgtagcgtggtgcgagaagtgcagccggacgtgattgtgaacccggccgcgtacacggccgttgacgcagcggaaaacgacgcggaactcgcatacgccataaacggcgtggccgccggcgtgctggctgaagaagcaaagtcgcttggcggcctcctggtgcactattcgaccgactatgttttcgatggtcggaaggatggtccatacgtcgagaccgacgttgtcaatccccaatctgtctatggcaaaagtaagcttgccggcgagcaggctattgcggaaagaggtgcaacggcaatcgtgctgcgcacttgttgggtagctggtgcgcatggcagcaacttcgccaagactatgctgaggctcggtcgcgaacgcgacagcctgcgcgtgatcgctgaccaatacggagcgccgacgacagcggcgttgatcgccgacgtgaccgcgcagatcgtcgcgcgccactggcttcacggggatcgcgcggcattcgcgtcgggtgtctaccatcttgctgcggccggccaaacatcgtggcatggctacgcaaccgaggtgctgcaatttgctgcggcgcgcggcgtcgaactgaaagtcgatctcgcccgtatcgagcccattgctacagctgactatccgctacccgctccgcgtccggccaattcccgtctcgatacgcacaagctgcgccaaaccttcggtatcaatctccccgattggcgcgacggtgtgcaccacctgctagaacagattcttccgtga

SEQ ID NO: 49771 - protein, 278 aa, Burkholderia fungorum LB400
MASLGNVVALDRSVCDLRSPDSIRSVVREVQPDVIVNPAAYTAVDAAENDAELAYAINGVAAGVLAEEAKSLGGLLVHYSTDYVFDGRKDGPYVETDVVNPQSVYGKSKLAGEQAIAERGATAIVLRTCWVAGAHGSNFAKTMLRLGRERDSLRVIADQYGAPTTAALIADVTAQIVARHWLHGDRAAFASGVYHLAAAGQTSWHGYATEVLQFAAARGVELKVDLARIEPIATADYPLPAPRPANSRLDTHKLRQTFGINLPDWRDGVHHLLEQILP

SEQ ID NO: 49772 - DNA, 906 bp, Psychrobacter sp. 273-4
  CDS (1)..(906)
atgaaaattgtattactgggtaaaaatggtcaagttggctgggagttacagcgtgctctgcaaccgttaggacacgttatttcactagatcgtcaaatgaatgataatgggttgtgtggtgatataaccaactttaccgctatagaacagctctatgctaccatagagcctgatgtagttatcaacgcagccgcttataccactgtagataaagctgaaagtgattataaacaggctgatttaataaaccatttagctgttaaacatttagctgatatgtctaagcattttaatagcttgctgattaattactctagtgattatgtgtttgatggtacgctagacacgccttggtcagaaacagatgatagaatgcccataaataattatggcaggactaagtatgatggagaaatggctttagagaaaagtggtgcaagatttattaactttcgcaccagttgggtatatggcacccatggtaataactttattaaaaccatgctaaagcttgctcaaagcaaagaagagcttaacatcatcgctgaccaaattggcgcgccaactggagccgctttgattgctgatattactgcacaagcactacgttactatttactaaacaaacaacccagtagtctacatggacactataacttagcagcaaaaggtgaatgttcatggtttgattatgctgagtttatctttgcgaccgcacaaaaaaatatcggtacagaactactcataaagcagctgaatcctattccaacatcacaataccctacccctgcaaaacgtccgctcaactcacgtttaaatactgaaaaactacaaacccacttccaactgcacttgccacattggcaacaaggtgttgctcaagtattaggagagctattgctatga

SEQ ID NO: 49773 - protein, 301 aa, Psychrobacter sp. 273-4
MKIVLLGKNGQVGWELQRALQPLGHVISLDRQMNDNGLCGDITNFTAIEQLYATIEPDVVINAAAYTTVDKAESDYKQADLINHLAVKHLADMSKHFNSLLINYSSDYVFDGTLDTPWSETDDRMPINNYGRTKYDGEMALEKSGARFINFRTSWVYGTHGNNFIKTMLKLAQSKEELNIIADQIGAPTGAALIADITAQALRYYLLNKQPSSLHGHYNLAAKGECSWFDYAEFIFATAQKNIGTELLIKQLNPIPTSQYPTPAKRPLNSRLNTEKLQTHFQLHLPHWQQGVAQVLGELLL

SEQ ID NO: 49774 - DNA, 900 bp, Azotobacter vinelandii AvOP
  CDS (1)..(900): transl_table=11
atgaaaatcctgctactgggagccaacggtcaggttggctgggaactgcaacgggccctggcgccgttggggcggctggagatctgcgatcgtctccgggccgatctggacaggccggaaagcctggccgcgctggtcgagcgaattcagccgcaggtcatcgtcaatgccgccgcctataccgccgtggacaaggccgaatccgacgcggctcgctcgcgtcgggtgaacgccgaatcggtggaagtgctggcggatgccgcgcgaagttgcgatgcctggctggtgcattactcgaccgactatgtgttcgatggctgcaaagccgcggcctatacggaagatgaccccgtggggccgctgagcgtctacgggcagacgaagctggagggcgaacaagctattcaggcttccgggtgcaagcacctgatcctgagaaccagttgggtgtacgccgcacgcggcagcaacttcatcaagaccatgctgcgcctggccgccgagcgcgaagaactgcgtgtgatcgccgatcagatcggagcaccgaccagcgccgaactgatcgccgatgtgagcgctctgcttttgtatcggttgaggcatgatcgggcattggccgagcaggcaacgggggtctatcacctgactgccgccggcgaaaccagttggcatggctacgcgcgtttcgtcgtggccaaggctgccgcattggatatgtcactcaaggcggggcccgacgacatccatgcgatcggtaccgccgattacccgctgccggcccggcgcccggccaactcccggctcgataccggcaaactccgacgtaccttcgatctgcatcttccacagtgggaatatcacgtcgaacgcatgctgcacgagctcctcgccaaaccatag

SEQ ID NO: 49775 - protein, 299 aa, Azotobacter vinelandii AvOP
MKILLLGANGQVGWELQRALAPLGRLEICDRLRADLDRPESLAALVERIQPQVIVNAAAYTAVDKAESDAARSRRVNAESVEVLADAARSCDAWLVHYSTDYVFDGCKAAAYTEDDPVGPLSVYGQTKLEGEQAIQASGCKHLILRTSWVYAARGSNFIKTMLRLAAEREELRVIADQIGAPTSAELIADVSALLLYRLRHDRALAEQATGVYHLTAAGETSWHGYARFVVAKAAALDMSLKAGPDDIHAIGTADYPLPARRPANSRLDTGKLRRTFDLHLPQWEYHVERMLHELLAKP

SEQ ID NO: 49776 - DNA, 885 bp, Burkholderia vietnamiensis G4
  CDS (1)..(885): transl_table=11
atgaattcagagtcgacgatcctcgtaaccggtgtcacgggtcaggtaggctttgaactgctgcgctcgctacaggggctcggccgtgtcgtggcgtgcgaccgctcgatgctcgatctgtctgatcttgaccggatccgcgctgtcgtgcgggcgttggagccggccttcatcgtgaatccggctgcctatacggccgttgacaatgccgaggacgacgtcgatgcggcaagacgcataaatgccgatgtgccgcgggtcctggcggaagaggctgcgcgcagcggtgcggtgctgattcactactcgaccgattacgtgttcgacggagccaaggcgggcgcgtataccgagaccgatgcagtgaatccgctgaacgtgtacgggacgaccaagctcgagggcgagcgtgcgatcgagaacgcagggtgcgcgtacctaaccttgcgaaccagctgggtatacgggcgacgtggcaggaatttcttgcgcacgatgctcaagctgggcgcggagcgacccgaattgcgtgtggttgccgatcaggtcggcgcgccgacctggtcgaaaacaattgcagccgcgactgcgcacatcctctccaaagggctggcggcccatgatgaggcctggtggcaggcgcgctccggaacctatcatctgagtgcggccggcgagacgtcctggcacggtttcgccaaggcgattctcggcatcgcgatgggtgacgacgcacccgctgtggtgccgattgccgcgagcgagtttccggtgcgcgcaagtcgccccgcgaattcgcgcttgtcccacggcaaactcgccgagacattcggcttgcacctgcccgattgggaatatgcgctgggcctctgcatggccgactga

SEQ ID NO: 49777 - protein, 294 aa, Burkholderia vietnamiensis G4
MNSESTILVTGVTGQVGFELLRSLQGLGRVVACDRSMLDLSDLDRIRAVVRALEPAFIVNPAAYTAVDNAEDDVDAARRINADVPRVLAEEAARSGAVLIHYSTDYVFDGAKAGAYTETDAVNPLNVYGTTKLEGERAIENAGCAYLTLRTSWVYGRRGRNFLRTMLKLGAERPELRVVADQVGAPTWSKTIAAATAHILSKGLAAHDEAWWQARSGTYHLSAAGETSWHGFAKAILGIAMGDDAPAVVPIAASEFPVRASRPANSRLSHGKLAETFGLHLPDWEYALGLCMAD

SEQ ID NO: 49778 - DNA, 900 bp, Burkholderia cenocepacia AU 1054
  CDS (1)..(900): transl_table=11
atgcgtgaggtgggtgtgactcctgagccgacgattctcgtgacgggtgtgaatggccaggtcgggttcgaactgctgcgctcgctgcaaggactcggccgcgtggtcgcatgcgaccgctcgatgctcgacctgtccgacctcgatcgggtgcgcagcgtcgtgcgcgagctgaagccgtcgatcatcgtgaacccggccgcgtacacggccgtcgacaaggccgagacggacgtcgacgctgcgcgccggctgaatgtcgaagtcccgcgtgctttcgcagaggaggcggcgcgcctcggtgcagcgctggttcattactcaaccgactatgtgttcgacggcaccaaagagggtgcctatgtcgaaacggacgcgaccaacccgcagaacgtctacgggctgaccaagctggagggcgagcaggccatcgcggcgacaggttgcgcacacttgatcctgcggacgagctgggtgtacggccgccgcggcaagaacttcctgctgacgatgctgaagctcgggagcgagcgtcctgagctgcgtgtcgtcgcggatcaggttggcgcgccgacatggtcgaagacgatcgccaccgcgaccgcgcacattgtcgcgcaggcgttggcggccgatgacgcggactggtgggcgcagcgttccggcgtctatcacttcacgtccgcgggcgccacgtcgtggcacgggtttgccgaggcaatcttcgcccaggcgatgggcgagcgtgcgccgagggtgttgccgattccggcgagcgactacccggttcccgccaagcgcccgtccaattcgcgactgtcgcacgacaagctgaccgaagcattcgggttgcggttgccggactgggccgatgcgctgacgctgtgcctgagtgagtaa

SEQ ID NO: 49779 - protein, 299 aa, Burkholderia cenocepacia AU 1054
MREVGVTPEPTILVTGVNGQVGFELLRSLQGLGRVVACDRSMLDLSDLDRVRSVVRELKPSIIVNPAAYTAVDKAETDVDAARRLNVEVPRAFAEEAARLGAALVHYSTDYVFDGTKEGAYVETDATNPQNVYGLTKLEGEQAIAATGCAHLILRTSWVYGRRGKNFLLTMLKLGSERPELRVVADQVGAPTWSKTIATATAHIVAQALAADDADWWAQRSGVYHFTSAGATSWHGFAEAIFAQAMGERAPRVLPIPASDYPVPAKRPSNSRLSHDKLTEAFGLRLPDWADALTLCLSE

SEQ ID NO: 49780 - DNA, 975 bp, Polaromonas sp. JS666
  CDS (1)..(975): transl_table=11
gtggacggccaaacagtacgagtacggacaaacccaaaaggctgcagcttgaaaatcctgcttttcggcaaaaacggccaggtcggctgggaactacagcgcagcctggctcctttgggtgaactcacggcgctcgaccgtcacagcacagacctgtgcggcgacctcggcaatctgcagggcctggctgccacggtgcaacaactccggcccgacgtcatcgtcaatgccgccgcccacaccgccgtagacaaggctgaaagtgagccagcacttgcgcgcacactcaatgcgctggcccccagcgtgctggcgcaggaggcggccagactcggttccctgctggttcactacagtaccgactacgtatttgacggcagcggcacccgcccatggacagaggccgacaccccggcgccgctcagcgtttacggccagtccaagcttgagggcgagcagctcatccaggcggccagcccgcgccacctgatctttcgcaccagctgggtctatgccgcgcgcggtggcaatttcgccaagaccatgctgcgcctggcgcaggagcgggagcgcctcatcgtgattgacgaccagtttggcgcacccaccggcgccgagttgctggccgatgtgagcgcccacgccatccgccaggtactccagcgccccgctgatgccggcctttaccatctggtggccagtggcgaaaccagctggcatggttatgcgaaatacgtcctcgcccaggcagaacggagccaggaacaagggcgtgtcgctataaaaataatagccaaagcggtagaccccgttcccaccagtgcgtttccaacacccgccaaacggccccacaactcccggctggacaccaccaggctgcaaaccacctttggcctgactctgccgccgtggcagcagggtgtggaccgcatgttggaggaggtgctggggagtagggagttgcatgccctataa

SEQ ID NO: 49781 - protein, 324 aa, Polaromonas sp. JS666
MDGQTVRVRTNPKGCSLKILLFGKNGQVGWELQRSLAPLGELTALDRHSTDLCGDLGNLQGLAATVQQLRPDVIVNAAAHTAVDKAESEPALARTLNALAPSVLAQEAARLGSLLVHYSTDYVFDGSGTRPWTEADTPAPLSVYGQSKLEGEQLIQAASPRHLIFRTSWVYAARGGNFAKTMLRLAQERERLIVIDDQFGAPTGAELLADVSAHAIRQVLQRPADAGLYHLVASGETSWHGYAKYVLAQAERSQEQGRVAIKIIAKAVDPVPTSAFPTPAKRPHNSRLDTTRLQTTFGLTLPPWQQGVDRMLEEVLGSRELHAL

SEQ ID NO: 49782 - DNA, 897 bp, Frankia sp. CcI3
  CDS (1)..(897): transl_table=11
gtgaccggtgccgccggtcagctcggggccgacctctgccggctgctcgaggcccgagccgcggaaccgggctccccggtgtccggctgggccggtctgactcgggcggaattcgacatcaccgatccggcccgggtgcgcgccgtcctgcgcgaccaggcgcgtcctgcgaagatccagggtgggctggtcgtcttcaacacggcggcctggacaaacgtcgacgcggcggagtcggacgaggccggcgcctatgcggtcaacgccacggggccggcgcacctcgccgcggcctgcgccgaggtcggcgcgaccctgatccatatttcgactgactacgtcttcgacgggcgggccgccaagccctacgaggtcaacgatcctaccggtcccgtctcggcgtacggccggacgaaactggccggggaggaggctgtccgagccctgctgcccgatgcctcgtatgtggtgcgcaccgcatgggtctatggccggaccggcagcaacttcgtgaagacgatctcacgcctggcccgtgagcgggacacgctgtccgttgtggacgatcaggtgggctcgccgacctggtcggccgatctcgcgtcggggctgctcgaactcgcttcctcgacggcaccgaccggcgtctaccactgcacgaacgccggcgagaccacgtggttcggcttcgcccgcgagattgtcgccgctctgggccaggacccggccaaggtgacgccgacgacgacggaggcatttccccgtccggcccggcgcccggcctacgcggtgctctccgggcggtcatgggtggacgcgggactcactcctccgcgggcctgggacgccgcgctgtccgcggccttcgccgcggcgggcgacgcgctgcgcggctga

SEQ ID NO: 49783 - protein, 298 aa, Frankia sp. CcI3
MTGAAGQLGADLCRLLEARAAEPGSPVSGWAGLTRAEFDITDPARVRAVLRDQARPAKIQGGLVVFNTAAWTNVDAAESDEAGAYAVNATGPAHLAAACAEVGATLIHISTDYVFDGRAAKPYEVNDPTGPVSAYGRTKLAGEEAVRALLPDASYVVRTAWVYGRTGSNFVKTISRLARERDTLSVVDDQVGSPTWSADLASGLLELASSTAPTGVYHCTNAGETTWFGFAREIVAALGQDPAKVTPTTTEAFPRPARRPAYAVLSGRSWVDAGLTPPRAWDAALSAAFAAAGDALRG

SEQ ID NO: 49784 - DNA, 810 bp, Methanococcoides burtonii DSM 6242
  CDS (1)..(810): transl_table=11
atggtggtgggaaccattaaaacagtgataatcggtgcaagtggaatgctgggttcagacctgtccagagcattccccgatgctgtaaaattcacacaccacgacctggacatcaccaacaagcaacaggtcctcaagaaaattgaggaaataaaaccctatgttgtgatcaacgctgccgcttacacaaacgtagacggatgcgaagacgagcaggatattgctttcaaggtcaacggacacgcacccggctatatcgcacaggcatgttccgatatcggtgcaattctggtccattttagtaccgattatgtctttgatggctcaaaaaaagaatacgtggaatctaatatcaccaaacccatcaatgtctacggccagtccaaactgatgggtgagcaggagatcatcaaaaacacggacaactacaggatcatacgcacctcctggctttttgggaaaaacggaaagaacttcgtagatacgatgttaaggctctcaaaagagatggaaaacgtaaaagtcgtcaacgaccagttcggcaaacccacccacacagcggatatagcccgcaagaccgccgagatcatcaaccttaatcctggcatctaccacataactaatgaaggcccatgcacctggtacgaattcgcatccgagatcatcaataacacagttccatgctccagtgaagagtttcccacaaaagcaaaacgtccgacctactccgtcctcacgaacacaaaaacaactcccatgagacactggaagaatgcacttaacgaatacctgaaggagaatcaatcatga

SEQ ID NO: 49785 - protein, 269 aa, Methanococcoides burtonii DSM 6242
MVVGTIKTVIIGASGMLGSDLSRAFPDAVKFTHHDLDITNKQQVLKKIEEIKPYVVINAAAYTNVDGCEDEQDIAFKVNGHAPGYIAQACSDIGAILVHFSTDYVFDGSKKEYVESNITKPINVYGQSKLMGEQEIIKNTDNYRIIRTSWLFGKNGKNFVDTMLRLSKEMENVKVVNDQFGKPTHTADIARKTAEIINLNPGIYHITNEGPCTWYEFASEIINNTVPCSSEEFPTKAKRPTYSVLTNTKTTPMRHWKNALNEYLKENQS

SEQ ID NO: 49786 - DNA, 876 bp, Shewanella baltica OS155
  CDS (1)..(876): transl_table=11
atgaaaatattagtcaccggtagtaatggccaagtgggtagttgcctcgttaaacaattgagccagatgccagagattgaattttgggcggttgatcgtactcaattagatataacagatgctgctgctgtcgccaagttagtcaatgactttaaacctcatgcgatcatcaatgcggctgcgcacactgcagtagataaagcagaagatgaagttgcgctttcctatgcgatcaaccgtgatggccctcaatggctagccgaagcagcaaatagtgccggcgcagttatgttgcatatttccactgactatgtttttgcgggagataaacagggcgaatatcgagagactgatgcgattgatccccaaggagtctatggtaaaagcaaactggctggtgagttagccgttgcagccgcttgcccccgacatataattttacggactgcttgggtattttgcgaaactggcaataattttgttaaaaccatgcttcgtctttcgcaatctcgggacgaattaggcgtggtagcagatcagttcggtggccccacttatgctggtgatattgctaatgcgttaattaccatggctaaagccattagtaatggcaatcaatcatttggcatctatcattactctggcttacctcatgtaaattggcacttatttgcttgtgagattttcaagcaagctaaatcacaaggtttacttgataaagaaatgaatgttaaagccattactagcgaacagtacccaacaccagctaagcggccgaaaaactctaaattggattgtaataagattctacaacactttggtattcaagcgagtgattggcgagcggcattgaataagttgaatggctatttatga

SEQ ID NO: 49787 - protein, 291 aa, Shewanella baltica OS155
MKILVTGSNGQVGSCLVKQLSQMPEIEFWAVDRTQLDITDAAAVAKLVNDFKPHAIINAAAHTAVDKAEDEVALSYAINRDGPQWLAEAANSAGAVMLHISTDYVFAGDKQGEYRETDAIDPQGVYGKSKLAGELAVAAACPRHIILRTAWVFCETGNNFVKTMLRLSQSRDELGVVADQFGGPTYAGDIANALITMAKAISNGNQSFGIYHYSGLPHVNWHLFACEIFKQAKSQGLLDKEMNVKAITSEQYPTPAKRPKNSKLDCNKILQHFGIQASDWRAALNKLNGYL

SEQ ID NO: 49788 - DNA, 906 bp, Shewanella amazonensis SB2B
  CDS (1)..(906): transl_table=11
atgagagtgttgttgctgggctccagcggccaggtcggcagagcgttgctggccttcaagcctgcaggttacaagttactggtcccaggcagaagcgaagtggattatttgcaacctgaatccatcactgattatgtgttatttcataagccgcaattggtcatcaactgcgcggcgtatactgctgtggataaggctgaagcagagacagcactgtgtacgcgaatcaatagcggggcttgcgagcatctcgccaaggcagcagcagcggctgacgccgtcctgctacatctctctaccgattatgtgtttgatggtctcctcgaccgtccatacaacgaagaagactcgccagcccctttgtctgtgtatggacattccaagtggttgggagagcaaaccatagtcgccaactgtgccaagcatcttatcgtcagaacatcctggatttttgatgctgacagtaacaacttcgtcaataccatgctgcgtttggcggcatccaggtcagagctacgggttgtggcagaccaagttgggggaccgacgcccgcatctgaactggcccgggcgatttggcaacttgccaggcaatcggtggagagaaatggcccttggggcgtctatcacttttccggccaaccctttgtcagttggtacgagtttgccaggagcattttgactgaggcatacaggctttgcgtcatccaccaactaccaacaataacatctatcagcgccagtgagttcggctcccctgcgcagaggcctgcaaactcgaggcttgatggcagtaaaatcaaagcattatatggggttgctgccgcagactggcagagtgagttagttaacattctgaaagccaaggccagggccgtgacctcagttacaaaccctggttgttag

SEQ ID NO: 49789 - protein, 301 aa, Shewanella amazonensis SB2B
MRVLLLGSSGQVGRALLAFKPAGYKLLVPGRSEVDYLQPESITDYVLFHKPQLVINCAAYTAVDKAEAETALCTRINSGACEHLAKAAAAADAVLLHLSTDYVFDGLLDRPYNEEDSPAPLSVYGHSKWLGEQTIVANCAKHLIVRTSWIFDADSNNFVNTMLRLAASRSELRVVADQVGGPTPASELARAIWQLARQSVERNGPWGVYHFSGQPFVSWYEFARSILTEAYRLCVIHQLPTITSISASEFGSPAQRPANSRLDGSKIKALYGVAAADWQSELVNILKAKARAVTSVTNPGC

SEQ ID NO: 49790 - DNA, 879 bp, Pelodictyon phaeoclathratiforme BU-1
  CDS (1)..(879): transl_table=11
atgaatattcttgttaccggcagtcggggtcagcttggttctgagttgcaggaactctcaacccgctctgacaaccaccgtttttttttctatgaccttcctgatctcgatattacctctcccgagcgtgttgctgagctttgccgtgagcatgagatagaggtgatcatcaattgtgcggcatatacggctgtggacaaggcggagtcggatgttgatgcggcattcagggtgaaccgggatggtgctgccgtgcttgcggcctgtgcaaaggagcgcaatgctcttctggtgcacatttcaactgattatgtttttaatggcaagtcgcatattccttatcgggaaactgatcccgctactccgcttggtgtttacggtgtgtcgaaatgggaaggggaggagcgtatccgcgatattgcgccttctcactggattatccgtacctcatggctctattcgatctatggcgccaactttgtcaagacgatgttgcgtcttggcgccgagcgttcgacgctgaacgttgtggctgaccagattggtacgccaacctgggcggctgatcttgcaggcgctcttgtttcaatgcttgagcggtacgacaagaataaccactacgcaggacgctatcattattcaaatgaaggggtttgctcctggtatgattttgcccaggcgatcatggagttggctgaactgccctgcagggtggtgccggtcgaaagcagtcagtatccccagattgccgagagaccgcattatagcgttctgaacaagtcggctataaaggatgagtggaagcttgaaattccgtactggcgggtatcgctggctgccatgcttgagaagttgcagcatggagcgaataaaggatga

SEQ ID NO: 49791 - protein, 292 aa, Pelodictyon phaeoclathratiforme BU-1
MNILVTGSRGQLGSELQELSTRSDNHRFFFYDLPDLDITSPERVAELCREHEIEVIINCAAYTAVDKAESDVDAAFRVNRDGAAVLAACAKERNALLVHISTDYVFNGKSHIPYRETDPATPLGVYGVSKWEGEERIRDIAPSHWIIRTSWLYSIYGANFVKTMLRLGAERSTLNVVADQIGTPTWAADLAGALVSMLERYDKNNHYAGRYHYSNEGVCSWYDFAQAIMELAELPCRVVPVESSQYPQIAERPHYSVLNKSAIKDEWKLEIPYWRVSLAAMLEKLQHGANKG

SEQ ID NO: 49792 - DNA, 921 bp, Ralstonia metallidurans CH34
  CDS (1)..(921): transl_table=11
atgctgcgtgaagcacagagagcccccacgcttcttgtaacaggaagcaatggccaggtcggcttcgaactgcgtcgcagtctggcgccgctgggccgggtcgtggcgctggaccgaagccaatttgacctgactcgaccggatgcattgcgcgaactggttcgctcgattcggccagacgtcatcgtcaatccagcggcatacactgccgtagacaaggccgaaaccgaagcagaggcggcgttcgcggtaaatggcgtggcgcctggggtccttgcggaggaggcacgccgcctgggcagtctgttcgtccattactcgaccgactacgttttcgatggcaccaaggatggcgcctatctggaaggtgatgcagttaatccgcaatcggtgtatggcaagagcaaactggccggcgagcaagtagttgcagctactggtgcggcatcgcttgtgctgcgcacctgttgggtggctggtgcgcacggcgggaactttgcgaagaccatgctcaggctggcacgcgagcgagacagcctgagggtaattgcggatcagttcggcgccccgacaaccgcttccctgattgcggatgtgactgcgcaaatcgtcgcgcgccactggctccatgccccaggccgcgaagcatttcccactggtgtgtatcacctggcagccgggggggaaactacctggcacggatatgccactcacgtgctgtcaagagccgcagccaagggcgtggagatgaaggtcgatcccacccgcatcgaaccaattccagcttcgcagtatccgctgcccgcgccgcgcccagccaactcacggctggataccggcaagctgcgggacacattcaatattcaccttcctgactgggcggagggcattgaccttcttctcgatcagatcctttcctga

SEQ ID NO: 49793 - protein, 306 aa, Ralstonia metallidurans CH34
MLREAQRAPTLLVTGSNGQVGFELRRSLAPLGRVVALDRSQFDLTRPDALRELVRSIRPDVIVNPAAYTAVDKAETEAEAAFAVNGVAPGVLAEEARRLGSLFVHYSTDYVFDGTKDGAYLEGDAVNPQSVYGKSKLAGEQVVAATGAASLVLRTCWVAGAHGGNFAKTMLRLARERDSLRVIADQFGAPTTASLIADVTAQIVARHWLHAPGREAFPTGVYHLAAGGETTWHGYATHVLSRAAAKGVEMKVDPTRIEPIPASQYPLPAPRPANSRLDTGKLRDTFNIHLPDWAEGIDLLLDQILS

SEQ ID NO: 49794 - DNA, 888 bp, Mesorhizobium sp. BNC1
  CDS (1)..(888): transl_table=11
atgaagatcctggttacggggaaaaacggtcagctagcgcgcagcctgctcgaccgggccgcccggcatccgcatcttgcgctggatttcgccgcacggcccgagctggaccttgccgacccgcgcaccatcgcgccggcaatcgcccgccatgcgcccgatctcgtcgtcaatgccgccgcctatacggcagtggaccaagcggaggacgagcctgagcttgcgcatgccgtcaacggcgcagccgccggccttatcgcgcgcgccactgccgcgcgcggcattccgctcatccacatctccaccgattatgtgttcgacggcgcgcttgcccgcccctatcgcgaggaagatcccgtcaacccgctttcggtatacggcgcaagcaagctcgccggcgaaagggcggtgcgggagcaaaacccggaccatctgatcctgcgcacggcctgggtctacagcccctatggccggaattttctgaaaaccatgctgaagctcgccgaggcgcgggacgagatccgcgtagtctgcgaccagatcggcaatccgacatccgcgcacgatattgccggcggcatccttgccgcggccgaagcgcgtcgggtgcagggaacgcgaggctggggaaagacctatcacttggcaggatcgggcgaagccagctggcatgaatttgccgcgcatatttttgaggaaagcgcccgccgcggcggaccttccgcacgcgtgacgccgatcgccacggaagactatcccacgaaagccgtccgcccccgaaactcccgtctgtgctgcgaccgcttcgccgatgccttcggctaccgcgcgcccgcttggcgggaggcggtggtggaacttttaggggcagcttcgggcgcacactga

SEQ ID NO: 49795 - protein, 295 aa, Mesorhizobium sp. BNC1
MKILVTGKNGQLARSLLDRAARHPHLALDFAARPELDLADPRTIAPAIARHAPDLVVNAAAYTAVDQAEDEPELAHAVNGAAAGLIARATAARGIPLIHISTDYVFDGALARPYREEDPVNPLSVYGASKLAGERAVREQNPDHLILRTAWVYSPYGRNFLKTMLKLAEARDEIRVVCDQIGNPTSAHDIAGGILAAAEARRVQGTRGWGKTYHLAGSGEASWHEFAAHIFEESARRGGPSARVTPIATEDYPTKAVRPRNSRLCCDRFADAFGYRAPAWREAVVELLGAASGAH

SEQ ID NO: 49796 - DNA, 915 bp, Nitrobacter hamburgensis X14
  CDS (1)..(915): transl_table=11
atgcggatcgtgttgacgggtaccaacggtcaggtcggcggggcgctgcggccgctgctggaaaaaggcggcacggtcatcgccccgtcacgcatcgcgttcgacctgtcgaagcctgagacgcttgccgaggcgctcgatggcttcaaacccgatctcatcatcaatcccgcggcctataccgcggtggaccgcgcggaggacgagcgcgagcttgccttcctcgtcaacgccaaggggcctgcggcgatcgcggcgtggtcggcacggcatcgcgtgccgctgattcatttctcaaccgattatgttttcgatggctcgaatgacaggccatggcgcgaggacagtcccacgggcccgctctcggtctatggcgcgagcaagctcgccggcgaccttgccatccgggtggccggtgggccgcatctgatcgtgcgcacctcctgggtctacgcagcgagcggagccaatttcctgcgcaccatcgcgcggctggctggtgaacgaaaggaattgcgcattgtcgccgaccaggtgggcgcgccgaccacggcaagcgcgatcgccgctgccgttgccggcatcgtagtgtcgaacgggtcgaacctggaagggttgttcgcgcgcaacggcggtgtggtcaatctcgcttgcgccggcgagaccagttggtacggcttcgcaagcgccatcgtcgccgggctgaagtcgcgcggtgtgaagctcgccgtggagatgatcactccgattgcgacggccgatttcccgaccagggctaagcggcccggcaattccaggctcgacctgtcgcgcttgagagatcggttgagggtgaccacaccgacctggcaggaagcattatcgtcggagctcgacagcctcgttgcccggcaacgcgaactggcgggccgctga

SEQ ID NO: 49797 - protein, 304 aa, Nitrobacter hamburgensis X14
MRIVLTGTNGQVGGALRPLLEKGGTVIAPSRIAFDLSKPETLAEALDGFKPDLIINPAAYTAVDRAEDERELAFLVNAKGPAAIAAWSARHRVPLIHFSTDYVFDGSNDRPWREDSPTGPLSVYGASKLAGDLAIRVAGGPHLIVRTSWVYAASGANFLRTIARLAGERKELRIVADQVGAPTTASAIAAAVAGIVVSNGSNLEGLFARNGGVVNLACAGETSWYGFASAIVAGLKSRGVKLAVEMITPIATADFPTRAKRPGNSRLDLSRLRDRLRVTTPTWQEALSSELDSLVARQRELAGR

SEQ ID NO: 49798 - DNA, 855 bp, Streptococcus mutans
  CDS (1)..(855): transl_table=11
atgattttaatcacaggaagtaatggtcaattaggtacagaattacgtcatttacttaatgaacgtaatgaagactatgtggctgttgatgttgcagagatggatattacaaaagctgaaaaagtggatgaagtctttttacaggttaaaccgagtcttgtctaccattgtgcagcctatacagcagttgatgctgcagaagatgaaggtaaagagttggattatgctatcaatgtgacaggaactgaaaacattgctaaggcttgtgagaaatataatgcaactttggtttacatttcaactgattatgtgtttgatggtgaaaagccagttggtcaagaatgggaagtggatgataagccagatcctaagactgagtatggtcggacaaagcgtttaggtgaagaagcagttgaaaaatacgttaagaacttttacatcatccgtacagcttgggtatttggtaattatggtaaaaattttgtttttactatgcaacatcttgctaaaagtcataacagtttaacggttgttaatgatcagcatggtcgtccgacttggacacgaactttagctgaatttatgacttatctggctgaaaatcaaaaagaatatggttattatcatttatcaaatgatgcaaccgaggatacaacttggtatgattttgcacttgaaattttaaaggataccgatgttgtcgtaaaacctgttgactctagtcagttccctgctaaagccaaacggccgttaaattcaactatgagtttgacaaaggctaaggcgacaggatttgttattccgacttggcaagaagctttacaagaattttataagcaggatgtcaaaaaatag

SEQ ID NO: 49799 - protein, 284 aa, Streptococcus mutans
MILITGSNGQLGTELRHLLNERNEDYVAVDVAEMDITKAEKVDEVFLQVKPSLVYHCAAYTAVDAAEDEGKELDYAINVTGTENIAKACEKYNATLVYISTDYVFDGEKPVGQEWEVDDKPDPKTEYGRTKRLGEEAVEKYVKNFYIIRTAWVFGNYGKNFVFTMQHLAKSHNSLTVVNDQHGRPTWTRTLAEFMTYLAENQKEYGYYHLSNDATEDTTWYDFALEILKDTDVVVKPVDSSQFPAKAKRPLNSTMSLTKAKATGFVIPTWQEALQEFYKQDVKK

SEQ ID NO: 49800 - DNA, 867 bp, Serratia marcescens
  CDS (1)..(867): transl_table=11
atgcgtgtacttttgaccggtgctgcagggcagttggggcgctgtattatcgatcgtttccctgccaattggaccctggtggcgatggacagccagcaattggatatcgcggactccgccgccgtctcggcgacggttgagcagctagtaccggatgccattatcaatgctgcggcttatactgcggtggataaagcggaatcggaacctgaaaaggctcgggcaatcaatgcgttcggccccggcttcctcgctgctgcggcggcgaagttagacattcctttcatacacatctcgaccgattacgtctttgacggcacttcatcggaaccgtattgtgaagagacaccttgttcgcccaagagcgtttacgggcagacgaaactcgagggtgaactggcagcattacaagctaatccgaaaaccgtcgtgatcagaacggcctgggttttcagcgagtacggtaacaacttcgtgaaaaccatgttgcgagtcggcgcgcagagaggtgagttgggcgtggtgagcgaccagctcggctgcccaacctatgcgggagatattgcagcgacggtcatcgctatgctgtcccatcctcaattgccttatggcatctatcattactgcggcgataacgctgtttcatggttcgattttggttgcgctatcttccgggaggcggaaacatcaactcgctatccgcataaggtgagcgtcaaacctatcgcaacccatgaatatccaacgcccgcatccaggccagcgtattcgattctgagcaccagcaagatttgtgcgctggctctgaagcctagcccatgggaacagcagcttaaaactgtaatccagaagatattatcccagtga

SEQ ID NO: 49801 - protein, 288 aa, Serratia marcescens
MRVLLTGAAGQLGRCIIDRFPANWTLVAMDSQQLDIADSAAVSATVEQLVPDAIINAAAYTAVDKAESEPEKARAINAFGPGFLAAAAAKLDIPFIHISTDYVFDGTSSEPYCEETPCSPKSVYGQTKLEGELAALQANPKTVVIRTAWVFSEYGNNFVKTMLRVGAQRGELGVVSDQLGCPTYAGDIAATVIAMLSHPQLPYGIYHYCGDNAVSWFDFGCAIFREAETSTRYPHKVSVKPIATHEYPTPASRPAYSILSTSKICALALKPSPWEQQLKTVIQKILSQ

SEQ ID NO: 49802 - DNA, 885 bp, Actinobacillus actinomycetemcomitans
  CDS (1)..(885): transl_table=11
atggcgagactccttataacgggagctgggggacaactagggcgcagtttagctaaattattagtggataatggaagatatgaagtactagcattagatttttctgaattagatatcacaaataaagatatggtattttctataatagattcatttaaacctaatgtgattattaatgctgcggcctatacttctgtagatcaagctgagctagaagtatcttctgcttatagtgtaaatgttagaggggttcaatatttagctgaagctgcaataagacataattcagcgatcttacatgtttctacagattatgtatttgatggatataaatcagggaaatataaagaaacagatattattcatcctctttgcgtatatggaaagtctaaagcagagggagagcgtttacttttaactttatctcctaaatccataattctccgaacatcttggacatttggagaatatggtaataatttcgttaaaacgatgctacgtttagctaaaaatcgtgacattttaggtgtggttgcggatcaaatcggcggaccgacttattcaggtgacatcgcctctgttttaattcaaattgcagaaaagatcatagtaggcgaaactgttaaatatggcatctatcactttactggagaaccttgtgttagctggtacgattttgccatagctatttttgatgaagcagttgcgcaaaaagtgttagagaatgtaccgcttgtgaatgcgattaccacggcagattatccaaccctagccaaacgtcctgcgaattcttgtttagatttaaccaaaattcaacaagcattcggtattcaaccaagtgattggcaaagggctttgaagaatattagagcgtatgcggagtaa

SEQ ID NO: 49803 - protein, 294 aa, Actinobacillus actinomycetemcomitans
MARLLITGAGGQLGRSLAKLLVDNGRYEVLALDFSELDITNKDMVFSIIDSFKPNVIINAAAYTSVDQAELEVSSAYSVNVRGVQYLAEAAIRHNSAILHVSTDYVFDGYKSGKYKETDIIHPLCVYGKSKAEGERLLLTLSPKSIILRTSWTFGEYGNNFVKTMLRLAKNRDILGVVADQIGGPTYSGDIASVLIQIAEKIIVGETVKYGIYHFTGEPCVSWYDFAIAIFDEAVAQKVLENVPLVNAITTADYPTLAKRPANSCLDLTKIQQAFGIQPSDWQRALKNIRAYAE

SEQ ID NO: 49804 - DNA, 918 bp, Streptomyces glaucescens
  CDS (1)..(918): transl_table=11
atgtccgtacccctcggctctcgttggctcgtcaccggcgcgtccgggatgctcgggcgcgaactcaccgcgcgcctcagccgccggggcgtcccggtggtcccgctggttcgccgggcggacctggacgtcaccgaccccgccgccgcgcgggcgctgctggcccggcaccggcccgcggtgctcgtcaactgcgcggcctggacggcggtcgacgcggccgaggcgcacgaggcacgggccctggcggtgaacggcgagggacccggtcacctggcccgcgcctgccgggcgacgggcacccggatgatccagctgtccaccgactacgtcttcgccgggctcgccgaccgcccgtaccgggaggacgacccgcccgcgccgcgcacggcctacggcaggacgaagctcgccggggagcgggcggtgctcgacaccctcccggacggtggctacgtggtgcgcaccgcctggctgtacgggtccggcggcgcgaacttcgtctccacgatgatccgcctggcggccgcggagggcaccgtgcccgtcgtcgacgaccagcacggcggaccgacctggaccggtgatctcgccgaccggctcctcgcgctcggcgccgcggcgctgcggggcaccgcgccgcccggtgtctaccacgccgtgaacgcggggagcacgacctggcacgcgctggcgcgggagatcttccggcgggccggggccgatcccggccgggtccggccgatcggcagcggggaactggcccggccggccgcccggcccccgtacagcgtcctcgcccagggccggtggcgggccgccggtctcgccccgctgcgcgactggcgcgccgcgctcgccgaggcgttccccgcgctgctgcgcgcgtcggcgcggggcggcacggtcaggcggtga

SEQ ID NO: 49805 - protein, 305 aa, Streptomyces glaucescens
MSVPLGSRWLVTGASGMLGRELTARLSRRGVPVVPLVRRADLDVTDPAAARALLARHRPAVLVNCAAWTAVDAAEAHEARALAVNGEGPGHLARACRATGTRMIQLSTDYVFAGLADRPYREDDPPAPRTAYGRTKLAGERAVLDTLPDGGYVVRTAWLYGSGGANFVSTMIRLAAAEGTVPVVDDQHGGPTWTGDLADRLLALGAAALRGTAPPGVYHAVNAGSTTWHALAREIFRRAGADPGRVRPIGSGELARPAARPPYSVLAQGRWRAAGLAPLRDWRAALAEAFPALLRASARGGTVRR

SEQ ID NO: 49806 - DNA, 900 bp, Enterococcus faecalis
  CDS (1)..(900): transl_table=11
atggcaaagtacaaaagctactttgccctgcctttttttcaagaaggagcgaaaaaaatgattttaattactggtggaaatggccaattgggcacagaattacgtcacctattagacgaacaaggaattgagtatgtttcaacggattccacagaattagatattactgatgcggatagtacgttggcaaaagtgaaagaaattcaaccaagcgtcatttatcattgtgctgcttatacagctgttgataaagcagaagacgaaggcaaggaattagatgaaaaagtgaatgtagatggcacacgtcatgttgcagaagctgctaaagcagtgggggcgacacttgtttacgtaagtacagattatatttttgatggaactaaaaaagaaggcgtctatgcgattgatgatcaaccgaatcctttaaatgagtatggtcggacgaagttattaggtgaacaagcggtccaagaaatcctggacgattattatattattcgaacatcatgggtatttggtcaatacggtcataactttgtctttaccatgcaaaaattagcggaaacaagagaccaactaacggtagtggacgatcagtttggccgcccaacttggacaagaacgttagccgaatttatggcatttgttattgcagaaaaagcgccatttggtgtttatcatttgtctaatgaaaacagctgtagctggtatcagtttgctaaagaaattttaaaagatactgaagtggaagtactgccagtggattcaactcaatttccacaaaaggcgcaaagaccacaatattctgtcatggatttaagtaaaacagaagcgttaggctttaaaattcctacttggcaagaagccttagcacaaatgttagaaaatgttcaacaataa

SEQ ID NO: 49807 - protein, 299 aa, Enterococcus faecalis
MAKYKSYFALPFFQEGAKKMILITGGNGQLGTELRHLLDEQGIEYVSTDSTELDITDADSTLAKVKEIQPSVIYHCAAYTAVDKAEDEGKELDEKVNVDGTRHVAEAAKAVGATLVYVSTDYIFDGTKKEGVYAIDDQPNPLNEYGRTKLLGEQAVQEILDDYYIIRTSWVFGQYGHNFVFTMQKLAETRDQLTVVDDQFGRPTWTRTLAEFMAFVIAEKAPFGVYHLSNENSCSWYQFAKEILKDTEVEVLPVDSTQFPQKAQRPQYSVMDLSKTEALGFKIPTWQEALAQMLENVQQ

SEQ ID NO: 49808 - DNA, 867 bp, Sphingomonas sp
  CDS (1)..(867): transl_table=11
atgcgcatcctcgtcaccgggcatgacggccaggtcgcccaggcgctgggcgaacaggcggagggccatgagctgatcttcaccagctatcccgagttcgatctctccaagccggagacgatcgaggcggcggtggcgaagatccagcccgagctgatcgtgtcggcggctgcgtatacggcggtcgacaagtccgagagcgagcccgagctcgccatggcgatcaacggcgacggccccggcgtactggcgcgcgcgggcgcgaagatcggcgcgccgatcatccatctgtcgaccgactatgtgttcgacggcagcctggaccgcccgtggcgcgaagacgaccccaccggtccgctcggcgtctatggcgccaccaagctggccggcgagcaagcggtgcaggcctcgggcgcgaccaacgcggtgatccggctcgcctgggtctacagcccgttcggcaacaacttcgtcaagacgatgctgcgcctcgccgagacgcgggacacgctgaacgtggtcgaggaccagcagggctgcccgagctcggcgctggacatcgccacggcgatcctcaaggtcgtcggccactggcagcagaacggcgccaccagcggcctgtatcacttcaccggatcgggcgagaccaactgggccgacttcgcgcgcgcgatcttcgcggaaagcgccaagcacggcggtccgaccgccgaggtgaccggcattccgacctccggctaccccaccccggcgaagcgcccggccaattcgcggctcaattgcgacaagttcgccgaaaccttcggctatcgtgcacccgcctggcaggactcggtggcggaagtggtaggccgcctcctggcataa

SEQ ID NO: 49809 - protein, 288 aa, Sphingomonas sp
MRILVTGHDGQVAQALGEQAEGHELIFTSYPEFDLSKPETIEAAVAKIQPELIVSAAAYTAVDKSESEPELAMAINGDGPGVLARAGAKIGAPIIHLSTDYVFDGSLDRPWREDDPTGPLGVYGATKLAGEQAVQASGATNAVIRLAWVYSPFGNNFVKTMLRLAETRDTLNVVEDQQGCPSSALDIATAILKVVGHWQQNGATSGLYHFTGSGETNWADFARAIFAESAKHGGPTAEVTGIPTSGYPTPAKRPANSRLNCDKFAETFGYRAPAWQDSVAEVVGRLLA

SEQ ID NO: 49810 - DNA, 828 bp, Rhizobium meliloti
  CDS (1)..(828): transl_table=11
atggaggtcgttacgatcgggcggccgcacctcgatctcacagagccggcaacgatcctgccggcgatcgagcgatgccggccggacctcgtcgtctcggcggcagcttacacggccgtcgaccaggccgaaagcgagccggaggcggctttcgcggtcaacgcgttcggggctggcgcggtcgctgaggcggccgcctgcctcgaagtgcccatcgtccatatttcgacggattatgtcttcgacgggagcaaaccgcggagctatgcagagggcgacacaccggctccgcttagcgtctacggcgcttccaagcttgccggagaaagcgcggttgccgaggcaactccccgccatctcatcctgcgcacgggctgggtctacagccccttcgggaagaatttcgtcaagaccatcctgcggctcgcagaggagcgcgaagatatcgccgtcgttgcggatcaacggggaaatccgtcatcggcgatcgaccttgcggacgcgatcctcgatatttccgcgcggctcacgaaatcccgtcaggacgccgcttttggcctctaccacctcgctggctcgggcgtcgtaagccgggccgatttcgcgcggcatgctcttgcggcgagccgtgccgcaggcggtccctgggcgcatgttcgggacatcgcgacgggtgggtttccgacacctgcaagccgccctgcaaactcgtcgctgtcgagcgccaaattcaacgcgaccttcggccaggccatgcctgcctggcagggttccgtggagcgaaccgtgaggcggcttgtcgagagcatttcgagtgaaaccagttag

SEQ ID NO: 49811 - protein, 275 aa, Rhizobium meliloti
MEVVTIGRPHLDLTEPATILPAIERCRPDLVVSAAAYTAVDQAESEPEAAFAVNAFGAGAVAEAAACLEVPIVHISTDYVFDGSKPRSYAEGDTPAPLSVYGASKLAGESAVAEATPRHLILRTGWVYSPFGKNFVKTILRLAEEREDIAVVADQRGNPSSAIDLADAILDISARLTKSRQDAAFGLYHLAGSGVVSRADFARHALAASRAAGGPWAHVRDIATGGFPTPASRPANSSLSSAKFNATFGQAMPAWQGSVERTVRRLVESISSETS

SEQ ID NO: 49812 - DNA, 891 bp, Azorhizobium caulinodans
  CDS (1)..(891): transl_table=11
atgcgcgtcctcctgctcggcgctgacggtcagctcggccgggaactcacggctcttgcggtcgagcggggccttgcgctcgcggcgctcaaccgcgccgccacagacatcaccgatccggtggcggtggcaaaggcgctggaggcgcataagccggacgtggtggtgaatgccgccgcctatacggccgtggacaaggccgagagcgagccggatctcgccgcgaaggtgaatgcggtggcgcccggcctcatcgccgagcgctgcgccagcgcgggcgtgccgctgatccacgtctcgacggattacgtcttcgacggcaccaagaccggcgcctatgtggagagcgatccgctcgcgccgctcggcgtctacgggcgcaccaaggcggcgggcgaggcggccatccgcgccgccggcgagaagcacctcatcctgcgcaccgcctgggtctatggcatctacggcaacaatttcctcaagacaatgctgcggctcgccaaggaccgggaccggctgaccatcgtcgccgaccagcgcggctgcccgaccgccacccgcgacatcgccgagggcatcctcgcggcggcagcgcccgccgtggcgggaagtgcccgctggggcacctatcatctgggcggcacgggcgtcaccacgtggcacggcttcgcgcaggcgatcatcgaccgggcggcgacctacaccggccgcagcgaggtggcggccatcaccaccgccgagtatcccaccccggcccgacggccggccaattccgaacttgattccagcctgttcgagcggacattccacttccgcgccgcgccctggcagcagcgcacggtcgaggtggtggacacgctgctcgccaagagccccgtggaggcatcgtga

SEQ ID NO: 49813 - protein, 296 aa, Azorhizobium caulinodans
MRVLLLGADGQLGRELTALAVERGLALAALNRAATDITDPVAVAKALEAHKPDVVVNAAAYTAVDKAESEPDLAAKVNAVAPGLIAERCASAGVPLIHVSTDYVFDGTKTGAYVESDPLAPLGVYGRTKAAGEAAIRAAGEKHLILRTAWVYGIYGNNFLKTMLRLAKDRDRLTIVADQRGCPTATRDIAEGILAAAAPAVAGSARWGTYHLGGTGVTTWHGFAQAIIDRAATYTGRSEVAAITTAEYPTPARRPANSELDSSLFERTFHFRAAPWQQRTVEVVDTLLAKSPVEAS

SEQ ID NO: 49814 - DNA, 852 bp, Streptococcus pneumoniae
  CDS (1)..(852): transl_table=11
atgattttaattacaggggcaaatggccaattaggaacggaacttcgctatttattggatgaacgtaatgaagaatacgtggcagtagatgtggctgagatggacattaccgatgcagaaatggttgagaaagtttttgaagaggtgaaaccgactttagtctaccactgtgcagcctacaccgctgttgatgcagcagaggatgaaggaagagagttggacttcgccatcaatgtgacggggacaaaaaatgtcgcaaaagcatctgaaaagcatggtgcaactctagtttatatttctacggactatgtctttgatggtaagaaaccagttggacaagagtgggaagttgatgaccgaccagatccacagacagaatatggccgtactaagcgtatgggggaagagttagttgagaagcatgtgtctaatttctatattatccgtactgcctgggtatttggaaattatggcaaaaacttcgtttttaccatgcaaaatcttgcgaaaactcataagactttaacagttgtaaatgaccagtacggtcgtccgacttggactcgtaccttggctgagttcatgacctacctagctgaaaatcgtaaggaatttggttattatcatttgtcaaatgatgcgacagaagacacaacatggtatgattttgcagttgaaattttgaaaggtacagatgtcgaagtcaagccagtagattccagtcaatttccagccaaagctaaacgtccgctaaactcaacgatgagcctggccaaagccaaagctactggatttgttattccaacttggcaagatgcattgcaagaattttacaaacaagaagtgagataa

SEQ ID NO: 49815 - protein, 283 aa, Streptococcus pneumoniae
MILITGANGQLGTELRYLLDERNEEYVAVDVAEMDITDAEMVEKVFEEVKPTLVYHCAAYTAVDAAEDEGRELDFAINVTGTKNVAKASEKHGATLVYISTDYVFDGKKPVGQEWEVDDRPDPQTEYGRTKRMGEELVEKHVSNFYIIRTAWVFGNYGKNFVFTMQNLAKTHKTLTVVNDQYGRPTWTRTLAEFMTYLAENRKEFGYYHLSNDATEDTTWYDFAVEILKGTDVEVKPVDSSQFPAKAKRPLNSTMSLAKAKATGFVIPTWQDALQEFYKQEVR

SEQ ID NO: 49816 - DNA, 852 bp, Streptococcus pneumoniae
  CDS (1)..(852): transl_table=11
atgattttaattacaggggcaaatggccaattaggaacggaacttcgctatttattggatgaacgtaatgaagaatacgtggcagtagatgtggctgagatggacattaccgatgcagaaatggttgagaaagtttttgaagaggtgaaaccgactttagtctaccactgtgcagcctacaccgctgttgatgcagcagaggatgaaggaaaagagttggacttcgccatcaatgtgacggggacaaaaaatgtcgcaaaagcatctgaaaagcatggtgcaactctagtttatatttctacggactatgtctttgacggtaagaaaccagttggacaagagtgggaagttgatgaccgaccagatccacagacagaatatggccgtactaagcgtatgggggaagagttagttgagaagcatgtgtctaatttctatattatccgtactgcctgggtatttggaaattatggcaaaaacttcgtttttaccatgcaaaatcttgcgaaaactcataagactttaacagttgtaaatgaccagtacggtcgtccgacttggactcgtaccttggctgagttcatgacctacctagctgaaaatcgtaaggaatttggttattatcatttgtcaaatgatgcgacagaagacacaacatggtatgattttgcagttgaaattttgaaagatacagatgtcgaagtcaatccagtagattccagtcaatttccagccaaagctaaacgtccgctaaactcaacgatgagcctggccaaagccaaagctactggatttgttattccaacttggcaagatgcattgcaagaattttacaaacaagaagtgagataa

SEQ ID NO: 49817 - protein, 283 aa, Streptococcus pneumoniae
MILITGANGQLGTELRYLLDERNEEYVAVDVAEMDITDAEMVEKVFEEVKPTLVYHCAAYTAVDAAEDEGKELDFAINVTGTKNVAKASEKHGATLVYISTDYVFDGKKPVGQEWEVDDRPDPQTEYGRTKRMGEELVEKHVSNFYIIRTAWVFGNYGKNFVFTMQNLAKTHKTLTVVNDQYGRPTWTRTLAEFMTYLAENRKEFGYYHLSNDATEDTTWYDFAVEILKDTDVEVNPVDSSQFPAKAKRPLNSTMSLAKAKATGFVIPTWQDALQEFYKQEVR

SEQ ID NO: 49818 - DNA, 882 bp, Pseudomonas fluorescens
  CDS (1)..(882): transl_table=11
atgaacgctcctctgaaaatccttatcagcggccagcacggccaggtctcccgggagctgcagcagcgcctcggcgacctcggcgagctggtggtcctgggtcgtgagcaactggacctgagccacccggaacagatccgccagcaagtgcgcgccattcgcccggacctgatcatcaatgccgccgcccacaccgccgtcgaccaggcccagagcgagccggacctggcttttgcgatcaacgccacggcccccgggatcttcgcccaggaagccttcgagctgggtgtgccgctgattcactactccaccgactacgtgttcgatggcagcaaggaaacgccctatgtggaggacgacgagcccaacccgctgagtgtctacggcgagagcaagctggctggcgaacgggcgatccggctggtccagggccagcatttgatcctgcgcaccagctgggtctattccagccatggcaagaacttcctgctgaccatgcagcgcctgctgcaggaaaaacccgagctgcgggtagtggccgaccagatcggcgcgcccacctgggccggcaccatcgccaccagcacccgggcgctgatcgagcgttggcgagccgggcagcccggcgcatggggcatctaccacctcaccgcccacggcgagacttcctggttcggctttgcccaggccatcggcgagcagttgctggccatggacaaaccctgcgccgtccttgaagccatcccttccagcgcttaccctacaccggcgccgcggccgttgaactcgcgtctggactgcagccgcctggcacgggagtggggcgtggtccagccggactggcacaccgcattgcgcgagtgtcttgccgagcagggctag

SEQ ID NO: 49819 - protein, 293 aa, Pseudomonas fluorescens
MNAPLKILISGQHGQVSRELQQRLGDLGELVVLGREQLDLSHPEQIRQQVRAIRPDLIINAAAHTAVDQAQSEPDLAFAINATAPGIFAQEAFELGVPLIHYSTDYVFDGSKETPYVEDDEPNPLSVYGESKLAGERAIRLVQGQHLILRTSWVYSSHGKNFLLTMQRLLQEKPELRVVADQIGAPTWAGTIATSTRALIERWRAGQPGAWGIYHLTAHGETSWFGFAQAIGEQLLAMDKPCAVLEAIPSSAYPTPAPRPLNSRLDCSRLAREWGVVQPDWHTALRECLAEQG

SEQ ID NO: 49820 - DNA, 1005 bp, Xenopus laevis
  CDS (1)..(1005)
atggaagggagatacaaggactacaggatccgcttctcacccggctgggtcgaggttgtgcaggatgatgttactgttcctagtagaagggctctgataacgggggcaaccggacttcttggtcgagctgtatacaaagagtttaaggagaacagctggcatgtgctgggctgcgggtacagtcgtgctcgacccagattcgaatgcctcaacctattggatgaagcagcggtgaaagcattgatccaagacttcaagcctcacgtgatcattcattgtgctgcagagaggagaccagatattgtcgaaagtcaaccagagttagcttcattactaaatgtggtggcatctgagaatttagcaaaagtagccgctggagttggagcgtttctaatttatgttagctcagattatgtctttgatggaacaagcccgccttacagggaagattccataccacatcccttgaacctttatggcaagacaaaactggatggagagagagcagtgttgcagaataatgaaggtgctgcagttcttcgagtgccagttatgtatggagacgtggaaaaacttagtgaaagtgctgtcacaattctttttgataaggtgcagtttagcaacaagtcggcaaatctggaccattgtcagcaaaggtttcctactcatgtcaaagatgttgctacagtttgtcttcaattaacagagcgaaaaatacaggatccctctattaagggaatataccattggtctggaaatgagcagatgaccaaatacgaaatagcttgtgccatggcagatgccttcaaccttcccagcagccatctgcgtccaatcacagatgagcccgtaggagcgactcctcggccatggaatccacaactggactgttcgaaactggagaagatgggcattggccagagaacaccgtttagagtgggaattagggaaaccctctggccgttcttagtggacaagagatggagacagacagtcttccactag

SEQ ID NO: 49821 - protein, 334 aa, Xenopus laevis
MEGRYKDYRIRFSPGWVEVVQDDVTVPSRRALITGATGLLGRAVYKEFKENSWHVLGCGYSRARPRFECLNLLDEAAVKALIQDFKPHVIIHCAAERRPDIVESQPELASLLNVVASENLAKVAAGVGAFLIYVSSDYVFDGTSPPYREDSIPHPLNLYGKTKLDGERAVLQNNEGAAVLRVPVMYGDVEKLSESAVTILFDKVQFSNKSANLDHCQQRFPTHVKDVATVCLQLTERKIQDPSIKGIYHWSGNEQMTKYEIACAMADAFNLPSSHLRPITDEPVGATPRPWNPQLDCSKLEKMGIGQRTPFRVGIRETLWPFLVDKRWRQTVFH

SEQ ID NO: 49822 - DNA, 900 bp, Shigella boydii
  CDS (1)..(900): transl_table=11
atgaatattctccttttcggcaaaacagggcaggtaggttgggaactacagcgtgctctggcacctctgggtaatttgattgctcttgatgttcactccactgattattgtggtgattttagtaatcctgaaggtgtagctgaaaccgtaagaagcattcggcctgatattattgtcaacgcagccgctcacaccgcagtagacaaagcagaatcagaaccggagtttgcacaattacttaacgcgacaagtgtcgaagcgattgcgaaagcagccaatgaagtcggcgcctgggttattcactactctactgactacgtatttccggggaccggtgaaataccatggcaggagacggatgcaaccgcaccgctaaatgtgtacggtgaaaccaagttagctggagaaaaagcattacaagagcattgtgcgaagcaccttattttccgtaccagctgggtatatgcaggtaaaggaaacaattttgccaagacaatgttacgtctggcaaaagagcgcgaagaattagctgtcattaacgatcagtttggtgcaccaacaggtgctgagttgctggctgattgtacggcacatgccattcgtgttgcactgaataaaccagaagtcgcaggcttataccatctggtagccagtggtaccacaacctggtacgattatgctgcgctggtttttgaagaggcgcgcgaagcaggcattccccttgcactcaacaagctcaacgcagtaccaacaacagcctatcctacactagctcgtcgtccgcataactctcgccttgatacagaaaaatttcagcagaactttgcgcttgtcttgcctgactggcagattggcgtgaaacgcatgctcaacgaattatttacgactacagctatttaa

SEQ ID NO: 49823 - protein, 299 aa, Shigella boydii
MNILLFGKTGQVGWELQRALAPLGNLIALDVHSTDYCGDFSNPEGVAETVRSIRPDIIVNAAAHTAVDKAESEPEFAQLLNATSVEAIAKAANEVGAWVIHYSTDYVFPGTGEIPWQETDATAPLNVYGETKLAGEKALQEHCAKHLIFRTSWVYAGKGNNFAKTMLRLAKEREELAVINDQFGAPTGAELLADCTAHAIRVALNKPEVAGLYHLVASGTTTWYDYAALVFEEAREAGIPLALNKLNAVPTTAYPTLARRPHNSRLDTEKFQQNFALVLPDWQIGVKRMLNELFTTTAI

SEQ ID NO: 49824 - DNA, 915 bp, Streptomyces griseus subsp
  CDS (1)..(915): transl_table=11
atgtccccgtaccctcgcccgcgttggctcgtcaccggtgcgtccggcatgctggggcgcgagctcacccccctgctggaccgccggggtgccgccgtgaccgcgctcggtcgcggccacctggacatcacggacggcgccgccgtgcgttccgccgtggcggagcaccggccggcggtggtggtcaactgcgcggcgtggaccgcggtcgacgaggccgagtcggagccggccctggccatggcggtgaacggggagggcccgcgccatctcgcgcaggcgtgccgcgccgtgggggccgtgctgctccagctgtccaccgactacgtgttccccggctcgggcggacggccctaccgggaggaccacccgaccggtccgcgcacggtgtacggctgcaccaagcgggccggggagcgcgcggtgctggaggtcctcccggacaccggctacatcgtccgtacggcttggctgtacggagcgggcggccccaacttcgtggcgaagatgatccggctggaggcggagcaggacaccgtgctggtcgtggacgaccagcacggccagccgacctggaccgccgacctcgcggaccggctggcggccctgggggcggcggcgctggcgggaacggccccggccgggatctaccacgcgaccaacacgggcgggaccacctggaacgcgctggcgcgggagaccttccgcctgctcggcgccgacccggcacgggtccggcccaccaccagtctggcgctggcccggcctgccgtacggccccggtacagcgtgctggaccagtcccgctggaaggcggccggactcgaaccgctgcggcactggcgggccgcgctgacggagtcgttccccgcactctgcggagcggccggccggccggtgcccgggccgcgctga

SEQ ID NO: 49825 - protein, 304 aa, Streptomyces griseus subsp
MSPYPRPRWLVTGASGMLGRELTPLLDRRGAAVTALGRGHLDITDGAAVRSAVAEHRPAVVVNCAAWTAVDEAESEPALAMAVNGEGPRHLAQACRAVGAVLLQLSTDYVFPGSGGRPYREDHPTGPRTVYGCTKRAGERAVLEVLPDTGYIVRTAWLYGAGGPNFVAKMIRLEAEQDTVLVVDDQHGQPTWTADLADRLAALGAAALAGTAPAGIYHATNTGGTTWNALARETFRLLGADPARVRPTTSLALARPAVRPRYSVLDQSRWKAAGLEPLRHWRAALTESFPALCGAAGRPVPGPR

SEQ ID NO: 49826 - DNA, 924 bp, Saccharopolyspora erythraea
  CDS (1)..(924): transl_table=11
atgacccgcagccggctcgcggtgctggtgccgggcgggcgtggccaggtcggctcggagctgaggcggatcgtgtccggctggtccggagcactggtccacgcaccgggatcgggcgaactggacgtgaccgacgccgaggccgtcgccgacgcggtggactccttcgccgagaccgcgcgcgactccgacctgcggccggtggtcgtcaacgccgccgcctacaccgcggtcgacgcggcggaggaggagccggaccggtcggcggcgatcaacgtcgcgggcgcggcggccctggcggacgcctgcggcaggcgcggtgttccgctgctgcacatctccaccgactacgtcttcccgggggacgcgacccggccctacgagcccgacgacgagaccgggccgcgaacctcctacgggcgcacgaagctagacggagagcgtgcggtgctcgactcgggcgcgcgggcctgggtggtgcgcaccgcctgggtctacggcgcgggcgggaagaacttcgtcaagacgatggcgcggctggagtccgagcgcgacaccctgtccgttgtggacgaccaggtcggatgtcccacgtgggcggcggatctggcggcgggactgctggagctggccggacgggtggccgaacgcaagggccccgagcagcgggtgctgcactgcgtcaacggcggccagtcgagctggttcgagttcgcacgcgcggtcttcgccgagctgggcgccgacccggagcgggtccggccctgcagcagtgaggagttccccctcccggcgccgcggccggcgtactcggtgctctccggccgcgcttgggaggcgagcgggctgaccccgctgcgccactggcgggaagcgctcgccgcggccttcgccgccgacggcgacgcgctgcgcggccggtag

SEQ ID NO: 49827 - protein, 307 aa, Saccharopolyspora erythraea
MTRSRLAVLVPGGRGQVGSELRRIVSGWSGALVHAPGSGELDVTDAEAVADAVDSFAETARDSDLRPVVVNAAAYTAVDAAEEEPDRSAAINVAGAAALADACGRRGVPLLHISTDYVFPGDATRPYEPDDETGPRTSYGRTKLDGERAVLDSGARAWVVRTAWVYGAGGKNFVKTMARLESERDTLSVVDDQVGCPTWAADLAAGLLELAGRVAERKGPEQRVLHCVNGGQSSWFEFARAVFAELGADPERVRPCSSEEFPLPAPRPAYSVLSGRAWEASGLTPLRHWREALAAAFAADGDALRGR

SEQ ID NO: 49828 - DNA, 909 bp, Xanthomonas campestris pv
  CDS (1)..(909): transl_table=11
gtgaccacgctggtgttcggtgcgaacgggcaggtaggggcggaactgctacgcgcattggctgccgatggcgcggtgcaggcgacgacacgcagtggccgattgcctgatggtagcgcgtgcgagaccgcagacttcgacgcaccggaaactttgccagccttgctggaccggattggcccgtcgcttgtcgtcaatgctgcggcctacacggcagtggattgcgccgagcaggatcgcgtcagcgcgatgcgggcgaatgcgcaggcacctttgaccattgcggcatggtgtgccgcccgtgacgtgccgctggtgcattactcgaccgattacgtcttcgacggccaggacaccgccccctatcttgaggatgcccaaacctcgccgctaggcgtgtatggcgaaaccaagctcgctggtgagaacgccatccgtgcttccggcgcgcagcatctgatcctgcgtacggcatgggtgtacgcatcgcacggcgcgaatttcctgcgcaccatgttgcgtgtcggcgccgagcgcgacgagctacgcgtggtggccgatcagatcggaacgccgacgccggcggcgttgatcgccgatatcactgcacagttgcttcggcaacgcaccgccgaaacatcgggtacctggcatctcactgctgcagggcagaccagctggcatggctttgccgaggcgatcttcgaagaggctgtgagcgcaggactgctgccgcgtgcgccgcgcgtggtaccgatcaccaccgcagactatccgacccctgcgaagcggccggcgtattcgcggttgtcgatcgagaaactgcagcgcgatttcgacatcgtgctgccggaatggcgacctggcttgcagcgcgtgattgccgaagtcgccgctgccagacagtaa

SEQ ID NO: 49829 - protein, 302 aa, Xanthomonas campestris pv
MTTLVFGANGQVGAELLRALAADGAVQATTRSGRLPDGSACETADFDAPETLPALLDRIGPSLVVNAAAYTAVDCAEQDRVSAMRANAQAPLTIAAWCAARDVPLVHYSTDYVFDGQDTAPYLEDAQTSPLGVYGETKLAGENAIRASGAQHLILRTAWVYASHGANFLRTMLRVGAERDELRVVADQIGTPTPAALIADITAQLLRQRTAETSGTWHLTAAGQTSWHGFAEAIFEEAVSAGLLPRAPRVVPITTADYPTPAKRPAYSRLSIEKLQRDFDIVLPEWRPGLQRVIAEVAAARQ

SEQ ID NO: 49830 - DNA, 870 bp, Yersinia enterocolitica
  CDS (1)..(870): transl_table=11
atgaagagaaaaattcttatcactggtggtactggaatgcttggcgcttatgtcaccagtgcacttaaagataccgattataatgtcattgtcactgagagaaataccctaaatctttctgtgccggaggcaatatttagttatattacggcagagaagccggatgtaatactgcattttgcagctgaaacagatgttgacctctgtgagcgtgaacctgcccgtgctggaatatataaccacttggcaactgagcaaattgctcaagcagctaagttttgtggggcttggttattatatctttcttcatctaatgtttttgggggtgaaggtaaactaagttacaatgaattagatatcccattaccgatgaattattatggtcgttcaaagctaataggtgaatcttcagtacgtaatgcttgtacaaacaatcatctcataattcgcgctgggtggatgatcggtggtggcccagacaaggatcacaaatttgttggtaagattattcaacagataaaagctggctctacgtcaattaaagctgtgagtgatcgtttaggtagtattacttcagctatgcagttgtgtaattttattatatgggcgataaataaacgccatacaggaacgttgcattttgcaagcagtggtaccattagccgttttgatattgcttgcgcgattggcgaccttcttaatttcaaaggggatattataccagttcactcatcagtatttcctctatcagcacctcgcccttactcggaagggattgagtctatatatatgtctattcttagtgacgcaccaaaaccaagtctttggaaaagtgacttagctaaatatgtaggaacatttctcgtttaa

SEQ ID NO: 49831 - protein, 289 aa, Yersinia enterocolitica
MKRKILITGGTGMLGAYVTSALKDTDYNVIVTERNTLNLSVPEAIFSYITAEKPDVILHFAAETDVDLCEREPARAGIYNHLATEQIAQAAKFCGAWLLYLSSSNVFGGEGKLSYNELDIPLPMNYYGRSKLIGESSVRNACTNNHLIIRAGWMIGGGPDKDHKFVGKIIQQIKAGSTSIKAVSDRLGSITSAMQLCNFIIWAINKRHTGTLHFASSGTISRFDIACAIGDLLNFKGDIIPVHSSVFPLSAPRPYSEGIESIYMSILSDAPKPSLWKSDLAKYVGTFLV

SEQ ID NO: 49832 - DNA, 843 bp, Lactobacillus rhamnosus
  CDS (1)..(843): transl_table=11
atgaaaattttgattaccggcgcacaaggccaacttggtacagaactacgccacttattggatgcacgcggcatgacgtatcgggcgactgacgccaaagatctggatattaccgatgaagccgccgttaatcagtattttgcggactatcagcctgaggtagtgtatcactgtgctgcctatacagccgttgataaagccgaagacgaggcaaaggctatcaatcagctggtgaacgttgacggtactcgtaatctggctaaagctgcggagaaggtcgatgcgaccttagtttacatcagtactgattacgtatttgatggcgacagcgaggaaatttatacagttaacgatcaacctgcgccacgcaatgaatatggacgggcaaaatacgaaggcgaacagcaagtgcaaaagtaccttaagaagtactacattattcgtacttcttgggtatttggtgaatatggtcacaacttcgtctacacgatgttgaacctcgccaaaacgcataaggaattgaccgtggtggacgatcaatatggccgtccatcatggaccaaaacgctggccgagtttatgacctttgccgttgataagcgtttagattacggaatctatcatctatccaatgataacagctgtaattggtatgaatttgccagtgctattttggcggataaagacgttacggttaagccggtatcgtcaaaggaatacccacaaaaagcatggcggccccgccattcgattttggatttaagtaagacgaaggccaccgggtttgagattccaacgtggcaagacgctttaaagaatttcttgaaaagtatagacaaataa

SEQ ID NO: 49833 - protein, 280 aa, Lactobacillus rhamnosus
MKILITGAQGQLGTELRHLLDARGMTYRATDAKDLDITDEAAVNQYFADYQPEVVYHCAAYTAVDKAEDEAKAINQLVNVDGTRNLAKAAEKVDATLVYISTDYVFDGDSEEIYTVNDQPAPRNEYGRAKYEGEQQVQKYLKKYYIIRTSWVFGEYGHNFVYTMLNLAKTHKELTVVDDQYGRPSWTKTLAEFMTFAVDKRLDYGIYHLSNDNSCNWYEFASAILADKDVTVKPVSSKEYPQKAWRPRHSILDLSKTKATGFEIPTWQDALKNFLKSIDK

SEQ ID NO: 49834 - DNA, 843 bp, Lactobacillus rhamnosus
  CDS (1)..(843): transl_table=11
atgaaaattttgattaccggcgcacaaggccaacttggtacagaactacgccacttattggatgcacgcggcatgacgtatcgggcgactgacgccaaagatctggatattaccgatgaagccgccgttaatcagtattttgcggactatcagcctgaggtagtgtatcactgtgctgcctatacagccgttgataaagccgaagacgaggcaaaggctatcaatcagctggtgaacgttgacggtactcgtaatctggctaaagctgcggagaaggtcgatgcgaccttagtttacatcagtactgattacgtatttgatggcgacagcaaggaaatttatacagttaacgatcaacctgcgccacgcaatgaatatggacgggcaaaatacgaaggcgaacagcaagtgcaaaagtaccttaagaagtactacattattcgtacttcttgggtatttggtgaatatggtcacaacttcgtctacacgatgttgaacctcgccaaaacgcataaggaattgaccgtggtggacgatcaatatggccgtccatcatggaccaaaacgctggccgagtttatgacctttgccgttgataagcgtttagattacggaatctatcatctatccaatgatagcagctgtaattggtatgaatttgccagtgctattttggcggataaagacgttacggttaagccggtatcgtcaaaggaatacccacaaaaagcatggcggccccgccattcgattttggatttaagtaagacgaaggccaccgggtttgagattccaacgtggcaagacgctttaaagaatttcttgaaaagtatagacaaataa

SEQ ID NO: 49835 - protein, 280 aa, Lactobacillus rhamnosus
MKILITGAQGQLGTELRHLLDARGMTYRATDAKDLDITDEAAVNQYFADYQPEVVYHCAAYTAVDKAEDEAKAINQLVNVDGTRNLAKAAEKVDATLVYISTDYVFDGDSKEIYTVNDQPAPRNEYGRAKYEGEQQVQKYLKKYYIIRTSWVFGEYGHNFVYTMLNLAKTHKELTVVDDQYGRPSWTKTLAEFMTFAVDKRLDYGIYHLSNDSSCNWYEFASAILADKDVTVKPVSSKEYPQKAWRPRHSILDLSKTKATGFEIPTWQDALKNFLKSIDK

SEQ ID NO: 49836 - DNA, 843 bp, Lactobacillus rhamnosus
  CDS (1)..(843): transl_table=11
atgaaaattttgattaccggcgcacaaggccaacttggtacagaactacgccacttattggatgcacgcggcatgacgtatcgggcgactgacgccaaagatctggatattaccgatgaagccgccgttaatcagtattttgcggactatcagcctgaggtagtgtatcactgtgctgcctatacagccgttgataaagccgaagacgaggcaaaggctatcaatcagctggtgaacgttgacggtactcgtaatctggctaaagctgcggagaaggtcgatgcgaccttagtttacatcagtactgattacgtatttgatggcgacagcaaggaaatttatacagttaacgatcaacctgcgccacgcaatgaatatggacgggcaaaatacgaaggcgaacagcaagtgcaaaagtaccttaagaagtactacattattcgtacttcttgggtatttggtgaatatggtcacaacttcgtctacacgatgttgaacctcgccaaaacgcataaggaattgaccgtggtggacgatcaatatggccgtccatcatggaccaaaacgctggccgagtttatgacctttgccgttgataagcgtttagattacggaatctatcatctatccaatgataacagctgtaattggtatgaatttgccagtgctattttggcggataaagacgttacggttaagccggtatcgtcaaaggaatacccacaaaaagcatggcggccccgccattcgattttggatttaagtaagacgaaggccaccgggtttgagattccaacgtggcaagacgctttaaagaatttcttgaaaagtatagacaaataa

SEQ ID NO: 49837 - protein, 280 aa, Lactobacillus rhamnosus
MKILITGAQGQLGTELRHLLDARGMTYRATDAKDLDITDEAAVNQYFADYQPEVVYHCAAYTAVDKAEDEAKAINQLVNVDGTRNLAKAAEKVDATLVYISTDYVFDGDSKEIYTVNDQPAPRNEYGRAKYEGEQQVQKYLKKYYIIRTSWVFGEYGHNFVYTMLNLAKTHKELTVVDDQYGRPSWTKTLAEFMTFAVDKRLDYGIYHLSNDNSCNWYEFASAILADKDVTVKPVSSKEYPQKAWRPRHSILDLSKTKATGFEIPTWQDALKNFLKSIDK

SEQ ID NO: 49838 - DNA, 912 bp, Acetobacter tropicalis
  CDS (1)..(912): transl_table=11
atgagcattctggcatctgagggtggtcccattctggtcaccggtggcaccgggcagcttgcaacatctctggtcacgcttggtggtccgcgcgttcattgcgttggacgtcccagttttgattttgacaaacctgaaacattggccgccacgctggaagccgtcaaaccggttgccgtggccaatgccgcagcctggaccgctgttgatctggcggaaaaggaacctgaagcagccgcccgcgccaacacgagtggtccggcagaactggcccgcctgtgcgcccagcagaatattccgctgatccatgtttccacggattacgtcttttccggagacaaaggcacaccgtatgtggaaacagatgcggtctcccctgacacggtctatggcagcacaaaggctgaaggcgaaaagcaggcactggccgccaatcccaaaaccctgattttccggacatcttgggtgtattcggctcatggcaagaactttgttcgcaccatgctgaacgcaggtgccaaaaatccggccctgaaagtggtcggggaccagaaaggcaatcccaccagttcagatgatctggcgcgcgccattctttccgttctcgccattctcgaaaaagacggctggaaagatgattttgccggtatctaccatgtgcgtggaaccggtgagaccacatggcatggtctggcggtagaagctctgaaagatgcagcagaccatgggcaacctatgcccacagtcaccgctatccgcacggaagactggcccaccccggccaaacggcccgctgattcacggatggacaattccaagctcacgcgtgtatttggcatcaccatgccggcgtgggaagaaagcgtaaagaaagttgtaaaccagatttttgcccagactccttcagcctga

SEQ ID NO: 49839 - protein, 303 aa, Acetobacter tropicalis
MSILASEGGPILVTGGTGQLATSLVTLGGPRVHCVGRPSFDFDKPETLAATLEAVKPVAVANAAAWTAVDLAEKEPEAAARANTSGPAELARLCAQQNIPLIHVSTDYVFSGDKGTPYVETDAVSPDTVYGSTKAEGEKQALAANPKTLIFRTSWVYSAHGKNFVRTMLNAGAKNPALKVVGDQKGNPTSSDDLARAILSVLAILEKDGWKDDFAGIYHVRGTGETTWHGLAVEALKDAADHGQPMPTVTAIRTEDWPTPAKRPADSRMDNSKLTRVFGITMPAWEESVKKVVNQIFAQTPSA

SEQ ID NO: 49840 - DNA, 900 bp, Escherichia coli
  CDS (1)..(900): transl_table=11
atgaatatcctcctttttggcaaaacagggcaggtaggttgggaactacagcgtgctctggcacctctgggtaacttgattgctcttgatgttcattccactgattattgtggcgatttcagtaaccccgaaggtgtggctgaaaccgtcaaaaaaattcgcccagatgttattgttaatgttgctgctcataccgcggtagataaggctgagtcagaaccagaatttgcacaattactcaatgcgaccagcgttgaagcaattgcaaaagcggctaatgaagttggggcttgggtaattcattactcaactgactacgtcttccctggaaatggcgacatgccatggctcgagacggatgtaaccgctccgctcaatgtttatggcaaaaccaaattggctggagaaagagcattacaagaacattgcgcaaagcatcttattttccgtaccagctgggtatatgcaggtaaaggaaataactttgccaaaacaatgttacgtcaggcaaaagagcgcgaagaactggctgtgataaacgatcagtttggcgcaccaacaggtgctgaattgctggctgattgcaccgctcatgccattcgcgtggcattaaaaaaaccagaagttgctggcttgtaccatctggtagcaaatggcacaacaacctggcacgattacgccgcgctagtattcgaagaagcccgtaaagcagggattgaccttgcacttaacaaactcaacgccgtaccaacaacggcttatcctactccagcccgccgtcctcataattctcgcctcaataccgaaaagtttcagcagaactttgcgcttgtcttgcctgactggcaggtgggcgtgaaacgtatgctcaacgaattatttacgactacggcaatttaa

SEQ ID NO: 49841 - protein, 299 aa, Escherichia coli
MNILLFGKTGQVGWELQRALAPLGNLIALDVHSTDYCGDFSNPEGVAETVKKIRPDVIVNVAAHTAVDKAESEPEFAQLLNATSVEAIAKAANEVGAWVIHYSTDYVFPGNGDMPWLETDVTAPLNVYGKTKLAGERALQEHCAKHLIFRTSWVYAGKGNNFAKTMLRQAKEREELAVINDQFGAPTGAELLADCTAHAIRVALKKPEVAGLYHLVANGTTTWHDYAALVFEEARKAGIDLALNKLNAVPTTAYPTPARRPHNSRLNTEKFQQNFALVLPDWQVGVKRMLNELFTTTAI

SEQ ID NO: 49842 - DNA, 900 bp, Shigella dysenteriae
  CDS (1)..(900): transl_table=11
atgaatatcctccttttcggcaaaacagggcaggtaggttgggaactacagcgtgctctggcacctctgggtaatttgattgctcttgatgttcactccactgattactgtggtgattttagtaatcctgaaggtgtagctgaaaccgtaagaagcattcggcctgatattattgtcaacgcagccgctcacaccgcagtagacaaagcagaatcagaaccggagtttgcacaattacttaacgcgacgagtgtcgaagcgatcgcgaaagcagccaatgaagtcggcgcctgggttattcactactctactgactacgtatttccggggaccggtgaaataccatggcaggaggcggatgcaaccgcaccgctaaatgtttacggtgaaaccaagttagctggagaaaaagcattacaagagcattgtgcgaagcacctaattttccgtacaagctgggtctatgcaggtaaaggaaataacttcgccaaaacgatgttgcgtctgggaaaagagcgtgaagaattagccgttattaatgatcagtttggtgcgccaacaggtgctgaactgctggctgattgtacggcacatgcaattcgtgtggcagtgaataaaccagaagtcgcaggcttgtaccatctggtagccactggtaccacaacctggcacgattatgctgcgctggtttttgaagaggcacgaaaagcaggtattccccttgcactcaacaagctcaacgcagtaccaacaacagcttatcctacaccagctcgtcgtccacataactctcgccttaatacagaaaaatttcagcaaaattttgcgcttgttttgcctgactggcaggttggcgtgaaacgaatgctcaacgaattatttacgactacagcaatttaa

SEQ ID NO: 49843 - protein, 299 aa, Shigella dysenteriae
MNILLFGKTGQVGWELQRALAPLGNLIALDVHSTDYCGDFSNPEGVAETVRSIRPDIIVNAAAHTAVDKAESEPEFAQLLNATSVEAIAKAANEVGAWVIHYSTDYVFPGTGEIPWQEADATAPLNVYGETKLAGEKALQEHCAKHLIFRTSWVYAGKGNNFAKTMLRLGKEREELAVINDQFGAPTGAELLADCTAHAIRVAVNKPEVAGLYHLVATGTTTWHDYAALVFEEARKAGIPLALNKLNAVPTTAYPTPARRPHNSRLNTEKFQQNFALVLPDWQVGVKRMLNELFTTTAI

SEQ ID NO: 49844 - DNA, 963 bp, Mus musculus
  CDS (1)..(963)
atgccggaggccatggaacaggaggaagtgaacatccctagccggcgggttctcattactggtgccactgggcttcttggcagagcagtttacaaagagtttcagcagagcaactggcacaccgttggctgtggctttcgaagagcaagaccaaaattcgaacaagtgaacctgttggattctgaagctgttcatcacctcattcatgatttccagcctcatgtcatagtgcattgtgctgcagagagaagacctgatgttgttgagagtcagccagatgctgcttcccagctgaatgtgggtgcctctgggaacttggcaaaggaggcagctgcgattggagcatttctcatctacattagctcagattatgtgtttgatggcacaaatcccccttacacagaagaagatataccaagtcccctgaatctatatggaaaaacaaaattagatggagaaaaagcagtcctggagaataatttaggggctgctgtgttgagaattcctgttctgtatggggaagttgaaaagcttgaagaaagtgctgtgactgttatgttcgacaaggtgcagttcagcaacaagtcagcaaacatggaccattggcagcagaggttccccacacatgtgaaagacgtagccagtgtgtgccggcagctggcagagaagaggatgctggatccatccattaagggaacctttcactggtctggcaatgagcagatgaccaagtatgaaatggcgtgtgcaattgcagatgccttcaacctccccagcagccacttaagacctattactgacagtcctgtcataggagcacagcgccccaaaaatgctcagctcgattgctccaaattggagacgttgggcattggccagaggacaccatttcgaactggaatcaaagaatctctctggcctttcctcatcgacaagagatggagacagactgtctttcattag

SEQ ID NO: 49845 - protein, 320 aa, Mus musculus
MPEAMEQEEVNIPSRRVLITGATGLLGRAVYKEFQQSNWHTVGCGFRRARPKFEQVNLLDSEAVHHLIHDFQPHVIVHCAAERRPDVVESQPDAASQLNVGASGNLAKEAAAIGAFLIYISSDYVFDGTNPPYTEEDIPSPLNLYGKTKLDGEKAVLENNLGAAVLRIPVLYGEVEKLEESAVTVMFDKVQFSNKSANMDHWQQRFPTHVKDVASVCRQLAEKRMLDPSIKGTFHWSGNEQMTKYEMACAIADAFNLPSSHLRPITDSPVIGAQRPKNAQLDCSKLETLGIGQRTPFRTGIKESLWPFLIDKRWRQTVFH

SEQ ID NO: 49846 - DNA, 879 bp, Yersinia enterocolitica
  CDS (1)..(879): transl_table=11
atgagagtgataattactggggcccatggtcaagttggctgcagtctggttgagaaatttcaagatcaagataaggttgaattgttggcaactggccgagatgaattggacattacaaatcaatctgcggtggatgagattatcgaacagttcaaacctgattatattattaattcagcggcctatactgcggttgataaagcagaggaagaaatcgaactttcttatgcaataaatcatgatggtgtggctcatctggcaaaggcagcaaacaaaatgggggcagtacttcttcatatatctacagattatgtttttgatggtgaaaatgaagcagcttacgaagagacatcgccgacaaaacctaaatctatatatggaaaaagtaagcttgctggcgaacttgcaatagcagaagctatggataaatttttaattgtaagaacctcctgggtatttggtacacacggaaataactttgtaaaaacaatgcttagactaggtactactcatgagtgtcttagtattgttggcgaccaatttggtgggccaacctattcagacgatattgctaatgctttagtgaaaatggtgaagtttatagatgatggtaatacgcctgaatgggggtgttatcacttttcaggtgaacctcatgtcagttggtatgagtttgcaaaggttatttttaacaaagctcgagacaaaaaaataatagataaactaccaactttatctccaattaacacatcagaatatccaacaagagcgagtaggcctgccaactcaagattgaattgtaataagataaaagcccaattcaatatagaaccaagtaactggcaagtggctttgaataatattcaggaatataagtga

SEQ ID NO: 49847 - protein, 292 aa, Yersinia enterocolitica
MRVIITGAHGQVGCSLVEKFQDQDKVELLATGRDELDITNQSAVDEIIEQFKPDYIINSAAYTAVDKAEEEIELSYAINHDGVAHLAKAANKMGAVLLHISTDYVFDGENEAAYEETSPTKPKSIYGKSKLAGELAIAEAMDKFLIVRTSWVFGTHGNNFVKTMLRLGTTHECLSIVGDQFGGPTYSDDIANALVKMVKFIDDGNTPEWGCYHFSGEPHVSWYEFAKVIFNKARDKKIIDKLPTLSPINTSEYPTRASRPANSRLNCNKIKAQFNIEPSNWQVALNNIQEYK

SEQ ID NO: 49848 - DNA, 855 bp, Streptococcus oralis
  CDS (1)..(855): transl_table=11
atgatattaattacaggtgcaaatggtcaactcggtaccgaactacgttatttactagatgaacgaaatgtggactatgttgccgtggatgtggccgaaatggatatcaccaatgctgaaatggttgagaaagtctttgccgaggttaatccaactctggtctatcattgtgcagcttatactgctgttgatgcggcagaagatgagggaaaagaactggattttgccatcaacgtaactggaactgaaaatgtagccaaggcctctgagaaatacggagctactctggtctatatctcgacagactatgtctttgatgggaaaaaaccagtaggacaagaatgggaagtcgatgacctacctggtccgcagacagagtacgggcgtaccaagcgaatgggtgaggaactcgttgaaaaccttacgtcacagcattatatcatccgcactgcttgggtctttggaaattatggcaaaaactttgtctttaccatgcaaaatcttgctaaaacccataaaactctcactgttgtcaacgaccaacacggccgcccaacttggacacgtaccttggctgagttcatgacctacctgactgataatcaaaaagagtatggctactaccacttatcaaatgactccactgaagataccacttggtatgacttcgctgtcgagattcttaaggacagtgatgttgaagtgattccagtagactccagcaagtttcctgccaaggctaaacgccccctcaactcaaccatgagtttagccaaagcgaagaccacaggtttcgtcattccaacctggcaagatgcccttaaagaattttataaacaagaagtaagaaaataa

SEQ ID NO: 49849 - protein, 284 aa, Streptococcus oralis
MILITGANGQLGTELRYLLDERNVDYVAVDVAEMDITNAEMVEKVFAEVNPTLVYHCAAYTAVDAAEDEGKELDFAINVTGTENVAKASEKYGATLVYISTDYVFDGKKPVGQEWEVDDLPGPQTEYGRTKRMGEELVENLTSQHYIIRTAWVFGNYGKNFVFTMQNLAKTHKTLTVVNDQHGRPTWTRTLAEFMTYLTDNQKEYGYYHLSNDSTEDTTWYDFAVEILKDSDVEVIPVDSSKFPAKAKRPLNSTMSLAKAKTTGFVIPTWQDALKEFYKQEVRK

SEQ ID NO: 49850 - DNA, 900 bp, Shigella boydii
  CDS (1)..(900): transl_table=11
atgaatattctccttttcggcaaaacagggcaggtaggttgggaactacagcgtgctctggcacctttgggtaatttgattgctcttgatgttcactccactgattattgtggtgattttagtaatcctgaaggtgtggctgaaaccgtcaaaaaaattcgccctgatgttattgttaatgctgcggctcataccgcagtagataaggctgagtcagaacccgaatttgcacaattactcaatgcgaccagcgttgaatcaattgcaaaagcggctaatgaagttggggcctgggtaattcattactcaactgactacgtatttccgggaaccggtgaaataccatggctggagacggatgcaaccgcaccgctaaatgtttacggtgaaaccaagttagccggagaaaaagcgttacaggaacattgcgcgaagcatcttattttccgtaccagctgggtatacgcaggtaaaggaaataacttcgccaaaacgatgttgcgtctggcaaaagagcgtgaagaattagcggttattaacgatcagtttggtgcaccaacgggtgctgagctgctggctgattgtacggcacatgctattcgtgttgcactgaaaaaaacagaagtcgcaggcttgtaccatttggtagctagtggtaccacaacctggtacgattatgctgcgctggtttttgaagaggcgcgcaaagcaggcattccccttgtactcaacaagctcaacgcagtaccaacaactgcctatcctacaccagctcgtcgtccacataactctcgccttaatacagaaaaatttcagcagaactttgcgcttgtcttgcctgactggcaggttggcgtgaaacgaatgctcaacgaattatttacgactacagcaatttaa

SEQ ID NO: 49851 - protein, 299 aa, Shigella boydii
MNILLFGKTGQVGWELQRALAPLGNLIALDVHSTDYCGDFSNPEGVAETVKKIRPDVIVNAAAHTAVDKAESEPEFAQLLNATSVESIAKAANEVGAWVIHYSTDYVFPGTGEIPWLETDATAPLNVYGETKLAGEKALQEHCAKHLIFRTSWVYAGKGNNFAKTMLRLAKEREELAVINDQFGAPTGAELLADCTAHAIRVALKKTEVAGLYHLVASGTTTWYDYAALVFEEARKAGIPLVLNKLNAVPTTAYPTPARRPHNSRLNTEKFQQNFALVLPDWQVGVKRMLNELFTTTAI

SEQ ID NO: 49852 - DNA, 885 bp, Clostridium thermosaccharolyticum
  CDS (1)..(885): transl_table=11
atgaagctgcttattacgggggcaagaggacagcttggtatacagttaaggtctgttttagaaagaggtaaaagtgaattaggcaagattgacgatatttatagcaatgcagatataaagtatgtgtcacataatgatctagatattactaatctaaatgatgttttagattatgtagagcaatataaaccaaacgccatcataaattgtgctgcatatacaaatgttgatagatgcgaaagtgatattgacaatgcatttaaagtaaatgcaataggtccgagaaacctagcaatagcttcacatatagtagatgctaagttgcttcatatatcaacagattatgtatttagtggtgaaggcaacgaaccatataaagaatatgatatgccaaatccagtaagtgtatatggtaaatcaaaacttcttggagagcaatacgttagagacttttgtgataaatattttatagttaggacagcatggttatatggaaagtatggaaagaattttgtctatactatcataaatgcagcaaaagaaagaggatatttggaagttgtcaatgaccaaagaggtaatccaacaaatgcagaagatctagcatatcatattttaaaattaattctaaccgatgaatatggtatataccactgcactggaaatggagagtgcagttggtatgattttgcatgcaaaattgttgaatatactgacataaagtgccgtgttatgtctataacatctgataaaataaaaagagaagcaaaaagaccgtcgtattcatctcttgataacatgatgctaagatgcacgattggtgacaaaatgagaaattgggacgatgcattaaaatcttttatagatgttctagaaagcaaatag

SEQ ID NO: 49853 - protein, 294 aa, Clostridium thermosaccharolyticum
MKLLITGARGQLGIQLRSVLERGKSELGKIDDIYSNADIKYVSHNDLDITNLNDVLDYVEQYKPNAIINCAAYTNVDRCESDIDNAFKVNAIGPRNLAIASHIVDAKLLHISTDYVFSGEGNEPYKEYDMPNPVSVYGKSKLLGEQYVRDFCDKYFIVRTAWLYGKYGKNFVYTIINAAKERGYLEVVNDQRGNPTNAEDLAYHILKLILTDEYGIYHCTGNGECSWYDFACKIVEYTDIKCRVMSITSDKIKREAKRPSYSSLDNMMLRCTIGDKMRNWDDALKSFIDVLESK

SEQ ID NO: 49854 - DNA, 891 bp, Klebsiella terrigena
  CDS (1)..(891): transl_table=11
atgaaaattttacttattggcaaaaatggtcaggttggctgggagctacagcgctcgctgtccacgctgggtgaggtggtcgccgttgactatttcgataaggaactatgcggcgatctgacggatcttgccgggattgcgcaaaccgtccgccaggttaaaccggatgtggttgtcaatgcggccgcgcatacggcggtggataaagccgaaagcgaacgcgagctatccgatctactgaatgagcggggcgtagcggtactggcggaggagtcggcgaagctgggagccctgatggtgcactactccaccgactatgtctttgatggagaaggcgagcattatcgccccgaagacgaggccaccgggccgctgaacgtttatggcgaaaccaagcgcgcaggtgaactggcgctggcgcaggcgaaccctcgccatctgattttccgtaccagctgggtctacgcgacgcgtggggccaactttgccaaaaccatgctgcgcctggcgggcgaaaaagagacgctgtcgattattaacgaccagcacggcgcgccgaccggtgccgagctgctggcggattgtaccgccatcgccattcgtgaagagctgcgtaacagggcggttgccgggacctaccatctggtggccagcggtgaaaccagctggtatgactatgcccgctttgtctttgatgtggcgcgggcaaacggtgtgctgctggccatcaaagaggttaacgggatccctacaacggcttatccgacgccagcaaaacgtccgctgaattcccgcctgtcgaatgagaaattccagcgggtatttggcgtaacgctcccgggctggcgccagggcgttgagcgcgttgttgttgaagttttaggtaagtag

SEQ ID NO: 49855 - protein, 296 aa, Klebsiella terrigena
MKILLIGKNGQVGWELQRSLSTLGEVVAVDYFDKELCGDLTDLAGIAQTVRQVKPDVVVNAAAHTAVDKAESERELSDLLNERGVAVLAEESAKLGALMVHYSTDYVFDGEGEHYRPEDEATGPLNVYGETKRAGELALAQANPRHLIFRTSWVYATRGANFAKTMLRLAGEKETLSIINDQHGAPTGAELLADCTAIAIREELRNRAVAGTYHLVASGETSWYDYARFVFDVARANGVLLAIKEVNGIPTTAYPTPAKRPLNSRLSNEKFQRVFGVTLPGWRQGVERVVVEVLGK

SEQ ID NO: 49856 - DNA, 861 bp, Bacillus stearothermophilus
  CDS (1)..(861): transl_table=11
atgagtaaacacaaaatattagttactggtgcgaaaggacaactcggcgcagagatggtcaaattgttaaaagacatggaatatgaagtatatggatatggacgagcagaactcgatataacggattttcagcaagtgaaaagtgttattgaccatatccatcctaatgttgttattcacgctgctgcttatacaaatgtagatgcagcagagtccgaaccagatcaagcatttttcgtgaatgcatacggaacaagaaacgtagtcgtagcgtcagaacatataggtgctaagtttgtttatataagtaccgattatgtgtttgacggcaccgccaacgcaccttataacgagtttgcttttacgagtccgataagcgtatatggaaaaagtaaactagccggtgaacagtttgtaagagaccttcactctaaattttttattattcgaacatcgtgggtttacgggaaacatggaaataattttgtgaaaacaatgttaaaacttgcacaagaacaaaaagaattgtttgtcgttgatgatcaaattggatgcccaacttatacagttgatttagctagctgcatttttcaacttattcatactgagaaatatggggtctaccatatttctaattcaggccattgctcttggtatgaatttgcaaaagccattttcgaagaggctaatgttaatatagtagttaatccatgtaaaacaaaagattatccaagacctgctcaacgccctctatattctgtattggatcatatggctctacgattaaatggatttaaagaattaaggcattggcgggaggcgttaaaggaatttattaaagtttatggggtgaaaccttga

SEQ ID NO: 49857 - protein, 286 aa, Bacillus stearothermophilus
MSKHKILVTGAKGQLGAEMVKLLKDMEYEVYGYGRAELDITDFQQVKSVIDHIHPNVVIHAAAYTNVDAAESEPDQAFFVNAYGTRNVVVASEHIGAKFVYISTDYVFDGTANAPYNEFAFTSPISVYGKSKLAGEQFVRDLHSKFFIIRTSWVYGKHGNNFVKTMLKLAQEQKELFVVDDQIGCPTYTVDLASCIFQLIHTEKYGVYHISNSGHCSWYEFAKAIFEEANVNIVVNPCKTKDYPRPAQRPLYSVLDHMALRLNGFKELRHWREALKEFIKVYGVKP

SEQ ID NO: 49858 - DNA, 846 bp, Bacillus stearothermophilus
  CDS (1)..(846): transl_table=11
atgaaagtgattgtaacaggtgcaaaaggtcagcttggtacagatttagtccatttacttgctgatagagggtatgaagtttatggttatggacgagaggagttagatataacaaactttgaccaagtaaaacaggttatcagtgaagttaatcctgatgttgtcattcatgccgctgcatatacaaaagtcgatttagcggaatctgaaccagaccaagcatttttaattaacgcatatgggacgagaaatgttgctgtcgcatcggaagcagtaggtgctaaacttgtctatataagtacggattatgtttttgatggaacggctactacgccatataatgaatttgctctaacaaatccacttagtgtatacggtaaaagcaagttggcaggggaacagtttgttcgcgacttacactctaagttttttatcgtcagaacttcttgggtgtatggaaagcatggaaataacttcgtcaaaacaatgttacggttggcccaagaacgtaacgagttaatggttgtcaatgatcaagttggctgtccaacctatacagtagatttagcaaattgtattttagaaataattcaaacagaaaagtacggcatttatcatgtttctaattcgggacattgttcttggtatgagtttgcgaaagcgatttttgaggaagctggaattgaggttaaagtaaatccttgtacgacaaaagatttcccaagaccagcgccaaggccagcgtattccgtgtttgagcatatggctcttagattgaatggattcaatgaaatgagaaattggagagaagcattgaaagagtttattgtacaaattaaactataa

SEQ ID NO: 49859 - protein, 281 aa, Bacillus stearothermophilus
MKVIVTGAKGQLGTDLVHLLADRGYEVYGYGREELDITNFDQVKQVISEVNPDVVIHAAAYTKVDLAESEPDQAFLINAYGTRNVAVASEAVGAKLVYISTDYVFDGTATTPYNEFALTNPLSVYGKSKLAGEQFVRDLHSKFFIVRTSWVYGKHGNNFVKTMLRLAQERNELMVVNDQVGCPTYTVDLANCILEIIQTEKYGIYHVSNSGHCSWYEFAKAIFEEAGIEVKVNPCTTKDFPRPAPRPAYSVFEHMALRLNGFNEMRNWREALKEFIVQIKL

SEQ ID NO: 49860 - DNA, 849 bp, Bacillus stearothermophilus
  CDS (1)..(849): transl_table=11
atgaaaattgttgttacgggggcaaacgggcagttaggtcaagagcttgtaggacaactgcagcaaacgaacgttgagctctattcgtttacaaaaagtgacttagatattacgaatgacagcatagtaaacgaaacgattacaaagattaagcctgatatccttataaacgctgctgcttatacaaaagtcgatcaagcggaaatcgaggaagaaacagcttatttagtgaatgcgtttgggcaaagaaatttggcgatagcagcggaaaaagttggggcgaaaatatgttatattagcacagattacgtctttgatgggacttcgatgaccccttatcgagaatatgatcgaacgaatccactaggggtatacggaaaatcaaagtatgctggtgaagaactgacaaaatcattatgttcgcgatattttattgtgagaacggcatgggtatatggagagtttgggcaaaattttgtcaaaacgatgcttcggttagcaaaagaaaaagaagaaatcggtgttgtcaatgaccaaattggctctcctacatatacggttgacttagctcgctttattattgaattagtccaaactgagaagtttggaatttatcatgcgacaaatagtgggtcatgttcttggtacgagtttgccaaagctatttttgaagaaagtaatattcatgtgaaagtaaatccaatcacgacggaacaatttcctagaccggcagcacgtcctaaatactctgtgttagacaattttgcgatgaaggtgaatgggtttccaatgttaagacattggcgtgaagcattgaaagaatttttgaaaagtgattttaggatttga

SEQ ID NO: 49861 - protein, 282 aa, Bacillus stearothermophilus
MKIVVTGANGQLGQELVGQLQQTNVELYSFTKSDLDITNDSIVNETITKIKPDILINAAAYTKVDQAEIEEETAYLVNAFGQRNLAIAAEKVGAKICYISTDYVFDGTSMTPYREYDRTNPLGVYGKSKYAGEELTKSLCSRYFIVRTAWVYGEFGQNFVKTMLRLAKEKEEIGVVNDQIGSPTYTVDLARFIIELVQTEKFGIYHATNSGSCSWYEFAKAIFEESNIHVKVNPITTEQFPRPAARPKYSVLDNFAMKVNGFPMLRHWREALKEFLKSDFRI

SEQ ID NO: 49862 - DNA, 864 bp, Bacteroides coprosuis
  CDS (1)..(864): transl_table=11
atgaatattctgattactggtgctaatggacagttggggtctgagtttagagaactatcgcctctttactccagctataatttcttctttgctggttgtgattctctgaatatctgtgaagtagaggctgtacgtgagtatatatccgcccataatattgattttattataaactgtgcggcatatactgctgttgatgcagcagaagagaatccagtagattgtgataaggtaaatcatacagcagtatccaatttggctaaagtagcagatgagtatgatgctggcttgattcatttttcaactgattatgtatttgatggttctaagaatactccttatacagaagaagatcctacttcagcgcgggctatttatggtataacaaagctagctagtgaacgtgtggctttagctaaatgtaataaggctatggttataaggacctcttgggtatattctttttatggacataactttgtgaagactgtattgaagcaacttcagcttagaggatctatgggagttgtttatgatcagatagggactcctacttatgccaaagatttagcaaagtttgtacttaatgtgttgagtactgattttataccagggttataccattatagtaacgaaggtgtttgttcttggtttgattttgctaaaatggtacaacgatttgctggtctaaaaggggaaatttaccctattcactctgatcagtatcctgcaaaagctcctagacctgcatattctgtactagataaaacaaaggtaaaagacacctataacataaagattccttactgggtagatagcctagaggagtgcattcagagaattcaaaacgatactaataaatag

SEQ ID NO: 49863 - protein, 287 aa, Bacteroides coprosuis
MNILITGANGQLGSEFRELSPLYSSYNFFFAGCDSLNICEVEAVREYISAHNIDFIINCAAYTAVDAAEENPVDCDKVNHTAVSNLAKVADEYDAGLIHFSTDYVFDGSKNTPYTEEDPTSARAIYGITKLASERVALAKCNKAMVIRTSWVYSFYGHNFVKTVLKQLQLRGSMGVVYDQIGTPTYAKDLAKFVLNVLSTDFIPGLYHYSNEGVCSWFDFAKMVQRFAGLKGEIYPIHSDQYPAKAPRPAYSVLDKTKVKDTYNIKIPYWVDSLEECIQRIQNDTNK

SEQ ID NO: 49864 - DNA, 852 bp, Thermotoga sp
  CDS (1)..(852): transl_table=11
atgaaggttcttataacaggagcgaatggacaacttggaagagcctttcaggaactgttcaaaaacgagaaagttgaattcatagcagcaccgaaagaagaacttgacataacagatctcagaaagatcagggaatttgtttcaaagaacccggaaataacccacataatcaactgtgctgcttacaacaaagtggacgaagctgaaagagactggaaaacagcgtaccttgtcaacggcatcggcccgaaaaatcttgcgatagtttcaaacgaaataggtgcggaactcgttcattattcaacggattatgtcttttcaggaaagaaaggatctccatacacgatatacgacacttccgatcctataaacaaatatggtgagagtaaggtacttggagaaagattcgttatgagcttttctaacagatactacctcatcagaacgagctgggtgttcggtgatggtatgaactttgtgagaaaagttttggaatggagcaagaaaagcaaagtgctgagaatcgtagatgatgaagtgagttccccaacgtacgcaccagatcttgcaaaagcaacgtgggagttgataaaactcaaagcgtacggattgtatcacataacgaacagtggctattgctctcgatatgaatgggctgagttcattctgaacgaaatagggtgggatggagagctcaagagagcaaagcaggaagattttaatcttcccgcgaaaaggcctaagttttcggtgttggatgggtttggattgagggaatttactgggatgaagatggaatcgtggaaaaggagaacaacagaatttatcgaaaaattaggaagtgattactga

SEQ ID NO: 49865 - protein, 283 aa, Thermotoga sp
MKVLITGANGQLGRAFQELFKNEKVEFIAAPKEELDITDLRKIREFVSKNPEITHIINCAAYNKVDEAERDWKTAYLVNGIGPKNLAIVSNEIGAELVHYSTDYVFSGKKGSPYTIYDTSDPINKYGESKVLGERFVMSFSNRYYLIRTSWVFGDGMNFVRKVLEWSKKSKVLRIVDDEVSSPTYAPDLAKATWELIKLKAYGLYHITNSGYCSRYEWAEFILNEIGWDGELKRAKQEDFNLPAKRPKFSVLDGFGLREFTGMKMESWKRRTTEFIEKLGSDY

SEQ ID NO: 49866 - DNA, 867 bp, Sphingomonas elodea
  CDS (1)..(867): transl_table=11
atgcgcatcctcgtcaccgggcatgacggccaggtcgcccagtcgctgggcgaacaagcacagggccacgagctgatcttcaccagctatcccgagttcgacctctccaggccggagacgatcgaagcggcggtagcgaagatccagcccgagctgatcgtgtcggccgccgcctataccgcggtcgacaagtccgagagcgaacccgagctcgccatggcgatcaacggtgacggccccggcgtgctcgcgcgtgcgggcgcgaagatcggcgcgccgatcatccagctgtcgaccgactatgtgttcgacggcagcctcgaccgcccctggcgcgaggacgaccccaccggcccgctcggcgtctatggcgcgaccaagctggccggcgagcaggcggtacaggcctcgggtgcgaccaacgccgtgatccggctggcctgggtctacagcccgttcggcaacaacttcgtcaagacgatgctgcgcctcgccgagacgcgcgacgcgctgaacgtggtggaagaccagcagggctgccccagctcggccctggacatcgcctcggcgatcctggcggtggtcgaacgctggcagcgcgacggcgcgttcagcggcgtctaccacttcgccggctcgggcgagaccaactgggccgacttcgcccgcgccatctttgccgaaagtgccaagcgcggcggcccgacggcgacggtgaccggcatccccagttcggactatccgacgcctgccaagcgcccggccaactcccgcctcgattgcagccgcttcgccgataccttcggctatcgcgcgccggcctggcaggactcgctggcggtggtgatgggacgcctgctcggctga

SEQ ID NO: 49867 - protein, 288 aa, Sphingomonas elodea
MRILVTGHDGQVAQSLGEQAQGHELIFTSYPEFDLSRPETIEAAVAKIQPELIVSAAAYTAVDKSESEPELAMAINGDGPGVLARAGAKIGAPIIQLSTDYVFDGSLDRPWREDDPTGPLGVYGATKLAGEQAVQASGATNAVIRLAWVYSPFGNNFVKTMLRLAETRDALNVVEDQQGCPSSALDIASAILAVVERWQRDGAFSGVYHFAGSGETNWADFARAIFAESAKRGGPTATVTGIPSSDYPTPAKRPANSRLDCSRFADTFGYRAPAWQDSLAVVMGRLLG

SEQ ID NO: 49868 - DNA, 852 bp, Streptococcus gordonii
  CDS (1)..(852): transl_table=11
atgattttaatcacaggttcaaatggtcagctgggaacagaacttcgtcatcttttagatgagcgcaatgaggattatgttgcagttgacgttgccgaaatggatattacgaatgctgaaatggttgaaaaggtctttgcagaagttaaaccaaccttggtatatcactgtgccgcttatacagcagttgatgcagcagaggatgaaggaaaagagcttaattatgccatcaatgtgactggaactgaaaatgtagcaaaagcggctgaagcacacggagcgacattagtttatatttctacggactatgtctttgatggccaaaagcctgtcggtgaagaatgggaagtagatgatcaaccagatcctaaaacagaatacggccgtaccaagcgtatgggagaagagttggtagagaagtattctagtcgtttctacattattcgtacagcttgggtctttggtaattatggtaaaaactttgtctttacaatgcaaaatctagctaagactcacccgactttgacagttgttaacgaccagcatggccgtccgacttggactcgtaccttagctgaattcatgacctacttggctgraaatcaaaaggaattcggctattaccatctgtctaatgacgctgcagaagacactacttggtatgactttgcagttgagattctcaaggatacgaatgtagaagttaaaccggtggactcaagccaattccctgctaaagcaaaacggccactcaattcaactatgagcttgactaaggcaaaggcgactggctttgttattccaagctggcaagatgccctgaaagaattctataaacaagaaaagaaataa

SEQ ID NO: 49869 - protein, 283 aa, Streptococcus gordonii
  misc_feature (200)..(200): Xaa can be any naturally occuring amino acid
MILITGSNGQLGTELRHLLDERNEDYVAVDVAEMDITNAEMVEKVFAEVKPTLVYHCAAYTAVDAAEDEGKELNYAINVTGTENVAKAAEAHGATLVYISTDYVFDGQKPVGEEWEVDDQPDPKTEYGRTKRMGEELVEKYSSRFYIIRTAWVFGNYGKNFVFTMQNLAKTHPTLTVVNDQHGRPTWTRTLAEFMTYLAXNQKEFGYYHLSNDAAEDTTWYDFAVEILKDTNVEVKPVDSSQFPAKAKRPLNSTMSLTKAKATGFVIPSWQDALKEFYKQEKK

SEQ ID NO: 49870 - DNA, 888 bp, Vibrio cholerae
  CDS (1)..(888): transl_table=11
atgatgcgtgttctagtgacgggcagccgtggtcaagtggggcactgcttagtccagcagctcagtaccatgaaagaggttgagtttttagcggtagaccgcgaccaactggatatcacctatcccgctcaagtggatgcggtggtgaacgaattcaagcctaacatcatcataaatgcggcggcgcataccgccgttgaccgtgcagagcaagagattgagctctcttacgcgattaaccgagatggccctcactacctagcccaagcagcacagaaggttggtgcggcgatactgcacatttcgacagactatgtcttttccggtgataaaccgaatccatatctcgaagctgaccctaccgcaccactgggcgtgtatggcgaaagcaaattagcgggagaaatcgcggtcgctcaagcctgccctcggcacattatcttgcgcacggcttgggtgtttggtgagcatggcaataactttgtgaaaaccatgcttcgacttgctgccgatacctgtcatgaactgagtattgttggtgaccaatttggtggtcctacctacgcaggtgatattgctagcgcacttgcaactatagcgaggaaaatctcgaaaggtgattcaattgaatacggtatatatcattattctggtacgccacatgtaagctggtgtcaatttgcagatgctatttttgatttagcagttgaacaaggtgttttgagttcaaaacctataattaagagtgttactacagaacaatacccaacgctagctaaacgccctgcgaattctaaaatgagtaataaaaagattgagaataagcttggtattaagggaagcgattggcacgccgcattaaaagatatcaaaatgtatacgaggtaa

SEQ ID NO: 49871 - protein, 295 aa, Vibrio cholerae
MMRVLVTGSRGQVGHCLVQQLSTMKEVEFLAVDRDQLDITYPAQVDAVVNEFKPNIIINAAAHTAVDRAEQEIELSYAINRDGPHYLAQAAQKVGAAILHISTDYVFSGDKPNPYLEADPTAPLGVYGESKLAGEIAVAQACPRHIILRTAWVFGEHGNNFVKTMLRLAADTCHELSIVGDQFGGPTYAGDIASALATIARKISKGDSIEYGIYHYSGTPHVSWCQFADAIFDLAVEQGVLSSKPIIKSVTTEQYPTLAKRPANSKMSNKKIENKLGIKGSDWHAALKDIKMYTR

SEQ ID NO: 49872 - DNA, 855 bp, Vibrio cholerae
  CDS (1)..(855): transl_table=11
atgtttttagtaacgggttcaaatggattacttggaagtgaaataagaagaatattgggaagtgataaagggatttatacagatagaaatgaactagacgtaacagataagaatagtattaagaagttcctcatgtctaggaaagatattgaggtgatcataaattgcgctgctggagctaatgccgaatacattgaggaaaatagtgaatggggcagaagaattactgttgatgctcccatgtatttagctcaggaagcaaaagagaatggaataaagctaatacatatttctacagattatgtttttgatggagataggaatgtgccatatattgaaagtgattatactaatggtctttcattatacggtagattcaaggcggaaggggaacaagctgtattaaaaaatagtgatacttgtgcaatcataagaaccgcatggcttttttctgagcaaatgaaagattttattggtgcaatggtgcgtctttcggagacaagagacagcgtaaatgttgtatttgatcaagtcggaagtccaacatatgtacctgacttagcctcacacataataacaatagctaataacctaaatgttggagagaaagagatttttcatgttacaaatgaaggtgtttgtagttggtacgatattgcatgtcaaattatgagagaattgaaaattgattgcaaggttaaaccaataagaagtagtgaatataaaactaaagcagcaaggcctcattattcagtgctggataagaaaaaagtaaaagaaagattttcccttgaaattagacattatagtgatgcattatctgagtgtttaaaaaacatacatgccactaggtag

SEQ ID NO: 49873 - protein, 284 aa, Vibrio cholerae
MFLVTGSNGLLGSEIRRILGSDKGIYTDRNELDVTDKNSIKKFLMSRKDIEVIINCAAGANAEYIEENSEWGRRITVDAPMYLAQEAKENGIKLIHISTDYVFDGDRNVPYIESDYTNGLSLYGRFKAEGEQAVLKNSDTCAIIRTAWLFSEQMKDFIGAMVRLSETRDSVNVVFDQVGSPTYVPDLASHIITIANNLNVGEKEIFHVTNEGVCSWYDIACQIMRELKIDCKVKPIRSSEYKTKAARPHYSVLDKKKVKERFSLEIRHYSDALSECLKNIHATR

SEQ ID NO: 49874 - DNA, 891 bp, Vibrio cholerae
  CDS (1)..(891): transl_table=11
atgatgcgtgttctagtgacgggcagccgtggtcaagtggggcactgcttagtccagcagctcagtaccatgaaagaggttgagtttttagcggtagaccgcgaccaactggatatcacccattccgctcaagtggatgcggtggtgaatgaattcaagcctaacatcatcatcaatgcggcggcgcataccgccgttgaccgtgcagagcaagagattgagctctcttacgcgattaaccgagatggccctcactacctagcccaagcggcacagaaggttggtgcggcgatactgcacatttcgacagactatgtcttttctggtgataaaccgaatccatatctcgaaactgaccctaccgcaccacagggcgtgtatggcgaaagcaaattagcgggagaaatcgcggtcgctcaagcctgccctcggcacattatcttgcgcacggcttgggtgtttggtgagcatggcaataactttgtgaaaaccatgctgcgtttagcacaaacacgcgatgccctaggcgtggtagcagaccagtatggtggcccgacgtatgcgggagatattgccaacgcgctactgatgatggcgaaagcgattgtggaggggaaatctaccgcttttggtgtatatcatttttctggattaccgcatgtcagttggcatgagtttgcttgcactatttttgataaagcccgtgaccaagggatattgaataaatccttgcaagtcaatgcaattactacgcaagagtacccaaccccggcgaagaggccggctaactctcagttagacacccagaaaatccatcaacacttcggtgtagttgccagcgattggcaggccgcattgaaccatctcatcgactataagagtgaagaataa

SEQ ID NO: 49875 - protein, 296 aa, Vibrio cholerae
MMRVLVTGSRGQVGHCLVQQLSTMKEVEFLAVDRDQLDITHSAQVDAVVNEFKPNIIINAAAHTAVDRAEQEIELSYAINRDGPHYLAQAAQKVGAAILHISTDYVFSGDKPNPYLETDPTAPQGVYGESKLAGEIAVAQACPRHIILRTAWVFGEHGNNFVKTMLRLAQTRDALGVVADQYGGPTYAGDIANALLMMAKAIVEGKSTAFGVYHFSGLPHVSWHEFACTIFDKARDQGILNKSLQVNAITTQEYPTPAKRPANSQLDTQKIHQHFGVVASDWQAALNHLIDYKSEE

SEQ ID NO: 49876 - DNA, 891 bp, Vibrio cholerae
  CDS (1)..(891): transl_table=11
atgatgcgtgttctagtgacgggcagccgtggtcaagtggggcactgcttagtccagcagctcagtaccatgaaagaggttgagtttttagcggtagaccgcgaccaactggatatcacctatcccgctcaagtggatgcggtggtgaacgaattcaagcctaacatcatcatcaatgcggcggcgcataccgccgttgaccgtgcagagcaagagattgagctctcttacgcgattaaccgagatggccctcactacctagcccaagcggcacagaaggttggtgcggcgatactgcacatttcgacagactatgtcttttccggtgataaaccgaatccatatctcgaaactgaccctaccgcaccacagggcgtgtatggcgaaagcaaattagcgggagaaatcgcggtcgctcaagcctgctctcggcacattatcttgcgcacggcttgggtgtttggtgagcatggcaataactttgtgaaaaccatgctgcgtttagcacaaacacgcgatgccctaggcgtggtagcagaccagtgtggtggcccgacgtatgcgggagatattgccaacgcgctactgatgatggcgaaagcgattgtggagggtaaatctaccgcttttggtgtgtatcatttttctggattaccgcatgtcagttggcatgagtttgcttgcactatttttgataaagcccgtgaccaagggatattgaataaatccttgcaagtcaatgcaattactacgcaagagtacccaaccccggcgaagagaccggctaactctcggttagacacccagaaaatccatcaacacttcggtgtagttgccagtgattggcagactgcattgaaccatctcatcgactataagagtgaagaataa

SEQ ID NO: 49877 - protein, 296 aa, Vibrio cholerae
MMRVLVTGSRGQVGHCLVQQLSTMKEVEFLAVDRDQLDITYPAQVDAVVNEFKPNIIINAAAHTAVDRAEQEIELSYAINRDGPHYLAQAAQKVGAAILHISTDYVFSGDKPNPYLETDPTAPQGVYGESKLAGEIAVAQACSRHIILRTAWVFGEHGNNFVKTMLRLAQTRDALGVVADQCGGPTYAGDIANALLMMAKAIVEGKSTAFGVYHFSGLPHVSWHEFACTIFDKARDQGILNKSLQVNAITTQEYPTPAKRPANSRLDTQKIHQHFGVVASDWQTALNHLIDYKSEE

SEQ ID NO: 49878 - DNA, 891 bp, Vibrio cholerae
  CDS (1)..(891): transl_table=11
atgatgcgtgttctagtgacgggcagccgtggtcaagtggggcactgcttagtccagcagctcagtaccatgaaagaggttgagtttttagcggtagaccgcgaccaactggatatcacctatcccgctcaagtggatgcggtggtgaacaaattcaagcctaacatcatcatcaatgcggcggcgcataccgccgttgaccgagcagagcaagagattgagctctcttacgcgattaaccgagatggccctcactacctagcccaagcggcacagaaggttggtgcggcgatactgcacatttcgacagactatgtcttttccggtgataaaccgaatccatatctcgaaactgaccctaccgcaccacagggcgtgtatggcgaaagcaaattagcgggagaaatcgcggtcgctcaagcctgccctcggcacattatcttgcgcacggcttgggtgtttggtgagcatggcaataactttgtgaaaaccatgttgcgtttggcacaaacacgcgatgccctaggcgtggtagcagaccagtgtggtggccctacgtatgcgggagatattgccaacgcgctactgatgatggcgaaagcgattgtggatgggaaatctaccgcttttggtgtgtatcatttttctggattaccgcatgtcagttggcatgagtttgcttgcactatttttgataaagcccgtgaccaagggatattgaataaatccttgcaagtcaatgcaattactacgcaagagtacccaaccccggcgaagaggccggctaactctcggttagacacccagaaaatccatcaacacttcggtgtagttgccagtgattggcagactgcattgaaccatctcatcgactataagagtgaagaataa

SEQ ID NO: 49879 - protein, 296 aa, Vibrio cholerae
MMRVLVTGSRGQVGHCLVQQLSTMKEVEFLAVDRDQLDITYPAQVDAVVNKFKPNIIINAAAHTAVDRAEQEIELSYAINRDGPHYLAQAAQKVGAAILHISTDYVFSGDKPNPYLETDPTAPQGVYGESKLAGEIAVAQACPRHIILRTAWVFGEHGNNFVKTMLRLAQTRDALGVVADQCGGPTYAGDIANALLMMAKAIVDGKSTAFGVYHFSGLPHVSWHEFACTIFDKARDQGILNKSLQVNAITTQEYPTPAKRPANSRLDTQKIHQHFGVVASDWQTALNHLIDYKSEE

SEQ ID NO: 49880 - DNA, 891 bp, Vibrio cholerae
  CDS (1)..(891): transl_table=11
atgatgcgtgttctagtgacgggcagccgtggtcaagtggggcactgcttagcccagcagctcagtaccatgaaagaggttgagtttttagcgatagaccgcgaccaactggatatcacccattctgctcaagtggatgcggtggtgaacgaatttaagcctaacatcatcatcaatgcggcggcgcataccgccgttgaccgtgcagagcaagagattgagctctcttacgcgattaaccgagatggccctcactacctagcccaagcggcacagaaggttggtgcggcgatactgcacatttcgacagactatgtcttttccggtgataaaccgaatccatatctcgaaactgaccctaccgcaccacagggcgtgtatggcgaaagcaaattagcgggagaaatcgcggtcgctcaagcctgccctcggcacattatcttgcgcacggcttgggtgtttggtgagcatggcaataactttgtgaaaaccatgctgcgtttagcacaaacacgcgatgccctaggcgtggtagcagaccagtatggtggccctacgtatgcgggagatattgccaacgcgctactgatgatggcgaaagcgattgtggaggggaaatctaccgcttttggtgtgtatcatttttctggattaccgcatgtcagttggcatgagtttgcttgcactatttttgataaagcccgtgaccaagggatattgaataaatccttgcaagtcaatgcaatcactacgcaagagtacccaaccccggcgaagagaccggctaactctcggttagacacccagaaaatccatcaacacttcggtgtagttgccagtgattggcagactgcattgaaccatctcatcgactataagagtgaagaataa

SEQ ID NO: 49881 - protein, 296 aa, Vibrio cholerae
MMRVLVTGSRGQVGHCLAQQLSTMKEVEFLAIDRDQLDITHSAQVDAVVNEFKPNIIINAAAHTAVDRAEQEIELSYAINRDGPHYLAQAAQKVGAAILHISTDYVFSGDKPNPYLETDPTAPQGVYGESKLAGEIAVAQACPRHIILRTAWVFGEHGNNFVKTMLRLAQTRDALGVVADQYGGPTYAGDIANALLMMAKAIVEGKSTAFGVYHFSGLPHVSWHEFACTIFDKARDQGILNKSLQVNAITTQEYPTPAKRPANSRLDTQKIHQHFGVVASDWQTALNHLIDYKSEE

SEQ ID NO: 49882 - DNA, 873 bp, Vibrio vulnificus
  CDS (1)..(873): transl_table=11
atgaaagttttaattaccggatgtaacggccaagttggtcattgtctgactgagcgtctaaaaactcaagctgaggtgttggctttagattacgaagggctagatattaccaaccgtgaagctgtgtttaacacagtggctgagtttaagcctaattacattatcaacgccgcagcgtataccgcggtcgaccgtgctgagcaagaagttaagctttcttttgccattaaccgtgatggcccaagttacttagcacaagcctccaatgagtgcggcgcggttatgctacacatttccaccgattatgtattcgatggtatgggcgataagccataccaagaaggcgataacaccggacctcaaggtgtttatgggcagagcaaattagcaggagagcaagccgtagctgaagcttgtcctgagcatttgattctacgtacagcttgggtgtttggggagcatggcaacaactttgtaaaaaccatgctgcgtttagcacaaagccgcgatgagctgagtattgtcggcgatcagtttggcggcccaacctatgccggcgatattgctgatgcgttgattgccatggtgcaatacatcgagctgggtagcaaacctaagtggggtgtgtatcacttctctggaatgccatacgccagctggtatgatttcgcgtctgctatattccaagcggcagaacaacataaaatgttggataaacaaccactactctcttcaattccaacatcagcttacccaacgccagccaaacgcccagccaactcccgattagattgtgcgaaaattgaaaatcaattcggcataaagccaagtgattggcaggttgctttaaacaatattcaagcttataagtaa

SEQ ID NO: 49883 - protein, 290 aa, Vibrio vulnificus
MKVLITGCNGQVGHCLTERLKTQAEVLALDYEGLDITNREAVFNTVAEFKPNYIINAAAYTAVDRAEQEVKLSFAINRDGPSYLAQASNECGAVMLHISTDYVFDGMGDKPYQEGDNTGPQGVYGQSKLAGEQAVAEACPEHLILRTAWVFGEHGNNFVKTMLRLAQSRDELSIVGDQFGGPTYAGDIADALIAMVQYIELGSKPKWGVYHFSGMPYASWYDFASAIFQAAEQHKMLDKQPLLSSIPTSAYPTPAKRPANSRLDCAKIENQFGIKPSDWQVALNNIQAYK

SEQ ID NO: 49884 - DNA, 900 bp, Lactococcus lactis subsp
  CDS (1)..(900): transl_table=11
atgattttaataacaggtggaaatggtcagcttggaacagagttgcgtcatttacttgacgaacgtggcatggcttatacagcaacagatgccaaagaacttgatatcactgataaagttgcggttgatacattctttgacaaaaacaaacctgaacttgtttatcactgcgcagcttatacagctgttgataaagccgaagatgaaggtcgcgagcttgatgaaaaaatcaatgtcgatggcacaaaaaatgtggccgaagcagctgcacgcgtaggtgcaacattggtttatatttcaacagactatgtttttggtgggactttgccaattggtcaagaatggccagttgatgcaccaaaagcgcctgaatctgaatatggacggacaaaacaccttggtgaagaagctgttgttgcctctggtgtaaaacattatatcgttcgtactgcttgggtttttggttcatatgggccaaactttgtctttacaatgcaaaatttggcgactcgttttcctgaattgaccgttgttaatgaccaacatggtcgtccaacatggacacgtacgcttgctgaatttatggtttatttagttaatgaaaaagctgactttggtttttatcatttaacaaatgatgctgcacctggcgaagacgtaacttggtttgattttgccaaagaaattttgaaagatacagatgtgcttgttaagcctgtagattctagtaaattcccagcaaaagccaaacgtccatttaattcaacaatgagtcttgaaaaagcaaaagcgacaggttttgtcattcctacatggcaagatgctttagcaagtatgcttgaaaaaggcgatttacgtgaaaataaagatggcctaaaaggcgagattagtaaaaaataa

SEQ ID NO: 49885 - protein, 299 aa, Lactococcus lactis subsp
MILITGGNGQLGTELRHLLDERGMAYTATDAKELDITDKVAVDTFFDKNKPELVYHCAAYTAVDKAEDEGRELDEKINVDGTKNVAEAAARVGATLVYISTDYVFGGTLPIGQEWPVDAPKAPESEYGRTKHLGEEAVVASGVKHYIVRTAWVFGSYGPNFVFTMQNLATRFPELTVVNDQHGRPTWTRTLAEFMVYLVNEKADFGFYHLTNDAAPGEDVTWFDFAKEILKDTDVLVKPVDSSKFPAKAKRPFNSTMSLEKAKATGFVIPTWQDALASMLEKGDLRENKDGLKGEISKK

SEQ ID NO: 49886 - DNA, 867 bp, Streptomyces roseochromogenes subsp
  CDS (1)..(867): transl_table=11
atggtgaatcggtggttagttactggtgcggcaggaatgctcgggcgagatttagtgggggttttgcaagggttgaacgaatcagtggttgctgtcactcgacaggatctcgacatcaccgaccgcttttcagtccgagccgttgtctccaggtatcaaccgacgacgattgtcaattgcgcagcgtggacgcgattccctgaagcggaggtcagtgaatcggaggcccttcttatcaacggaagaggggtcagagagcttgcttcgatatgcagcgatcgatcgatacggttggtccacctctccactgattatgttttcgatggcacgagttgccagccctatgccgaaagtgcggccaccagtccgatcaacgcgtacggccggacaaagctggccggcgagcaggctgtgctcgagttgctgccagacgacgggacgatcgtacgaaccgcctggctttacgggcgacatggcacgaacttcattcgcaagatggtccggctggagcagatgcgcaagacggtggacgtggtggacgatcagtggggccagccaacgtggaccgtggatttggcacaacagatcgtggcactcgttcggcagggcgcatccggcgtgttccacggaacgagctcaggtgagaccacttggtacgacatcgcccggatggtcttccggttgctcggtgcggatcccggacgcatccgcccggtgcgcagcgaccaagtcgccggtggcgaactgcggccccggtacacggtgttggggcatgctgcctggcgcgaggtcgggctgacgccgattcggcattgggctaccgctctgacgcagtcgtttccccttctggttgacggtgaatcgtaa

SEQ ID NO: 49887 - protein, 288 aa, Streptomyces roseochromogenes subsp
MVNRWLVTGAAGMLGRDLVGVLQGLNESVVAVTRQDLDITDRFSVRAVVSRYQPTTIVNCAAWTRFPEAEVSESEALLINGRGVRELASICSDRSIRLVHLSTDYVFDGTSCQPYAESAATSPINAYGRTKLAGEQAVLELLPDDGTIVRTAWLYGRHGTNFIRKMVRLEQMRKTVDVVDDQWGQPTWTVDLAQQIVALVRQGASGVFHGTSSGETTWYDIARMVFRLLGADPGRIRPVRSDQVAGGELRPRYTVLGHAAWREVGLTPIRHWATALTQSFPLLVDGES

SEQ ID NO: 49888 - DNA, 837 bp, Streptococcus suis
  CDS (1)..(837): transl_table=11
atgattttaattacaggtgcaaatggtcagttgggtacagaattgcgttatctcttggatgagcgtggtgttgattacgttgccgctgacgtagcagaaatggacatcacggatgcagataaagtagatgccttctttgcagaagtaaagccaagcgttgtataccactgtgcagcctacacagctgttgatatggcagaggatgaaggcaaggaactcaactacaagattaacgtaacaggctctgaaaatgttgccaaggcaaccgctaaatactgtgcgaccctcgtttacatctcaacggactatgtcttcaatggtgatttgccagtcggcaaagagtggcaagtagatgaccaaccggatcctcaatctgaatacggtcgcaccaagcgcaagggtgaggaagcagttgagaaatttgctgacaaattctacactgttcgtacagcttgggtctttggtaactacggtaaaaactttgttttcactatgcaaaatcttgcggaaacccgcgatactttgacggttgtcaatgaccaacacggtcgtccaacttggacccgtacccttgcggaattcatggtacacttggtggacaccaagcaagcatttggttactaccatttgtcaaacgatgcagcagaagatacgacttggtttgactttgcgacggaagtcctcaaggataccaacaccaaggtattgccagtggattctagccagttcccagccaaggcaaaacgtccattcaactcaaccatgagcttggacaaggcaaaggcgacaggttttgtcatcccaacttggcaagaagcattggaaggcattctataa

SEQ ID NO: 49889 - protein, 278 aa, Streptococcus suis
MILITGANGQLGTELRYLLDERGVDYVAADVAEMDITDADKVDAFFAEVKPSVVYHCAAYTAVDMAEDEGKELNYKINVTGSENVAKATAKYCATLVYISTDYVFNGDLPVGKEWQVDDQPDPQSEYGRTKRKGEEAVEKFADKFYTVRTAWVFGNYGKNFVFTMQNLAETRDTLTVVNDQHGRPTWTRTLAEFMVHLVDTKQAFGYYHLSNDAAEDTTWFDFATEVLKDTNTKVLPVDSSQFPAKAKRPFNSTMSLDKAKATGFVIPTWQEALEGIL

SEQ ID NO: 49890 - DNA, 903 bp, Aeromonas hydrophila
  CDS (1)..(903): transl_table=11
atgaagatcttgttgttgggggctcgtggccaactgggacgagcccttttttctgcgctacgccagatgtttcctcattggcaagtggatgcacctggaagggaagagtgcgacatcacgattccggatgtcttgtgtggctggattgatgcttgccgtcccgatgtcatcatcaactgtgctgcctacacggcagtcgatgaggctgaaagtgagcaggaactggccgacatggcaaatcaccaggccttgttgtgtatggcgagggaagccagtaatgcgggtgcgttgctggtgcacttctcaacggattatgtatttgacgggacaggaaccaagccttggcttgagacggatcaacccagacctctgaatgtctatggcatgagcaagtatgctggtgaactcgccatacagcgcctgtgcccacatcatttgattattcgcactggctggctgtacggtggagaaggcagacactttgcgcgcaccattttggcgcgggccaggcaggggcaagcacttgctgtggttgacgatcagtggggagctccgacccaggttgattggctggcgagagcatctgtattggcgctgtcgcaagtgttgaactcacctaataaggctgggctataccatctggtgtgccgcggcgagacaagctggcatggcttcgcctctgctctggtgaatgaggcgtttcgattaggcatgttgaaagaacagataaatgttcgcgctattcattcggatgaatggccacaacaggcgcgccgacctttgaactccaggttggattgccatcatttttcagatctctttggaactgagcagccacactggcaggaacagatgaaagattggctgtttagccttaagatatcagaggtgaaagaaatatga

SEQ ID NO: 49891 - protein, 300 aa, Aeromonas hydrophila
MKILLLGARGQLGRALFSALRQMFPHWQVDAPGREECDITIPDVLCGWIDACRPDVIINCAAYTAVDEAESEQELADMANHQALLCMAREASNAGALLVHFSTDYVFDGTGTKPWLETDQPRPLNVYGMSKYAGELAIQRLCPHHLIIRTGWLYGGEGRHFARTILARARQGQALAVVDDQWGAPTQVDWLARASVLALSQVLNSPNKAGLYHLVCRGETSWHGFASALVNEAFRLGMLKEQINVRAIHSDEWPQQARRPLNSRLDCHHFSDLFGTEQPHWQEQMKDWLFSLKISEVKEI

SEQ ID NO: 49892 - DNA, 903 bp, Aeromonas hydrophila
  CDS (1)..(903): transl_table=11
atgaagatcttgttgttgggggctcgtggccaactgggacgagcccttttttctgcgctacgccagatgtttcctcattggcaagtggatgcacctggaagggaagagtgcgacatcacgattccggatgtcttgtgtggctggattgatgcttgccgtcccgatgtcatcatcaactgtgctgcctacacggcagtcgatgaggctgaaagtgagcaggaactggccgacatggcaaatcaccaggccttgttgtgtatggcgagggaagccagtaatgcgggggcgttgctggtgcacttctcaacggattatgtgtttgacgggacaggagccaggccttggcgtgagacggatcaacccagacctctgaatgtctatggcatgagcaagtatgctggtgaactcgccatacagcgcctatgcccacatcatttgattattcgcactggctggctgtacggtggagaaggcagacactttgcgcgcaccattttggcgcgggccagacaggggcaagcacttgctgtggttgacgatcagtggggagctccgacccaggttgattggctggcgagagcatctgtattggcgctgtcgcaagtgttgaactcacctaataaggctgggctataccatctggtgtgccgcggcgagacaagctggcacggttttgcctctgctctggtgaatgaggcgtttcggttaggcatgttgaaagagcagagaaatgttcacgctattcattcggatgaatggccacaacaggcgcgccgacctttgaactcgaggttggattgccatcatttttcagatctctttggaactgagcagccacactggcaggaacagatgaaagattggctgtttagccttaagatatcagaggtgaaagaaatatga

SEQ ID NO: 49893 - protein, 300 aa, Aeromonas hydrophila
MKILLLGARGQLGRALFSALRQMFPHWQVDAPGREECDITIPDVLCGWIDACRPDVIINCAAYTAVDEAESEQELADMANHQALLCMAREASNAGALLVHFSTDYVFDGTGARPWRETDQPRPLNVYGMSKYAGELAIQRLCPHHLIIRTGWLYGGEGRHFARTILARARQGQALAVVDDQWGAPTQVDWLARASVLALSQVLNSPNKAGLYHLVCRGETSWHGFASALVNEAFRLGMLKEQRNVHAIHSDEWPQQARRPLNSRLDCHHFSDLFGTEQPHWQEQMKDWLFSLKISEVKEI

SEQ ID NO: 49894 - DNA, 1002 bp, Lactobacillus gasseri
  CDS (1)..(1002): transl_table=11
atgaaagtttttgtaactggcgttaatggtcaacttggccatgacgtaatgaatgaacttgctaagcgcggctatgaaggtgtaggttctgacttggcacctgaatatgctggtgttgctgacggaagcagcgttactaaggcaccttatgtttctttagatattactgatgcaaaagccgtagacaaggttatttctgaagtaaatcctgatgttattgttcactgtgctgcctggactgcagttgatatggctgaagatgacgataaggttgcagctgttcgcaaagttaacgttgacggaactcaaaacatcgctaacgttgcaaagaaattagattccccaatggtttacttgtcaactgactatgtcttcgatggccagggaactaccccttgggaaccagactttaagggctataagcctttgaatgtttatggtgaaaccaagcttggcggggaagaagctgttgctaatactttagacaagtatttcattgttagaattgcttgggtatttggtgtaaatggctcaaactttatcaagactatgcttaaggttggttcaaatcacgacgaagttaaggttgttagtgatcagattggtaccccaacttatacttttgacttagctcgtcttttggtagatatgattgaaactgataaatatggctactaccacgcaactaattcagaactaccagcaactgaaagtggctatgacgaaaatggtactaagactggttatatttcttggtacgatttcactaaagaaatttatcgtcaagctggctataagacaaaggttactcctgtaactactgaagaatatggcttatctaaggcagttcgtccgtttaactctcgtctagataagagcaagttagaagaaaatggctttaaaccacttccaacttggactgatgctattagtcgttacttagatatcttaaaagatgacggtttccttcgacaatctgaagaagtagacttttttaattga

SEQ ID NO: 49895 - protein, 333 aa, Lactobacillus gasseri
MKVFVTGVNGQLGHDVMNELAKRGYEGVGSDLAPEYAGVADGSSVTKAPYVSLDITDAKAVDKVISEVNPDVIVHCAAWTAVDMAEDDDKVAAVRKVNVDGTQNIANVAKKLDSPMVYLSTDYVFDGQGTTPWEPDFKGYKPLNVYGETKLGGEEAVANTLDKYFIVRIAWVFGVNGSNFIKTMLKVGSNHDEVKVVSDQIGTPTYTFDLARLLVDMIETDKYGYYHATNSELPATESGYDENGTKTGYISWYDFTKEIYRQAGYKTKVTPVTTEEYGLSKAVRPFNSRLDKSKLEENGFKPLPTWTDAISRYLDILKDDGFLRQSEEVDFFN

SEQ ID NO: 49896 - DNA, 921 bp, Leptospira interrogans
  CDS (1)..(921): transl_table=11
atgatttattatactggaaaaaacggtcagttagcttgggaattggccgaaagatttaaatctaatggattggaagcagtaggatttggtagggaagaatgggatcttgcagatcttgattctgccgcacgaattttgaaggattctcctcggattttagttcattgtggggcttatactgcggtggataaggcagagtccgactcagagaacgcttacaaaatcaattcgttatctgtaaaaaaaatttcggaagaatgtctaaaaagaaaaatccatttaatttatatatccactgattttgtatttgatgcaaattcggaaacgatcggtgatacgattcgtttttggaaaccggattctacactttctccgaaaggaatctacggattgtcaaaggcggaaggggaaaagtggattcgaaatacgtttgcgaattctaaacaagcaaatatcatccgtaccagttgggtatattcctctcatggaaataattttccaaaaacaattgtgaaacttttacaagactctaatcgtcatgaattaagagtgatcgaagatcaattgggaagacctacttgggctggtaggcttgcggattttataatattcttaatttatggaattctaaaaggagaatcttatcctaagattctacatttttctaactcaggagttgcgagctggtacgattttgcacttgcagttcgggatcttgcacattctttttcattgatagagaatttaaaacctatttttccaattcctacggaaggttatccaacacctgcacctaggcctagatattcaattttagatttagaagaaactcgaaaaatttttggcgttgttccgcattggagagaggatttaaccctttgtctaaaagaacttgccgaagtttccggaaaaaaagtatga

SEQ ID NO: 49897 - protein, 306 aa, Leptospira interrogans
MIYYTGKNGQLAWELAERFKSNGLEAVGFGREEWDLADLDSAARILKDSPRILVHCGAYTAVDKAESDSENAYKINSLSVKKISEECLKRKIHLIYISTDFVFDANSETIGDTIRFWKPDSTLSPKGIYGLSKAEGEKWIRNTFANSKQANIIRTSWVYSSHGNNFPKTIVKLLQDSNRHELRVIEDQLGRPTWAGRLADFIIFLIYGILKGESYPKILHFSNSGVASWYDFALAVRDLAHSFSLIENLKPIFPIPTEGYPTPAPRPRYSILDLEETRKIFGVVPHWREDLTLCLKELAEVSGKKV

SEQ ID NO: 49898 - DNA, 900 bp, Shigella boydii
  CDS (1)..(900): transl_table=11
atgaatattctccttttcggcaaaacagggcaggtaggttgggaactacagcgtgctctggcacctttgggtaatttgattgctcttgatgttcactccactgattattgtggtgattttagtaatcctgaaggtgtagctgaaaccgtaagaagcattcggcctgatattattgtcaacgcagccgctcacaccgcagtagacaaagcagaatcagaaccggagtttgcacaattacttaacgcgacaagtgtcgaagcgattgcgaaaacagccaatgaagtcggcgcctgggttattcactactctactgactacgtatttccggggaccggtgaaataccatggcaggagacggatgcaaccgcaccgctaaatatttacggtgaaaccaagttagctggagaaaaagcattacaagagcattgtgcgaagcaccttattttccgtaccagctgggtatatgcaggtaaaggaaacaattttgccaagacaatgttacgtctggcaaaagagcgcgaagaattagctgtcattaacgatcagtttggtgcaccaacaggtgctgaactgctggctgattgtacggcacatgcaattcgtatggcactgaataaaccagaagtcgcaggtttgtaccatctggtagccagtggtaccacaacctggcacgattatgctgcgctggtttttgaagcggcgcgcaatgcaggcattccccttgcactcaacaagctcaacgcagtaccaacaactgcctatcctacaccagctcgtcgtccacataactctcgccttaatacagaaaaatttcagcagaactttgcgcttgtcttgcctgactggcaggttggcgtgaaacgaatgctcaacgaattatttacgactacagcaatttaa

SEQ ID NO: 49899 - protein, 299 aa, Shigella boydii
MNILLFGKTGQVGWELQRALAPLGNLIALDVHSTDYCGDFSNPEGVAETVRSIRPDIIVNAAAHTAVDKAESEPEFAQLLNATSVEAIAKTANEVGAWVIHYSTDYVFPGTGEIPWQETDATAPLNIYGETKLAGEKALQEHCAKHLIFRTSWVYAGKGNNFAKTMLRLAKEREELAVINDQFGAPTGAELLADCTAHAIRMALNKPEVAGLYHLVASGTTTWHDYAALVFEAARNAGIPLALNKLNAVPTTAYPTPARRPHNSRLNTEKFQQNFALVLPDWQVGVKRMLNELFTTTAI

SEQ ID NO: 49900 - DNA, 900 bp, Shigella boydii
  CDS (1)..(900): transl_table=11
atgaatatcctcctttttggcaaaacagggcaggtaggttgggaactacagcgtgctctggcacctctgggtaatttgattgctcttgatgttcactccactgattattgtggtgattttagtaattctgaaggtgtagctgaaactgtcaaaaaaattcgccctgatgttattgttaatgcggctgctcataccgcggtagataaggctgagtcagaacccgaatttgcacaattactcaatgcgacaagtgttgaagcgattgcaaaagcagccaatgaggtcggtgcatgggttattcactactctactgactacgtatttccgggaaccggtgaaataccatggcaggaggcggatgcaaccgcaccgctgaacgtttatggtgaaaccaagttagccggggaaaaagcattacaagagcattgtgcgaagcatcttattttccggaccagctgggtctatgcaggtaaaggaaataacttcgccaaaacgatgttgcgtctggcaaaagagcgtgaagaattagctgttattaacgatcagtttggtgcgccaactggcgcagagttactggctgattgtacggcacatgccattcgtgtggcactgaataaaccggaagtcgcaggcttgtaccatctggtagctagtggtaccacaacgtggcacgattatgctgcgctggtttttgaagaggcgcgcaaagcaggcattccccttgcactcaacaagctcaacgcagtaccaacaacagcctatcctacaccagctcgtcgtccgcataactctcgccttgatacagaaaaatttcagcagaactttgcgcttgtcttgcctgactggcagattggcgtgaaacgcatgctcaacgaattatttacgactacagctatttaa

SEQ ID NO: 49901 - protein, 299 aa, Shigella boydii
MNILLFGKTGQVGWELQRALAPLGNLIALDVHSTDYCGDFSNSEGVAETVKKIRPDVIVNAAAHTAVDKAESEPEFAQLLNATSVEAIAKAANEVGAWVIHYSTDYVFPGTGEIPWQEADATAPLNVYGETKLAGEKALQEHCAKHLIFRTSWVYAGKGNNFAKTMLRLAKEREELAVINDQFGAPTGAELLADCTAHAIRVALNKPEVAGLYHLVASGTTTWHDYAALVFEEARKAGIPLALNKLNAVPTTAYPTPARRPHNSRLDTEKFQQNFALVLPDWQIGVKRMLNELFTTTAI

SEQ ID NO: 49902 - DNA, 918 bp, Saccharopolyspora spinosa
  CDS (1)..(918): transl_table=11
atgagtcgcctcgccgtgctggtgcccggcggccgcggccagctgggctcggagctggcccggatcctcgccgcgcggacgggggcgctggtgcaccggccgggttccggggaactggacgtcaccgacgccgaggaggtcgccgacgcgttgggttccttcgcggagacggcgaaggacgcggagctgcgaccggtggtgatcaacgccgcggcgtacacggcggtggacgcggccgagtccgacccggaccgcgcggcccggatcaacgccgaaggcgcggcctcgctggcgaaagcgtgccggagcagcggtctgcccctggtgcacgtgtcgacggattacgtgttccccggtgatggggcccggccgtacgagccgacggacccgaccgggccgcgatcggtctacgggcgcaccaagctcgaaggcgaacgggccgtgctggagtccggcgcgcgggcctgggtggtgcgcacggcatgggtgtacggcgcgagcggcaagaacttcctgaaaacgatgatccgcctctcgggggagcgcgacacgctgtccgttgtggacgatcagatcggctcgccgacttgggcggcggacctggcgagcggcctgctggagctggccgaacgggtcgccgaacgccgtggaccggagcagaaggtgctgcactgcaccaattccggccaggtgacctggtacgagttcgcgcgggcgatcttcgcggaattcggcctggacgagaaccgcgtccacccgtgcacgacggcggacttccccctcccggcgcaccgcccggcctactcggtcctgtccgacgtggcgtggcgagaggcgggcctgaccccgatgcgcacctggcgggaagccctggcggcggccttcgagaaagacggcgaaaccctccgaacccgctga

SEQ ID NO: 49903 - protein, 305 aa, Saccharopolyspora spinosa
MSRLAVLVPGGRGQLGSELARILAARTGALVHRPGSGELDVTDAEEVADALGSFAETAKDAELRPVVINAAAYTAVDAAESDPDRAARINAEGAASLAKACRSSGLPLVHVSTDYVFPGDGARPYEPTDPTGPRSVYGRTKLEGERAVLESGARAWVVRTAWVYGASGKNFLKTMIRLSGERDTLSVVDDQIGSPTWAADLASGLLELAERVAERRGPEQKVLHCTNSGQVTWYEFARAIFAEFGLDENRVHPCTTADFPLPAHRPAYSVLSDVAWREAGLTPMRTWREALAAAFEKDGETLRTR

SEQ ID NO: 49904 - DNA, 849 bp, Aneurinibacillus thermoaerophilus
  CDS (1)..(849): transl_table=11
atgaaagttcttgtgacaggtggtaagggacaattcgggtatgatgtaacacagatgttgcagggagcaggacatcgtgtgttttcgtatggacgcgaggagttggatattactgatcaaaagcaagttcagtacacaatggaagaggtacagccggacgtggtaattcacgcggctgcatacacaaaagttgatttagccgaaaccgaggtgaatacagcttacaaagttaacgccttgggtacacgtaatgtagcggtagccgctgaagcatgtcgtgccaagcttgtctatattagtacagattatgtttttgatgggcaggcggctggaccttaccacgaatttgcgccaacgaacccgcaaagcatatacggaaagtctaaactggcaggcgagagttttgttcaacagctatgttcccgtttctttattgtccgaacttcttgggtatacgggaaatatggacataattttgtgaagacgatgcttcggctagcaggggagcgggatgaattgaatgtcgtacatgatcaggttggctgtcccacatatactgttgatttggctgcttttgtattgaatttgatcgaaacggaagcttatggtatttaccatgcttccaatacgggaagctgttcatggtacgagttcgcctgtgcgattttcgaagaagcagaaattaagataaaagtaaatccgatcccaacttcggaatatccgcttccggctccgcgtccagcgaactcagtatttgagcatatgatgatacgtttgcaggaaatgaagccgctccgtccgtggagaatagcattacaggagtttatacaggatattcgtaaaagctag

SEQ ID NO: 49905 - protein, 282 aa, Aneurinibacillus thermoaerophilus
MKVLVTGGKGQFGYDVTQMLQGAGHRVFSYGREELDITDQKQVQYTMEEVQPDVVIHAAAYTKVDLAETEVNTAYKVNALGTRNVAVAAEACRAKLVYISTDYVFDGQAAGPYHEFAPTNPQSIYGKSKLAGESFVQQLCSRFFIVRTSWVYGKYGHNFVKTMLRLAGERDELNVVHDQVGCPTYTVDLAAFVLNLIETEAYGIYHASNTGSCSWYEFACAIFEEAEIKIKVNPIPTSEYPLPAPRPANSVFEHMMIRLQEMKPLRPWRIALQEFIQDIRKS

SEQ ID NO: 49906 - DNA, 894 bp, Acinetobacter calcoaceticus
  CDS (1)..(894): transl_table=11
atgaaaatcttattgcttggcaaaaatggacaagtggggtgggaactgcaacgcgcacttgcacctttgggtgaggtcattgctttagaccgacatggtttaaatggcttatctggtgatatgacccagccgcaggcgattagtgatacgattttggcagtacaaccagatgtggtcgtcaatgcttctgcttatacggctgtagatttggctgaaacagaacgtgaactagcggatgttgttaatcatcaaacagtaatggctgtcgccaaagcttgtcagcatgtaaatgctttgttcgtgcattattctacagactatgtttttgatggtgtaggtgaaacagcttttgttgaaactgacgcgattgctccgttaaatgtctatggtaaaactaaagccttaggtgagcaagcaatagtgcagagtggttgccagtatcttatttttaggacatcgtgggtttatgccagtaaaggcaaaaacttcttaaaaacgatgttaggtttggcccaacagcgagaagaattatctattattgcagatcagattggtgcgccgacatctgctgaattaattgccgatgttacagcacatgctattccgcaaacattaacagataaaagcaaagttggtacctatcatttggttgcaagcggagaaacgtcatggttcggctatgcaagttttgtttttgagcaagttcgtgcatttggacaagcattgactattcaaaatgtaaatgcaattccgacctcagcttatccaacacctgcaacaagaccacataattcaagattaaataatcagaagatacaacacactttcggaatactgctaccaaattggcaagatggtgtgaaacgtgcattagtggagttattaagtaaatga

SEQ ID NO: 49907 - protein, 297 aa, Acinetobacter calcoaceticus
MKILLLGKNGQVGWELQRALAPLGEVIALDRHGLNGLSGDMTQPQAISDTILAVQPDVVVNASAYTAVDLAETERELADVVNHQTVMAVAKACQHVNALFVHYSTDYVFDGVGETAFVETDAIAPLNVYGKTKALGEQAIVQSGCQYLIFRTSWVYASKGKNFLKTMLGLAQQREELSIIADQIGAPTSAELIADVTAHAIPQTLTDKSKVGTYHLVASGETSWFGYASFVFEQVRAFGQALTIQNVNAIPTSAYPTPATRPHNSRLNNQKIQHTFGILLPNWQDGVKRALVELLSK

SEQ ID NO: 49908 - DNA, 897 bp, Burkholderia mallei
  CDS (1)..(897): transl_table=11
atgaagattttggtgacgggggcaaacggccaagtgggctgggaactcgctcggagtctggcggtattggggcaagttgtcccgctcacgcgtgagcaggccgatctcggccgccccgaaacgcttgctcgaattgttgaggacgcgaagccggatgtcgtcgtcaatgctgcggcatatacggcggtcgatgctgcggaaaccgatggtgctgcagcgaatgtgatcaacggtgaggcggtaggtgtgctggccgccgcgacgaagcgtgtcggcggcttgttcgttcattactcgacggactacgtttttgacggcaccaagccgtcgccatacatcgagacggatccgacgtgtcccgtcaatgcctacggcgccagcaagttgctgggagagttggcggttgcggagaccggcggcgactggctgacgtttcgcaccacgtgggtgttcgccgcacgcggcaagaacttcctgcgaacgatgcttcgtcttgccaaggagcgcgaagagatgaagatcgtggccgatcagttcggcgcgccgacctgggcgcgatcgattgctgacggcacggcccacgcgctcacgaccgcgatgcgtgaacgcgcggcaggcgcgttcacgtccggcgtctatcacatgacatccgcggggcagacttcatggcacggtttcgcggacgcgatcatcgcatcctggcgagcggctccgggggcggcaccgctcgccgtcagccggatcgtgccgattccggcgagcgcctatcccgtgccggcacagcgcccggcaaactcggtactgtcgaacaaggcgctgaaagagcgtttcggtatcgaactgcctgattggcggtatgcactacggctgtgcgtcaacgatctgcttttccaatga

SEQ ID NO: 49909 - protein, 298 aa, Burkholderia mallei
MKILVTGANGQVGWELARSLAVLGQVVPLTREQADLGRPETLARIVEDAKPDVVVNAAAYTAVDAAETDGAAANVINGEAVGVLAAATKRVGGLFVHYSTDYVFDGTKPSPYIETDPTCPVNAYGASKLLGELAVAETGGDWLTFRTTWVFAARGKNFLRTMLRLAKEREEMKIVADQFGAPTWARSIADGTAHALTTAMRERAAGAFTSGVYHMTSAGQTSWHGFADAIIASWRAAPGAAPLAVSRIVPIPASAYPVPAQRPANSVLSNKALKERFGIELPDWRYALRLCVNDLLFQ

SEQ ID NO: 49910 - DNA, 930 bp, Azospirillum brasilense
  CDS (1)..(930): transl_table=11
atggctgaggccgccccccacaccctccccgttctcgtcttcggtgccaacggtcaggtcggcttcgagctgcggcgcgccgcctgggcgccgggcctggcgccgctcgggctggaccgcgcgtccggcgacgtcaccgacgcaaaggcggtgagcgcggccatcgctgcccaccgcccggcgctggtggtcaacgcctcggcctacaccgccgtggacaaagcggagagcgagcgggacacggccttcgcggtcaaccgcgacggtccggcgaatctggcgcgcgcctgcgccgcagccggggtgccgctgatccatatctccaccgactacgtcttcgacgggaccagcaagaccaccccctggagcgagagcgaccccgtcgccccgcagggcgtctacgccgccagcaaactggccggcgaagaagccgtgcgggacgcccagcccgaccatgtgatcctgcgcaccgcctgggtgttcggggcgcacgggcacaatttcgtgaagaccatgctgcggctggcgcgcgagcgggacgagttgcgggtcgtcgccgaccagcacggctgtccgaccccggcggcggccatcgccgcggccatcgccaccatcgcacaggcccggctgaccggcgagggctggactcccggcaccttccactatggcggggcgccggccaccacttggcacggcttcgccgagcggatcgtcgatcgcgccgccgcccgcatcggccgccgtccggccgtgaccgccatcaccaccgccgactttccgacaccggcccgacggcccgccaattccgtcctcgacaccgcacgcctcggccaggcctacggcatcccgccggcggattggatggctggactcgaccgcgtgcttgacgacatcctcgacgaaacccagggcgtgggagcgaaggcatga

SEQ ID NO: 49911 - protein, 309 aa, Azospirillum brasilense
MAEAAPHTLPVLVFGANGQVGFELRRAAWAPGLAPLGLDRASGDVTDAKAVSAAIAAHRPALVVNASAYTAVDKAESERDTAFAVNRDGPANLARACAAAGVPLIHISTDYVFDGTSKTTPWSESDPVAPQGVYAASKLAGEEAVRDAQPDHVILRTAWVFGAHGHNFVKTMLRLARERDELRVVADQHGCPTPAAAIAAAIATIAQARLTGEGWTPGTFHYGGAPATTWHGFAERIVDRAAARIGRRPAVTAITTADFPTPARRPANSVLDTARLGQAYGIPPADWMAGLDRVLDDILDETQGVGAKA

SEQ ID NO: 49912 - DNA, 879 bp, Actinobacillus actinomycetemcomitans
  CDS (1)..(879): transl_table=11
gtggcaaaatttttgattacgggggcaaacgggcaagttggctactgtttaacccaacagttacaaggcaggcacgaaattttagccgttgatcatgatgagcttgatattacaaaccaaagtgcggtgaaaaaaacggtcgaaaatttttgtcctgatgtagttatcaacgccgcagcacacactgcggtagatcgtgcggaaaccgaagttgagcgttccgaggccattaatgtaaaaggtccgcaatacttggcggaaaccgcgaaaagtgttgatgcggcaattttacatatttcaacagactatgtttttgacgggcggagtgcaggtaaatacaaagaaactgatgcagccgatccgcaaggcatttatggcaaaaccaaactagcaggcgaacaagccgttgtagaagcgaacgataaatttattgtcttgcgtaccgcttgggtattctgcgagcatggcaacaatttcgttaaaacaatgctgcgtttagccaaaactcgtgacactttaggcgtagttgccgatcagatcggtggacctacctatgcaggcgatattgccgctgcgttaattcaaatcgcagaaaaaatcattgcaggcgaatctgttgaatatggcatttatcactttacagggctgccttatgtcagctggtgtgattttgccagagcaatttttgatgaagccgtttcgcaaaatatgttagaaaaagcaccgcttgtcaacgcaatcaccacggcagattacccaacaccagccaaacgccctgcgaattcttgtttagatttaactaaaattcaacaagcattcggtatccaaccaagtgattggcaaagggctttgaagaatattagaacgtatgcggagtaa

SEQ ID NO: 49913 - protein, 292 aa, Actinobacillus actinomycetemcomitans
MAKFLITGANGQVGYCLTQQLQGRHEILAVDHDELDITNQSAVKKTVENFCPDVVINAAAHTAVDRAETEVERSEAINVKGPQYLAETAKSVDAAILHISTDYVFDGRSAGKYKETDAADPQGIYGKTKLAGEQAVVEANDKFIVLRTAWVFCEHGNNFVKTMLRLAKTRDTLGVVADQIGGPTYAGDIAAALIQIAEKIIAGESVEYGIYHFTGLPYVSWCDFARAIFDEAVSQNMLEKAPLVNAITTADYPTPAKRPANSCLDLTKIQQAFGIQPSDWQRALKNIRTYAE

SEQ ID NO: 49914 - DNA, 888 bp, Acetobacter xylinus
  CDS (1)..(888): transl_table=11
atgctacataatccgtcgattctggtaacaggagggcatggacagcttgctaccgcgctggccggtcatgaaggtgtcatgcgggtcgggcgaccggatttcgatttcgaccgacccgggacaatcgatcagatcatggcggaaaatacacccgaattcgtcgtgaacgctgccgcctggactgccgtggacgcagcggaaacagatgccgaaggggctgcaagggccaaccacgccggcccggcccgactggctgccgcatgccgggcgcggggcattccgcttatccatatctcgaccgattacgttttcagcggcgacaagggcagtccgtatatggaaactgatcctgttgatccacgctcggtctacggcagtaccaaggcggccggggaacaggcggtattggcggcacagcctgacagtatcatcctgcggacggcctgggtctattcaccctataaccgcaatttcgtgcgcaccatggtcgaagccgcagccaggcggcctaccctgcgggttgtcagtgaccagatcggcaatccgaccagcgcagacgcactggcgcagaccatcatgcacatcatccggcagatccgtgagaccggttggaaagcggattatgccggaatttaccacgcagccggccagggtgcgacaagctggtatgacctggcctgtgccgcggttgccgctgcggccaggcatggcaacccgcaaccggttatggaacccattaccaccgccgactggccaacaccggcccggcgcccggcggatgcgcggcttgactgcacccgcctgcaggaaacatttggccatgcgcccggtccgtggcagcccgaagtggagcgtgtggcggaactgatcgtatcacagcagggatag

SEQ ID NO: 49915 - protein, 295 aa, Acetobacter xylinus
MLHNPSILVTGGHGQLATALAGHEGVMRVGRPDFDFDRPGTIDQIMAENTPEFVVNAAAWTAVDAAETDAEGAARANHAGPARLAAACRARGIPLIHISTDYVFSGDKGSPYMETDPVDPRSVYGSTKAAGEQAVLAAQPDSIILRTAWVYSPYNRNFVRTMVEAAARRPTLRVVSDQIGNPTSADALAQTIMHIIRQIRETGWKADYAGIYHAAGQGATSWYDLACAAVAAAARHGNPQPVMEPITTADWPTPARRPADARLDCTRLQETFGHAPGPWQPEVERVAELIVSQQG

SEQ ID NO: 49916 - DNA, 900 bp, Salmonella enterica
  CDS (1)..(900): transl_table=11
atgaatatcttactttttggtaagacagggcaagtaggctgggagttgcaacgttctctggcgccagtggggaatctgattgccctggatgtccattcaaaagagttttgcggtgattttagcaatcccaaaggcgttgccgaaaccgttcgtaagcttcgtcccgatgtgattgttaacgcagcagcacatactgcagtagataaagcagagtctgaaccagaactggcgcagttgcttaacgccaccagtgtggaagccatcgctaaagcggccaacgaaattggcgcatgggtagtgcattattcaaccgattatgtatttcctggtaccggcgatatcccatggcaggaaacggacgctacgtcgccgctaaatgtctatggcaagaccaaactagcgggagaaaaggccctgcaggataactgccctaaacaccttatcttccgcaccagttgggtttatgcaggtaagggcaataatttcgcaaagactatgcttcgtttggcgaaagagcgtcagacactttcggtcatcaacgatcagtacggtgcgccaaccggtgcggaattactggctgactgcacggctcatgcgatccgtgtggcgttaaagaaaccagaagtagcaggtctttaccatctggtggccggtggaactacaacctggcatgactacgcagcgttagtctttgacgaggcgcgcaaggcagggctaacgcttgcgcttactgagcttaatgccgtgccaaccagtgcctatccgacgccggcgagcagacctggaaattcgcgtcttaatactgaaaagtttcagagtaattttggccttattctgccgcaatgggaattaggggttaagcgtatgctgactgaaatgtttacgacgacaaccatctga

SEQ ID NO: 49917 - protein, 299 aa, Salmonella enterica
MNILLFGKTGQVGWELQRSLAPVGNLIALDVHSKEFCGDFSNPKGVAETVRKLRPDVIVNAAAHTAVDKAESEPELAQLLNATSVEAIAKAANEIGAWVVHYSTDYVFPGTGDIPWQETDATSPLNVYGKTKLAGEKALQDNCPKHLIFRTSWVYAGKGNNFAKTMLRLAKERQTLSVINDQYGAPTGAELLADCTAHAIRVALKKPEVAGLYHLVAGGTTTWHDYAALVFDEARKAGLTLALTELNAVPTSAYPTPASRPGNSRLNTEKFQSNFGLILPQWELGVKRMLTEMFTTTTI

SEQ ID NO: 49918 - DNA, 900 bp, Salmonella enterica
  CDS (1)..(900): transl_table=11
atgaatatcttactttttggtaagacagggcaagtaggctgggagttgcaacgttctctggcaccagtagggaatctgattgccctggatgtccattcaaaagagttttgcggtgattttagtaatccgaaaggcgttgccgaaaccgttcgtaagcttcgtcccgatgtgattgttaacgcagccgcacatactgcagtagataaagcagagtctgaaccagaactggcgcagttacttaacgccaccagtgtggaagccatcgctaaagcggccaacgaaactggcgcatgggtagtgcattattcaaccgactatgtatttcctggtaccggcgatatcccatggcaggaaacggacgctacgtcgccgctgaatgtctatggcaaaaccaaactggcgggagaaaaggccctgcaggataactgccctaagcaccttatcttccgcaccagttgggtttatgcaggtaagggcaataatttcgcaaagacaatgcttcgtctggcgaaagagcgtcagacactttcagtcattaacgatcagtacggtgcgccaaccggtgcggaattactggctgactgcacggcccatgcgatccgtgtggtgttaaataaaccagaagtcgcaggtctttaccatctggttgccgggggaaccacaacctggcatgactacgcggccttagtctttgacgaggcgcgcaaagcagggataacgcttgcgctgactgagcttaatgctgtgccgaccagcgcctacccgacgccggcgagcagacctggcaattcgcgtctcaatactgaaaagtttcagcgtaattttggccttattctgccgcaatgggaattaggagttaagcgcatgctgactgaaatgtttacgacgacaaccatctga

SEQ ID NO: 49919 - protein, 299 aa, Salmonella enterica
MNILLFGKTGQVGWELQRSLAPVGNLIALDVHSKEFCGDFSNPKGVAETVRKLRPDVIVNAAAHTAVDKAESEPELAQLLNATSVEAIAKAANETGAWVVHYSTDYVFPGTGDIPWQETDATSPLNVYGKTKLAGEKALQDNCPKHLIFRTSWVYAGKGNNFAKTMLRLAKERQTLSVINDQYGAPTGAELLADCTAHAIRVVLNKPEVAGLYHLVAGGTTTWHDYAALVFDEARKAGITLALTELNAVPTSAYPTPASRPGNSRLNTEKFQRNFGLILPQWELGVKRMLTEMFTTTTI

SEQ ID NO: 49920 - DNA, 867 bp, Streptomyces rishiriensis
  CDS (1)..(867): transl_table=11
atgatgaatcggtggttggttactggtgcgggaggaatgctcgggagggatttggtgcgggttttggaggcgctgaacgaaccagtgctggctgccactcggcaggatctcgacatcaccgaccgattctcggtccgagccgttgtctccaggtatcgaccgacggcgatcgtcaattgcgcagcatggacgagatttcatgaagcggagaccagtgaagcggaggcccatcttatcaatggaagaggggcaagagagctggctacgatatgcggcgatcgatcgattcggttggtccatctctccaccgattacgttttcgacggcgcgagccgccggccctatgccgaaagcgcggccaccggtccgatcaacgcctacggccggacaaagctggccggcgagcaagctgtgctcgagttgctgccggacgacgggacgatcgtgagaaccgcttggctgtacggtcgacacggcacgaacttccttcgcaagatggtccggttggagcagacgcacaagacggtggacgtggtagacgatcagtggggccagccgacgtggagcgtggatttggcacaacagatcgtggcactcgttcggcacggtgcgtccggcgtgttccacgggacaagctcaggcgagaccacgtggtacgacttcgcccggatgatcttccggttgctcggtgcggatcccggacgaatccgcccggtgcgcagcgaccagatcgccggcggcgaactgcgtccccggtacacggtgttggggcatgccgcctggcgcgaggtcgggctgacgccgattcggcactggtccgccgctctggagcggtcgtttccccttctggctgacgaggaatggtaa

SEQ ID NO: 49921 - protein, 288 aa, Streptomyces rishiriensis
MMNRWLVTGAGGMLGRDLVRVLEALNEPVLAATRQDLDITDRFSVRAVVSRYRPTAIVNCAAWTRFHEAETSEAEAHLINGRGARELATICGDRSIRLVHLSTDYVFDGASRRPYAESAATGPINAYGRTKLAGEQAVLELLPDDGTIVRTAWLYGRHGTNFLRKMVRLEQTHKTVDVVDDQWGQPTWSVDLAQQIVALVRHGASGVFHGTSSGETTWYDFARMIFRLLGADPGRIRPVRSDQIAGGELRPRYTVLGHAAWREVGLTPIRHWSAALERSFPLLADEEW

SEQ ID NO: 49922 - DNA, 879 bp, Actinobacillus actinomycetemcomitans
  CDS (1)..(879): transl_table=11
gtggcaaaatttttgattacgggggcaaacgggcaggttggctactgtttaacccaacagttacaaggcaggcacgaaattttagccgttgatcatgatgagcttgatattacaaaccaaagtgcggtgaaaaaaacggtcgaaaattttcgtcctgatgtagttatcaacgccgcagcacacactgcggtagatcgtgcggaaaccgaagttgagcgttccgaggccattaatgtaaaaggtccgcaatacttggcggaaaccgcgaaaagtgttgatgcggcaattttacatatttcaacagactatgtttttgacgggcggagtgcaggtaaatacaaagaaactgatgcagccgatccgcaaggcatttatggcaaaaccaaactagcaggcgaacaagccgttgtagaagcgaacgataaatttattgtcttgcgtaccgcttgggtattctgcgagcatggcaacaatttcgttaaaacaatgctgcgtttagccaaaactcgtgacactttaggcgtagttgccgatcagatcggtggacctacctatgcaggcgatattgccgctgcgttaattcaaatcgcagaaaaaatcattgcaggcgaatctgttgaatatggcatttatcactttacaggggagccttatgtcagctggtgtgattttgccagagcaatttttgatgaagccgtttcgcaaaatatgttagaaaaagcaccgcttgtcaacgcaatcaccacggcagattacccaacaccagccaaacgccctgcgaattcttgtttagatttaactaaaattcaacaagcattcggtatccaaccaagtgattggcaaagggctttgaagaatattagagcgtatgcggagtaa

SEQ ID NO: 49923 - protein, 292 aa, Actinobacillus actinomycetemcomitans
MAKFLITGANGQVGYCLTQQLQGRHEILAVDHDELDITNQSAVKKTVENFRPDVVINAAAHTAVDRAETEVERSEAINVKGPQYLAETAKSVDAAILHISTDYVFDGRSAGKYKETDAADPQGIYGKTKLAGEQAVVEANDKFIVLRTAWVFCEHGNNFVKTMLRLAKTRDTLGVVADQIGGPTYAGDIAAALIQIAEKIIAGESVEYGIYHFTGEPYVSWCDFARAIFDEAVSQNMLEKAPLVNAITTADYPTPAKRPANSCLDLTKIQQAFGIQPSDWQRALKNIRAYAE

SEQ ID NO: 49924 - DNA, 885 bp, Streptomyces antibioticus
  CDS (1)..(885): transl_table=11
atgagatggctgatcaccggcgccgccggaatgctgggccgggaactcgtccggcgcctcgccgagaacgaggaggacgtcgcggccctcggccacgaccacctcgacgtcacccgccccttcgccgtgcgggcggcactcgccgagcaccgtcccgggatcgtcgtcaactgcgccgcctacacggccgtcgacgacgccgagacggacgaggccgccgctgccctcctcaacgccgaggccccccggctgctggccgaggcctgcgccccccacggcgcacgcctcgtccacctgtccaccgactacgtctttcccggcgacgcccgcaccccctacgccgaggaccaccccacggctccccgcagcgcctacggacgcaccaaacgggacggcgagcaagcggtgctgacggcactgcccaccgccaccgtgctgcgcaccgcctggctgtacgggcgcaccggccgcagcttcgtccgcacgatgatcgaacgggaggcgcgcggcggagccatcgacgtcgtcgccgaccagtgcggccagcccacctggaccggcgacctcgccgaccgcatcatcgccgtcggccggcaccccggcgtccacggcatcctgcacgccaccaacgccggctccgccacctggtacgacctggcacaagaggtcttccggctcctcgacgccgaccccgggcgggtccggcccaccaccggcgccgccttccgcagacccgccccccgccccgcctacagcgtcctcggccacgaccgctggcgcgggaccggcctggcacccctgcgtgactggcgctcggccctgcgcgaggcgttccccgacatcctcgccgcggaacacccaccgacccggcgaggagcagcatga

SEQ ID NO: 49925 - protein, 294 aa, Streptomyces antibioticus
MRWLITGAAGMLGRELVRRLAENEEDVAALGHDHLDVTRPFAVRAALAEHRPGIVVNCAAYTAVDDAETDEAAAALLNAEAPRLLAEACAPHGARLVHLSTDYVFPGDARTPYAEDHPTAPRSAYGRTKRDGEQAVLTALPTATVLRTAWLYGRTGRSFVRTMIEREARGGAIDVVADQCGQPTWTGDLADRIIAVGRHPGVHGILHATNAGSATWYDLAQEVFRLLDADPGRVRPTTGAAFRRPAPRPAYSVLGHDRWRGTGLAPLRDWRSALREAFPDILAAEHPPTRRGAA

SEQ ID NO: 49926 - DNA, 876 bp, Streptomyces nogalater
  CDS (1)..(876): transl_table=11
atgctcgcccggcacctgaccgcggccctggcggagaccggcaggagccggcccgccgccgaggcggtggtactcgggcggcgcgcgctggacatcaccgacgggcgggcggtggacgccgcgttcgccgcgcaccggccgcgggtggtggtcaactgcgccgccttcacggacgtggacggcgccgagtcgcggtgggcggaggcgatgcgcgtcaacggcggcgggccccggctgctggcccgccgctgtgcgcgccacggcgtacggctgatccacgtctcgaccgactacgtcttcccgggcgacacccgcagcccttacggcgagtcggacgctccgggcccgcgcacggtgtacggccgcagcaaactggccggggaacgggccgtgctgtcgctgctgccggatacgggcaccgtggtgcgcacggcgtggctctacggcgggcagggccgcagcttcgtgcgcacgatgctggagcgtgccccggacgacggccatgtcgacgtcgtcaacgaccagtgggggcagccgacgtgggccggtgacgtggcccggctgctggtgacgctggcccgcacgccgccagaccgggcgcgcgggatcttccacgccaccaacgccggggcggccacctggtacgagctggcccgggaggtgttccggctggcgggcgcggacccggaacgggtgcgcccggtggcgacggccgaccggccgggcccggcgccccggccggcgtgcacggtgctcgggcacgaccgctggcggctggtcggcgtcgcaccgccccgcgactggcgtgcagccctgcgcgaggcgatgcgtcagctgctgcccggcgggcgcctcaggaacctgacggggacgtga

SEQ ID NO: 49927 - protein, 291 aa, Streptomyces nogalater
MLARHLTAALAETGRSRPAAEAVVLGRRALDITDGRAVDAAFAAHRPRVVVNCAAFTDVDGAESRWAEAMRVNGGGPRLLARRCARHGVRLIHVSTDYVFPGDTRSPYGESDAPGPRTVYGRSKLAGERAVLSLLPDTGTVVRTAWLYGGQGRSFVRTMLERAPDDGHVDVVNDQWGQPTWAGDVARLLVTLARTPPDRARGIFHATNAGAATWYELAREVFRLAGADPERVRPVATADRPGPAPRPACTVLGHDRWRLVGVAPPRDWRAALREAMRQLLPGGRLRNLTGT

SEQ ID NO: 49928 - DNA, 921 bp, Leptospira interrogans
  CDS (1)..(921): transl_table=11
atgatttattatactggaaaaaacggtcagttaggttgggaattggccgaaagatttaaatctaatggattggaagcagtaggatttggtagggaagaatgggatcttgcagatcttgattctgccgcacgaattttgaaggattctcctcggattttagttcattgtggggcttatactgcggtagataaggcagagtccgactcagagaacgcttacaaaatcaattcgttatctgtaaaaaaaatttcggaagaatgtctaaaaagaaaaatccatttaatttatatatccactgattttgtgtttgatgcaaattcggaaacgatcggtgatacgattcgtttttggaaaccggattctacactttctccaaaaggaatctacggattgtcaaaggcggaaggggaaaagtggattcgaaatacgtttgcgaattctaaacaagcaaatatcatccgtaccagttgggtatattcctctcatggaaataattttccaaaaacaattgtgaaacttttacaagattccaatcgtcatgaattaagagtgatcgaagatcaattgggaagacctacttgggctggtaggcttgcggattttataatattcttaatttatggaattctaaaaggagaatcttatcctgagattctacatttttctaactcaggagttgcgagctggtacgattttgcacttgcggttcgggatttttcacattctttttcattgatagaaaatttgaagccgatttatccaattcctacggaaggttatccaacacctgcacctaggcctagatattcaattttagatttagacgaaactcgaaaaatttttggcgttgttccgcattggagagaggatttaaccctttgtctgaaagaacttgccgaagtttccggaaaaaaagtatga

SEQ ID NO: 49929 - protein, 306 aa, Leptospira interrogans
MIYYTGKNGQLGWELAERFKSNGLEAVGFGREEWDLADLDSAARILKDSPRILVHCGAYTAVDKAESDSENAYKINSLSVKKISEECLKRKIHLIYISTDFVFDANSETIGDTIRFWKPDSTLSPKGIYGLSKAEGEKWIRNTFANSKQANIIRTSWVYSSHGNNFPKTIVKLLQDSNRHELRVIEDQLGRPTWAGRLADFIIFLIYGILKGESYPEILHFSNSGVASWYDFALAVRDFSHSFSLIENLKPIYPIPTEGYPTPAPRPRYSILDLDETRKIFGVVPHWREDLTLCLKELAEVSGKKV

SEQ ID NO: 49930 - DNA, 879 bp, Actinobacillus actinomycetemcomitans
  CDS (1)..(879): transl_table=11
atggcaaaatttttgattacgggtgcaaacgggcaagttggccactgtttaactcaacaattacaaggcaagcacgaaattttagccgttgatcatgatgagcttgatattaccaaccaaagtgcggtgaaaaaaacggtcaaaaattttcgtcctgatgtagttattaacgccgcagcacacactgcggtagatcgtgcagaaactgaaattgagctttccgaagccattaatgtaaaaggtcctcaatacttggcagaagccgcgaaaagtgttggtgctgcaattttacatatttcaacagactatgtttttgacggccggcgtgcaggtaaatacaaagaaactgatgcaaccgatccgcaaagtatttacggcaaaaccaaactagcgggcgaacaagccgttgtagaagcaaacgataaatttatcgtattgcgtaccgcttgggtattctgcgagcacggcagcaattttgttaaaacaatgctgcgattagccaaaactcgtgacactttaggtgtagttgccgatcagatcggcggacctacctatgcaggagatattgccgctgcgttaattcaaatcgcagaaaaaattattgcaggcaaatctgttgaatatggtatttatcactttacgggagagccttatgtcagctggtgtgattttgccagagcaatttttgatgaagccgtttcgcaaaatatgttagaaaaagtaccgcttgtcaatgcaatcaccacggcagattacccaacaccagccaaacgccctgcgaattcttgtttagatttaaccaaaattcaacaagtattcggtatccaaccaagtgattggcaaagagctttgaaaaatattaaagcgtatgcggagtaa

SEQ ID NO: 49931 - protein, 292 aa, Actinobacillus actinomycetemcomitans
MAKFLITGANGQVGHCLTQQLQGKHEILAVDHDELDITNQSAVKKTVKNFRPDVVINAAAHTAVDRAETEIELSEAINVKGPQYLAEAAKSVGAAILHISTDYVFDGRRAGKYKETDATDPQSIYGKTKLAGEQAVVEANDKFIVLRTAWVFCEHGSNFVKTMLRLAKTRDTLGVVADQIGGPTYAGDIAAALIQIAEKIIAGKSVEYGIYHFTGEPYVSWCDFARAIFDEAVSQNMLEKVPLVNAITTADYPTPAKRPANSCLDLTKIQQVFGIQPSDWQRALKNIKAYAE

SEQ ID NO: 49932 - DNA, 855 bp, Streptococcus pneumoniae
  CDS (1)..(855): transl_table=11
atgatcttaattacaggtgcaaatggtcaacttggtaccgaactacgttatttactaaatgagcgaaatgtggactatgttgcagtggatgtgaccgaaatggatatcactaattctgaaatggttgaaaaagtctttgctgaggttaagccaactctagtctatcattgtgcagcctacactgctgttgatgcagccgaagatgaagggaaagaactggattttgccatcaacgtaactggaactgaaaatgtagccaagggctctgagaaatacggagctattctggtctatatctcaacagactacgtctttgatggaaagaaaccagtaggacaagagtgggaagtcgatgacatacctgatccgcaaacagagtacggacgtaccaagcgaatgggagaagaacttgttgagaaccttacgtcacagcattacatcattcgtactgcttgggtttttggaaattatggaaggaactttgtctttaccatgcaaagcctagccgaaacccataaaacgctcacagtggtcagcgaccaatacggtcgcccaacttggacacggaccttggccgagttcatgacctatgtgactgaaaatcaaaaagagtatggctactatcacttatcgaatgacgcagctgaggacaccacttggtatgactttgctagcgagattcttaaggagagtgatgttgaactattgccagtagactctagcaagttccccgctaaggctaaacgacctctcaactcaactatgagtttggcaaaggcaaaggcaacaggtttcgtcatcccaacctggcaagatgcccttaaagagttttataaacaagaagtaagaaaataa

SEQ ID NO: 49933 - protein, 284 aa, Streptococcus pneumoniae
MILITGANGQLGTELRYLLNERNVDYVAVDVTEMDITNSEMVEKVFAEVKPTLVYHCAAYTAVDAAEDEGKELDFAINVTGTENVAKGSEKYGAILVYISTDYVFDGKKPVGQEWEVDDIPDPQTEYGRTKRMGEELVENLTSQHYIIRTAWVFGNYGRNFVFTMQSLAETHKTLTVVSDQYGRPTWTRTLAEFMTYVTENQKEYGYYHLSNDAAEDTTWYDFASEILKESDVELLPVDSSKFPAKAKRPLNSTMSLAKAKATGFVIPTWQDALKEFYKQEVRK

SEQ ID NO: 49934 - DNA, 891 bp, Klebsiella pneumoniae
  CDS (1)..(891): transl_table=11
atgaatatttcactgatcggcaacaatggccaggtgggctgggagctgcatcgttccctgtctttcctcggcgacgtggtcgcggtggattattttgataaagagctttgcggtgacctgaccaacctggaaggcgtcgcgcataccgtgcgtcctgtccgcccggatgtggtggtgaatgccgccgcgcactcgccgtggacaaggctcaaatctatcgggagctttcccacctgcctgatacgacaaatgggtggcggtgctggcggtggagtcggcgaactcggtgccctgatggtgcactattccaccgactatgtgttcgacggcgccggcagccattatcgtcgggaagatgaagcgaccggcccgcttaacgtctacggcgaaaccaagcgtgccggtgagctggccctgcagcagggcaacccgcgtcacctgattttccgtaccagctgggtgtatgccacccgcggcgccaactttgccaaaaccatgctccgcctggcgggggagaaagagaccctcaccatcattgacgaccttctttgggcgcccaccggcgctgagctgctggcagactgcacggcgacggcaatccgtgaaacgctgcgtaatccggcgctggccggcacgtatcacctggtggccagcggcgaaacagctggtgcgactatgcccgctatgtgtttgaagtggcgagagcgcacggtgccgagcctggcggtgcaggaagtgaagggcattccgaacgacggcctatccgacgccggcgaagcgtccgctcaactcgcgcctgtcgaattaaaaatccagcaggcattcggggtgactctcccggactggcgtcagggtgtggctcgcgtggtaacagaagtcctgggcaaataa

SEQ ID NO: 49935 - protein, 296 aa, Klebsiella pneumoniae
MNISLIGNNGQVGWELHRSLSFLGDVVAVDYFDKELCGDLTNLEGVAHTVRPVRPDVVVNAAAHSPWTRLKSIGSFPTCLIRQMGGGAGGGVGELGALMVHYSTDYVFDGAGSHYRREDEATGPLNVYGETKRAGELALQQGNPRHLIFRTSWVYATRGANFAKTMLRLAGEKETLTIIDDLLWAPTGAELLADCTATAIRETLRNPALAGTYHLVASGETAGATMPAMCLKWRERTVPSLAVQEVKGIPNDGLSDAGEASAQLAPVELKIQQAFGVTLPDWRQGVARVVTEVLGK

SEQ ID NO: 49936 - DNA, 921 bp, Leptospira borgpetersenii
  CDS (1)..(921): transl_table=11
atgatttattatactggaaaaagcggtcagttaggttgggagttgaccaaaagattcaaatctttggatttggaatctataggatttagtagagaagaatgggaccttaccgatcttgattctgtagaaaaaattttaaaagattctcctaaaattttagttcattgtggagcctatactgccgtggataaagcagagtccgattcggagaacgtttacaagatcaattccttatctgtaaaaaaaatttcggaagaatgtctaaaaagaaaaatccatctgatttatatatccactgattttgtgttcgatgcaaattcggaaacgatcggggatacgattcgtttttggaaaccggattctacactttccccgaaaggaatttatggtttatcgaaagcggaaggagaaaggtggattcaaaatatatttgcggattctaaacaagcgaatatagtccgaacaagttgggtatattcctcttatggaaataattttcctaaaacaattttgaaacttttacaagatcctaagcgtaccgaattaaaagtaattgaagatcaattggggaggcctacttgggcgggtaggcttgccgactttataatattcttaatttatgaaattctaaaaaagggggggtatccggagattttgcacccttccaattccggaattgcgagttggtatgattttgcgatagcaattcgagatatctcgtattctttttcattgatagaaaatttaaaaccgatttctccgattcctacggaaagttatcctacagctgccccgagacctagatactcaattttagatttaaatgaaactcgaaaaatttttggtcccgttccgcattggaaagaagatttaactctctgtctgaaagaaatcgccgagattttcggaaaaaaagtatga

SEQ ID NO: 49937 - protein, 306 aa, Leptospira borgpetersenii
MIYYTGKSGQLGWELTKRFKSLDLESIGFSREEWDLTDLDSVEKILKDSPKILVHCGAYTAVDKAESDSENVYKINSLSVKKISEECLKRKIHLIYISTDFVFDANSETIGDTIRFWKPDSTLSPKGIYGLSKAEGERWIQNIFADSKQANIVRTSWVYSSYGNNFPKTILKLLQDPKRTELKVIEDQLGRPTWAGRLADFIIFLIYEILKKGGYPEILHPSNSGIASWYDFAIAIRDISYSFSLIENLKPISPIPTESYPTAAPRPRYSILDLNETRKIFGPVPHWKEDLTLCLKEIAEIFGKKV

SEQ ID NO: 49938 - DNA, 906 bp, Escherichia coli
  CDS (1)..(906): transl_table=11
atgaatatcctcctattcggcaaaacagggcaggtaggttgggaactgcagcgtgctctggcaccgctgggtaatctgattgctcttgatgttcactccactgattattgtggtgattttagtaatcccgaaggtgtagctgaaactgtcaaaaaaattcgccctgatgttattgttaatgcggctgctcacactgacgtagacaaagcggaatcagaaccggaatttgcacaattacttaacgcgacaagtgtcgaagcgattgcaaaagcagccaatgaagtcggtgcttgggttattcactactctactgactacgtatttccgggaaccggtgaaataccgtggcagggaggaacggatgctacagcacctttgaatgtttatggtgaaactaaacttagctccgagaaaaaagcgttacagaaacattgcggcaagcatattattttccgtaccagctgggtatatgcaggtaaaggaaataacttcgccaaaacaatgttgcgtctggcaaaagagcgcgaagaactggctgtgataaacgatcagtttggccgaccaacaggtgccgaattgctggctgattgcaccgctcatgccattcgcgtagcagtagacaaaccagaagttgctggtttgtaccatctggttgctggcggtacaacaacctggcacgattatgccgctctggtatttgaagaagcgcgcaaagcagggattaaccttgctcttaacaaacttaacgccgtgccaacaacggcctatcccacaccagcccgtcgaccccataactctcgcctcaatacagaaaagtttcagcagaactttgcgcttgtcttgcctgactggcaggtgggtgtgaaacgaatgctcaacgaattatttacgactacggcaatttaa

SEQ ID NO: 49939 - protein, 301 aa, Escherichia coli
MNILLFGKTGQVGWELQRALAPLGNLIALDVHSTDYCGDFSNPEGVAETVKKIRPDVIVNAAAHTDVDKAESEPEFAQLLNATSVEAIAKAANEVGAWVIHYSTDYVFPGTGEIPWQGGTDATAPLNVYGETKLSSEKKALQKHCGKHIIFRTSWVYAGKGNNFAKTMLRLAKEREELAVINDQFGRPTGAELLADCTAHAIRVAVDKPEVAGLYHLVAGGTTTWHDYAALVFEEARKAGINLALNKLNAVPTTAYPTPARRPHNSRLNTEKFQQNFALVLPDWQVGVKRMLNELFTTTAI

SEQ ID NO: 49940 - DNA, 891 bp, Rhizobium sp
  CDS (1)..(891): transl_table=11
atgcggctcgcggtgaccggcaaaaacggacaaatcgccctcgctttgaaggcgcaggcgcgacctgacgtcgagatacttactttggggcggccgaatttcgatctggcttgccgctcgactgtcgcaagctccatcagggatgccgcaccggacataattgtctctttggccgcctataccgccgtcgataaggccgaaagcgagccatacgaagccttcgctgtgaaccgcgatggagtgcaggcactggccgaggcagccgccgggctcggtgtcccagttattcatctttcgacagattacgtgtttgacggtgcgaagccggtgccttactgcgaggaagaccgcacaggcccgatttcagtttatggcaggtccaaacttgagggtgaatttgcggttgcctccgccaacccaaatcatacgatcctgcgcacttcatgggtctattctcgatacggccaaaacttcgtgaagaagatgctccggctcgccgatacgaatgacgaattgaatgtcgtcgccgatcagctcggctgtccgacatcggctgacgacatcagcgtcgccgtcatgacgatagccagacggatgctgtcgagctcatcggctgatttgcgcgggatattccacctgtcaggatcgggtgaggccagctgggcggccttcgcgaaatacgtcttttccgtttacgacgagataaccgggcgccaaatcaaagtccatgacatatccgctgcagaatatcccacaccggctcgccgcccagcaaattcgaggctccactgcgacaagcttgagcgaacctttggtatccgtctgccaaattgggaggagtccacgcgccggctggtttgggcgctgcttttagaagggaaagatgcgtga

SEQ ID NO: 49941 - protein, 296 aa, Rhizobium sp
MRLAVTGKNGQIALALKAQARPDVEILTLGRPNFDLACRSTVASSIRDAAPDIIVSLAAYTAVDKAESEPYEAFAVNRDGVQALAEAAAGLGVPVIHLSTDYVFDGAKPVPYCEEDRTGPISVYGRSKLEGEFAVASANPNHTILRTSWVYSRYGQNFVKKMLRLADTNDELNVVADQLGCPTSADDISVAVMTIARRMLSSSSADLRGIFHLSGSGEASWAAFAKYVFSVYDEITGRQIKVHDISAAEYPTPARRPANSRLHCDKLERTFGIRLPNWEESTRRLVWALLLEGKDA

SEQ ID NO: 49942 - DNA, 900 bp, Salmonella typhimurium
  CDS (1)..(900): transl_table=11
atgaatatcttactttttggtaagacagggcaagtaggctgggagttgcaacgttctctggcaccggtagggaatctgattgccctggatgtccattcaaaagagttttgcggtgattttagtaatccgaaaggcgttgccgaaaccgttcgtaagcttcgtcccgatgtgattgttaacgcagcagcccatactgcagtagataaagcagagtctgaaccagaactggcgcagttacttaacgccaccagtgtggaagccatcgctaaagcagccaacgaaactggcgcatgggtagtgcattattcaaccgattatgtatttcctggtaccggcgatatcccatggcaggaaacggacgctacgtcgccgctgaatgtctatggcaaaaccaaactggcgggagaaaaggccctgcaggataactgccctaaacaccttatcttccgcaccagttgggtttatgcaggtaagggcaataatttcgcaaagacaatgcttcgtctggcgaaagagcgtcagacactttcagtcattaacgatcagtacggtgcgccaaccggtgcggaattactggctgactgtacggcgcatgcgatccgtgtggcgttaaataaaccagaagtcgcaggtctttaccatctggttgccgggggaaccacaacctggcatgactacgcggccttagtctttgacgaggcgcgcaaagcagggataacgcttgcgctgactgagcttaatgctgtgccgaccagcgcctacccgacgccggcgagcagaccaggcaattcgcgtctcaatactgaaaagtttcagcgtaattttgaccttattctgcctcaatgggaattaggagttaagcgtatgctgactgaaatgtttacgacgacaaccatctaa

SEQ ID NO: 49943 - protein, 299 aa, Salmonella typhimurium
MNILLFGKTGQVGWELQRSLAPVGNLIALDVHSKEFCGDFSNPKGVAETVRKLRPDVIVNAAAHTAVDKAESEPELAQLLNATSVEAIAKAANETGAWVVHYSTDYVFPGTGDIPWQETDATSPLNVYGKTKLAGEKALQDNCPKHLIFRTSWVYAGKGNNFAKTMLRLAKERQTLSVINDQYGAPTGAELLADCTAHAIRVALNKPEVAGLYHLVAGGTTTWHDYAALVFDEARKAGITLALTELNAVPTSAYPTPASRPGNSRLNTEKFQRNFDLILPQWELGVKRMLTEMFTTTTI

SEQ ID NO: 49944 - DNA, 915 bp, Streptomyces griseus
  CDS (1)..(915): transl_table=11
atgtccccgtaccctcgcccgcgttggctcgtcaccggtgcgtccggcatgctggggcgcgagctcacccccctgctggaccgccggggtgccgccgtgaccgcgctcggtcgcggccacctggacatcacggacggcgccgccgtgcgttccgccgtggcggagcaccggccggcggtggtggtcaactgcgcggcgtggaccgcggtcgacgaggccgagtcggagccggccctggccatggcggtgaacggggagggcccgcgccatctcgcgcaggcgtgccgcgccgtgggggccgtgctgctccagctgtccaccgactacgtgttccccggctcgggcggacggccctaccgggaggaccacccgaccggtccgcgcacggtgtacggctgcaccaagcgggccggggagcgcgcggtgctggaggtcctcccggacaccggctacatcgtccgtacggcttggctgtacggagcgggcggccccaacttcgtggcgaagatgatccggctggaggcggacgaggacaccgtgctggtcgtggacgaccagcacggccagccgacctggaccgccgacctcgcggaccggctggcggccctgggggcggcggcgctggcgggaacggccccggccgggatctaccacgcgaccaacacgggcgggaccacctggaacgcgctggcgccggagaccttccgcctgctcggcgccgacccggcacgggtccggcccaccaccagtctggcgctggcccggcctgccgtacggccccggtacagcgtgctggaccagtcccgctggaaggcggccggactcgaaccgctgcggcactggcgggccgcgctgacggagtcgttccccgcactctgcggacgggccggccggccggtgcccgggccgcgctga

SEQ ID NO: 49945 - protein, 304 aa, Streptomyces griseus
MSPYPRPRWLVTGASGMLGRELTPLLDRRGAAVTALGRGHLDITDGAAVRSAVAEHRPAVVVNCAAWTAVDEAESEPALAMAVNGEGPRHLAQACRAVGAVLLQLSTDYVFPGSGGRPYREDHPTGPRTVYGCTKRAGERAVLEVLPDTGYIVRTAWLYGAGGPNFVAKMIRLEADEDTVLVVDDQHGQPTWTADLADRLAALGAAALAGTAPAGIYHATNTGGTTWNALAPETFRLLGADPARVRPTTSLALARPAVRPRYSVLDQSRWKAAGLEPLRHWRAALTESFPALCGRAGRPVPGPR

SEQ ID NO: 49946 - DNA, 26 bp, Artificial sequence
  Primer sequence
atgaatatcctcctttttggcaaaac

SEQ ID NO: 49947 - DNA, 27 bp, Artificial sequence
  Primer sequence
ttaaattgctgtagtcgtaaataattc

SEQ ID NO: 49948 - protein, 351 aa, Artificial sequence
  Consensus
  Variant (2)..(3): Xaa in position 2 to 3 is any amino acid
  Variant (6)..(6): Xaa in position 6 is any amino acid
  Variant (8)..(9): Xaa in position 8 to 9 is any amino acid
  Variant (11)..(19): Xaa in position 11 to 19 is any amino acid
  Variant (20)..(63): Xaa in position 20 to 63 is any or no amino acid
  Variant (65)..(69): Xaa in position 65 to 69 is any amino acid
  Variant (70)..(70): Xaa in position 70 is any or no amino acid
  Variant (73)..(73): Xaa in position 73 is any amino acid
  Variant (75)..(75): Xaa in position 75 is any amino acid
  Variant (78)..(78): Xaa in position 78 is any amino acid
  Variant (81)..(89): Xaa in position 81 to 89 is any amino acid
  Variant (90)..(91): Xaa in position 90 to 91 is any or no amino acid
  Variant (93)..(99): Xaa in position 93 to 99 is any amino acid
  Variant (101)..(113): Xaa in position 101 to 113 is any amino acid
  Variant (120)..(120): Xaa in position 120 is any amino acid
  Variant (122)..(133): Xaa in position 122 to 133 is any amino acid
  Variant (134)..(141): Xaa in position 134 to 141 is any or no amino acid
  Variant (143)..(145): Xaa in position 143 to 145 is any amino acid
  Variant (148)..(149): Xaa in position 148 to 149 is any amino acid
  Variant (151)..(152): Xaa in position 151 to 152 is any amino acid
  Variant (155)..(165): Xaa in position 155 to 165 is any amino acid
  Variant (166)..(173): Xaa in position 166 to 173 is any or no amino acid
  Variant (176)..(176): Xaa in position 176 is any amino acid
  Variant (178)..(182): Xaa in position 178 to 182 is any amino acid
  Variant (184)..(184): Xaa in position 184 is any amino acid
  Variant (185)..(189): Xaa in position 185 to 189 is any or no amino acid
  Variant (192)..(193): Xaa in position 192 to 193 is any amino acid
  Variant (195)..(205): Xaa in position 195 to 205 is any amino acid
  Variant (206)..(213): Xaa in position 206 to 213 is any or no amino acid
  Variant (215)..(216): Xaa in position 215 to 216 is any amino acid
  Variant (219)..(219): Xaa in position 219 is any amino acid
  Variant (221)..(221): Xaa in position 221 is any amino acid
  Variant (224)..(228): Xaa in position 224 to 228 is any amino acid
  Variant (230)..(239): Xaa in position 230 to 239 is any amino acid
  Variant (240)..(257): Xaa in position 240 to 257 is any or no amino acid
  Variant (259)..(260): Xaa in position 259 to 260 is any amino acid
  Variant (262)..(268): Xaa in position 262 to 268 is any amino acid
  Variant (269)..(273): Xaa in position 269 to 273 is any or no amino acid
  Variant (275)..(277): Xaa in position 275 to 277 is any amino acid
  Variant (279)..(296): Xaa in position 279 to 296 is any amino acid
  Variant (297)..(316): Xaa in position 297 to 316 is any or no amino acid
  Variant (318)..(318): Xaa in position 318 is any amino acid
  Variant (321)..(322): Xaa in position 321 to 322 is any amino acid
  Variant (324)..(324): Xaa in position 324 is any amino acid
  Variant (326)..(335): Xaa in position 326 to 335 is any amino acid
  Variant (336)..(350): Xaa in position 336 to 350 is any or no amino acid
GXXGQXGXXLXXXXXXXXXXXXXXXXXXXXXXXXXXXXXXXXXXXXXXXXXXXXXXXXXXXXXPXXXXXXAAXTXVDXAEXXXXXXXXXXXNXXXXXXXAXXXXXXXXXXXXXSTDYVFXGXXXXXXXXXXXXXXXXXXXXPXXXYGXXKXXGEXXXXXXXXXXXXXXXXXXXRTXWXXXXXGXXXXXXNFXXTXXXXXXXXXXXXXXXXXXXVXXDQXGXPTXXXXXAXXXXXXXXXXXXXXXXXXXXXXXXXXXXGXXHXXXXXXXXXXXXWXXXAXXXXXXXXXXXXXXXXXXXXXXXXXXXXXXXXXXXXXXAXRPXXSXLXXXXXXXXXXXXXXXXXXXXXXXXXW

SEQ ID NO: 49949 - protein, 10 aa, Artificial sequence
  Consensus
  Variant (2)..(3): Xaa in position 2 to 3 is any or no amino acid
  Variant (6)..(6): Xaa in position 6 is Leu or Val
  Variant (7)..(7): Xaa in position 7 is Ala, Gly, Ser or Val
  Variant (8)..(9): Xaa in position 8 to 9 is any amino acid
  Variant (10)..(10): Xaa in position 10 is Phe, Ile, Leu, Met or Val
GXXGQXXXXX

SEQ ID NO: 49950 - protein, 11 aa, Artificial sequence
  Consensus
  Variant (2)..(2): Xaa in position 2 is any or no amino acid
  Variant (4)..(4): Xaa in position 4 is His, Trp or Tyr
  Variant (6)..(6): Xaa in position 6 is any amino acid
  Variant (9)..(9): Xaa in position 9 is any amino acid
  Variant (10)..(10): Xaa in position 10 is Ala, Cys or Ser
AXAXTXVDXXE

SEQ ID NO: 49951 - protein, 8 aa, Artificial sequence
  Consensus
  Variant (7)..(7): Xaa in position 7 is any amino acid
STDYVFXG

SEQ ID NO: 49952 - protein, 13 aa, Artificial sequence
  Consensus
  Variant (2)..(2): Xaa in position 2 is any amino acid
  Variant (3)..(3): Xaa in position 3 is Gly, Asn, Ser or Thr
  Variant (4)..(4): Xaa in position 4 is any amino acid
  Variant (7)..(7): Xaa in position 7 is any amino acid
  Variant (8)..(8): Xaa in position 8 is Ser or Thr
  Variant (10)..(11): Xaa in position 10 to 11 is any amino acid
PXXXYGXXKXXGE

SEQ ID NO: 49953 - protein, 10 aa, Artificial sequence
  Consensus
  Variant (2)..(2): Xaa in position 2 is any amino acid
  Variant (3)..(3): Xaa in position 3 is Ala, Cys, Gly or Ser
  Variant (5)..(5): Xaa in position 5 is Leu or Val
  Variant (6)..(6): Xaa in position 6 is any amino acid
  Variant (7)..(7): Xaa in position 7 is Ala, Cys, Gly or Ser
  Variant (8)..(9): Xaa in position 8 to 9 is any amino acid
RXXWXXXXXG

SEQ ID NO: 49954 - protein, 17 aa, Artificial sequence
  Consensus
  Variant (2)..(2): Xaa in position 2 is any amino acid
  Variant (3)..(3): Xaa in position 3 is any or no amino acid
  Variant (5)..(5): Xaa in position 5 is any or no amino acid
  Variant (7)..(7): Xaa in position 7 is any amino acid
  Variant (9)..(9): Xaa in position 9 is any amino acid
  Variant (11)..(11): Xaa in position 11 is Ser or Thr
  Variant (12)..(12): Xaa in position 12 is any amino acid
  Variant (13)..(13): Xaa in position 13 is Ala, Ser, Thr or Val
  Variant (14)..(15): Xaa in position 14 to 15 is any amino acid
  Variant (16)..(16): Xaa in position 16 is Ile or Leu
  Variant (17)..(17): Xaa in position 17 is Ala, Asn or Val
VXXDXQXGXPXXXXXXX

SEQ ID NO: 49955 - protein, 9 aa, Artificial sequence
  Consensus
  Variant (2)..(2): Xaa in position 2 is any amino acid
  Variant (5)..(6): Xaa in position 5 to 6 is any amino acid
  Variant (8)..(8): Xaa in position 8 is any amino acid
  Variant (9)..(9): Xaa in position 9 is Leu or Met
AXRPXXSXX

SEQ ID NO: 49956 - DNA, 966 bp, Escherichia coli
  CDS (1)..(966)
atgacaaagtatgcattagtcggtgatgtgggcggcaccaacgcacgtcttgctctgtgtgatattgccagtggtgaaatctcgcaggctaagacctattcagggcttgattaccccagcctcgaagcggtcattcgcgtttatcttgaagaacataaggtcgaggtgaaagacggctgtattgccatcgcttgcccgattaccggagactgggtggcaatgaccaaccatacctgggcgttctcaattgccgaaatgaaaaagaatctcggttttagccatctggaaattattaacgattttaccgctgtatcgatggcgatcccgatgctgaaaaaagagcatctgattcagtttggtggcgcagaaccggtagaaggtaagcctattgcggtttacggtgccggaacggggcttggggttgcgcatctggtccatgtcgataagcgttgggtaagcttgccgggcgaaggcggtcacgttgattttgcgccgaatagtgaagaagaggccattatcctcgaaatattgcgtgcggaaattggtcatgtttcggcggaacgcgtgctttctggcccaggactggtgaatttgtatcgcgcaattgttaaagccgacaaccgcctgccagaaaatctcaagccaaaagatattaccgaacgcgcgctggctgacagctgcaccgattgccgccgtgcgttgtcgctgttttgcgtcattatgggccgttttggcggcaatctggcgctcaatctcgggacatttggcggcgtgtttattgcgggcggtatcgtgccgcgcttccttgagttcttcaaagcctctggtttccgtgccgcatttgaagataaagggcgctttaaagaatatgtccatgatattccggtgtatctcatcgtccatgacaatccgggtcttctcggttccggtgcacatttacgccagaccttaggtcacattctgtaa

SEQ ID NO: 49957 - protein, 321 aa, Escherichia coli
MTKYALVGDVGGTNARLALCDIASGEISQAKTYSGLDYPSLEAVIRVYLEEHKVEVKDGCIAIACPITGDWVAMTNHTWAFSIAEMKKNLGFSHLEIINDFTAVSMAIPMLKKEHLIQFGGAEPVEGKPIAVYGAGTGLGVAHLVHVDKRWVSLPGEGGHVDFAPNSEEEAIILEILRAEIGHVSAERVLSGPGLVNLYRAIVKADNRLPENLKPKDITERALADSCTDCRRALSLFCVIMGRFGGNLALNLGTFGGVFIAGGIVPRFLEFFKASGFRAAFEDKGRFKEYVHDIPVYLIVHDNPGLLGSGAHLRQTLGHIL

SEQ ID NO: 49958 - DNA, 1020 bp, Xylella fastidiosa 9a5c
  CDS (1)..(1020): transl_table=11
ttgctagtgacctcaatgattccgaaccctacccgagatgcacccaatatcccgtcctttgttgccgccgatgtcggcggcactcacgtgcgcgtcagcgtggttgcagccgcgcccacgtgtgccagtccaccgcaactgttggatgtgcgcacttaccgctgcgctgactatcccagcctcagcacaattctgaacgacttcctcggtacaagatcagcagtacgtgattgcgtcatcgccagtgccggttttcagcgcagcgatggtactgttatcactaccaacctaccgtggccgctatcaccacaccggctacgcgcagatctcgatctggcagaggtctctctggtcaacgactttgaggcgctggcctacgccacagaggatatggaggctgcgcaattgctgcacctcactggtccagccaaagcgcaggatgggccacgcctgttgcttggtccgggaaccggcctgggtgcagcactctggattcccaataacggacgccccattgtcctccctacggaagccggtcaagcagcattgccgagtacaactgaacttgaaatgcaactggtacgacacatgctgaacaaccgcacacatgtgccgattgagcatgctttatctgggccaggaatactcaatgtgtaccgcgccttgtgtgcgctacagtccgtcctcccccagcacgcaagcccagatgcgatcagtcacgctgcggcagcaggaacagacatgctgtcatcacagactctagaggtattctgcgacttcctcggcagcatcgttggtgatttggtcatgatgtacggtgcacaggggggtgtctatctggccggaggaatcctgccacagctgcgtgagccgctgctacgcagtcactttgtcgaacgcttcctcaataaaggccccatgggcgaggcattacagcacgtcccggtgcggctgatcgaacatgggcaactcggcatcgtaggtgcggcacgctggtacttaaataaaaaagcaacttaa

SEQ ID NO: 49959 - protein, 339 aa, Xylella fastidiosa 9a5c
MLVTSMIPNPTRDAPNIPSFVAADVGGTHVRVSVVAAAPTCASPPQLLDVRTYRCADYPSLSTILNDFLGTRSAVRDCVIASAGFQRSDGTVITTNLPWPLSPHRLRADLDLAEVSLVNDFEALAYATEDMEAAQLLHLTGPAKAQDGPRLLLGPGTGLGAALWIPNNGRPIVLPTEAGQAALPSTTELEMQLVRHMLNNRTHVPIEHALSGPGILNVYRALCALQSVLPQHASPDAISHAAAAGTDMLSSQTLEVFCDFLGSIVGDLVMMYGAQGGVYLAGGILPQLREPLLRSHFVERFLNKGPMGEALQHVPVRLIEHGQLGIVGAARWYLNKKAT

SEQ ID NO: 49960 - DNA, 1056 bp, Ralstonia solanacearum GMI1000
  CDS (1)..(1056): transl_table=11
atgtctattggtctgcatgaagtcggcgtgggcagcatggacgatgtgacggcctacccgcgcctggtcggggatgtcggcgggaccaacgcgcgcttcgcgctggagatggcgccgatgcggctggcccatatcggcgtgctggccggcgacgactacccgtcgctggaagcggccatgcgcgcctatctcgccgcgctgccgccggagatcgccgcggcgggcgtgcggcatgcggccatcggcatcgccaatccggtgctgggcgaccagatccgcatgaccaaccgcgactgggcgttttccaccgaggcgatgcgccagtcgctgggcttcgataccttcgtcgtgctcaacgatttcgccgcgctggcgcacgcgctgccctacctgggcgccgacgagctggaacaggtgggcggcagcacctgcgtggccgacgcgccgcgcgcgctgctggggccgggcacgggcctgggcgtggcgtcgctgctgccgacgcaggcagggcgcttcatcgccgtcgcgggcgaggggggccacgtcgcgtttgcgccgatgaacgacgaggaagtcgtcatctggcgcttcgcgcgcgagcgcttcggccatgtctcggccgagcggctgatctcgggcatggggctggagctgatctacgaggcgctcggcgcgtgcttcgacctgtggcagcagggccccgccgtgcgccgcgccgccgacatcaccgccatcgccctgggcgaaatggaagacaccgccggcgatcacgcccgctgccgctacgccgtcgatacgttctgcgccatgctcggcaccgtggcggccaacctggcggtcacgctgggcgcgcggggcggggtctatatcggcggcggcatcgtgccgcggctgggcgccgccttcgccaattcaccgttccggcggcggttcgaagacaagggccgcttctccggctatgtggcggcgatgccggtgtacgtcatccatgcgccgtacccggggctgatcggcctgtgcgcggcgatggatcacgccgtggccagcggccactga

SEQ ID NO: 49961 - protein, 351 aa, Ralstonia solanacearum GMI1000
MSIGLHEVGVGSMDDVTAYPRLVGDVGGTNARFALEMAPMRLAHIGVLAGDDYPSLEAAMRAYLAALPPEIAAAGVRHAAIGIANPVLGDQIRMTNRDWAFSTEAMRQSLGFDTFVVLNDFAALAHALPYLGADELEQVGGSTCVADAPRALLGPGTGLGVASLLPTQAGRFIAVAGEGGHVAFAPMNDEEVVIWRFARERFGHVSAERLISGMGLELIYEALGACFDLWQQGPAVRRAADITAIALGEMEDTAGDHARCRYAVDTFCAMLGTVAANLAVTLGARGGVYIGGGIVPRLGAAFANSPFRRRFEDKGRFSGYVAAMPVYVIHAPYPGLIGLCAAMDHAVASGH

SEQ ID NO: 49962 - DNA, 1035 bp, Xanthomonas campestris pv. campestris str. ATCC 33913
  CDS (1)..(1035): transl_table=11
gtggctgcaacctcgcactctgcttgcgcttctgctctgcccgttgtccccgctcccaccacgtttctggctgccgatgtcggcggcacgcatgtgcgtgtcggccgggtctcgcatggcgcggatgcgccgatcgagctctcgcagtaccgcacctaccgctgcgccgaccatgccagcctggacgcgatcctggctgatttcctgcgcgatagccgcgccgtcgatgcagtggtgatcgccagcgcaggtgtcgcgctggacgacggccgcttcatcagcaacaacctgccctggaccatcgcgccgcgtcagttgcgcgacacgcttggcgtgcgtgcggtgcatctggtcaacgacttcgaagcggtggcgtatgccgcgccgcagatggaacagcgtgcggtggtgcaactaagcggccccacgccgcggcatgcgcagcccggtggcccgatcctggtggtcggcccgggcaccgggctaggcgctgcggtgtggatcaacggcccgcgccagccgaccgtgctcgccaccgaagccggccaggtcgcactggcaagcaatgaccccgacaccgcgcaggtgctgcgcatcctggcgcgcgacgcatcgtatctgccgatcgagcatgtgctctccggccccgggttgcgcaacctgtatctggcgctgtgcgaactgcacgcggccacgcccatccacccgttgcccgccgacatcacccacgccgcgctccacagcgacgatgcactggcgcggcggtgcctgcagctgttctgcgcgctgctcggcagcgcggtcggcgacatggcgctggcgtacggcgcctccggcggcgtgtatctggccggcggcatcctgccgagcatcggccagtttctggctgcgagtgatttccgcgaacgcttcctcgccaagggccgcatgcgcccggtgctggagcgcattccggtcaagttggtcgaacacgggcaactcggcgtgctcggcgcggccagctggtatctgcaacaccacaccgaggtgtcgtaa

SEQ ID NO: 49963 - protein, 344 aa, Xanthomonas campestris pv. campestris str. ATCC 33913
MAATSHSACASALPVVPAPTTFLAADVGGTHVRVGRVSHGADAPIELSQYRTYRCADHASLDAILADFLRDSRAVDAVVIASAGVALDDGRFISNNLPWTIAPRQLRDTLGVRAVHLVNDFEAVAYAAPQMEQRAVVQLSGPTPRHAQPGGPILVVGPGTGLGAAVWINGPRQPTVLATEAGQVALASNDPDTAQVLRILARDASYLPIEHVLSGPGLRNLYLALCELHAATPIHPLPADITHAALHSDDALARRCLQLFCALLGSAVGDMALAYGASGGVYLAGGILPSIGQFLAASDFRERFLAKGRMRPVLERIPVKLVEHGQLGVLGAASWYLQHHTEVS

SEQ ID NO: 49964 - DNA, 1017 bp, Xanthomonas axonopodis pv. citri str. 306
  CDS (1)..(1017): transl_table=11
gtgagcgcaagcagtccaatggaagcggtggcctttccgcgccccgaaaccttcgttgccgccgatgtgggcggcacgcacgtgcgcctggcgctggtatgcgagagcaatgacgcgggcaagccgatcacggtgctggactatcgcaagtaccgctgcgccgactatccgggccttgccgacatcatggccgcgttcttcgcggaactgggttgtgcaccagtacgccggggcgtgatcgccagcgccggctacgcgctggaagacggtagcgtgatcaccaccaatctgccctgggtactggcgccggagcagattcgccgccagctcggcatgcaggccctgcatctggtcaacgatttcgaagcggtcgcctatgcggccaattacatgagcggcaaccaggtcatgcagttgtctggcccggtgcagggtgccgcaggcccggcgttggtgcttggtccgggcacgggcctgggcgcggcgctgtggatccccaacgatggtcatccggtggtgctgcccaccgaagccggccacgcggcactggcgccggccagcgatctggaaatggcgttgctgcaggaactgcggcgcacgcgcacccacgtggggaccgaaacgctgttgtccggcccgggcctgttgaatctgtacaccgcgctggcggccttgcgtggggacaccgtggtgcacgccagcccggccgatatcaccgcggccgcaatggccggcaacgatggattggcgcacgacgccttgcaggcgttttgcggatttatgggcagcgtggtcggcgacctgatgctgctgtatggcgtgcgcagtggcgtttatctggctggcggtttcctgccgcaaatcgccacctttatcgccgatggcgacttcgtcgcgcgcctgctcgacaagggcgccttgcgtcccgcgctggagcaggtgccggtgagcatcgtcgagcacggccagcttggcgtcatcggtgctgccagctggttcctgcagcgcggccgctga

SEQ ID NO: 49965 - protein, 338 aa, Xanthomonas axonopodis pv. citri str. 306
MSASSPMEAVAFPRPETFVAADVGGTHVRLALVCESNDAGKPITVLDYRKYRCADYPGLADIMAAFFAELGCAPVRRGVIASAGYALEDGSVITTNLPWVLAPEQIRRQLGMQALHLVNDFEAVAYAANYMSGNQVMQLSGPVQGAAGPALVLGPGTGLGAALWIPNDGHPVVLPTEAGHAALAPASDLEMALLQELRRTRTHVGTETLLSGPGLLNLYTALAALRGDTVVHASPADITAAAMAGNDGLAHDALQAFCGFMGSVVGDLMLLYGVRSGVYLAGGFLPQIATFIADGDFVARLLDKGALRPALEQVPVSIVEHGQLGVIGAASWFLQRGR

SEQ ID NO: 49966 - DNA, 1035 bp, Xanthomonas axonopodis pv. citri str. 306
  CDS (1)..(1035): transl_table=11
gtggctgcgacttcgcgttccgcttacgcctctgcctcgcccgatgtccccgttgccatcagcttcatcgctgccgatgtcggcggcacgcatgtgcgtgtcgggcacatgctgcaggcgcgcgatgcagccatcgagctttcgcattaccgcacctatcgctgcgccgagtacgccagtctccaggccatcctcgaggatttcctgcaacagcggcgcggcgtcgatgcggtggtcatcgccagtgccggcgtggcgctggacgatggcagcttcatcagcaacaacctgccatggacgatttcacccagccgcatcggtgctgcactggcagtgcgcaacgtgcacctggtcaacgatttcgaggcggtggcctacgcagcgccgcagatggaacaacgcgccgtgctgcagctgagcgggccgacaccgcgccatgcgcgtgccaacgggccgattctggtggtcggccccgggaccggtctgggtgcagcactatggatcgatgccaagccacgcgcgatcgtgctggccaccgaagccggccaggtcgcgctggccagcacccatccgcgcgagtacgccgtgctgcaatgcctgttacgtgaccggcactatttgccgctcgagcacgtgctctccggcccgggattacggcatctctacgatgcggtgtgcgagctgcatggcgcaacgccgcgtcatcgtctgcccgccgccgtgacgcacgcagcgctgcacgaagacgatgcgcttgcgcgcgagtgcctggagattttttgcggcctgctggggagcgcggtcggcgacatggcgctggcctacggcgctgccgggggcatctatctggccgggggcttcctgccgacgatcggccagttcctggctggcagcgcctttgccgagcgcttcctggacaagggaaacatgcgcgctgtgctcgaacgcattccggtcaaattggtcgagcacgggcaactgggcgtgctcggcgcggccaactggtatctgcagcaccacaccgacctgtcgtaa

SEQ ID NO: 49967 - protein, 344 aa, Xanthomonas axonopodis pv. citri str. 306
MAATSRSAYASASPDVPVAISFIAADVGGTHVRVGHMLQARDAAIELSHYRTYRCAEYASLQAILEDFLQQRRGVDAVVIASAGVALDDGSFISNNLPWTISPSRIGAALAVRNVHLVNDFEAVAYAAPQMEQRAVLQLSGPTPRHARANGPILVVGPGTGLGAALWIDAKPRAIVLATEAGQVALASTHPREYAVLQCLLRDRHYLPLEHVLSGPGLRHLYDAVCELHGATPRHRLPAAVTHAALHEDDALARECLEIFCGLLGSAVGDMALAYGAAGGIYLAGGFLPTIGQFLAGSAFAERFLDKGNMRAVLERIPVKLVEHGQLGVLGAANWYLQHHTDLS

SEQ ID NO: 49968 - DNA, 975 bp, Yersinia pestis KIM
  CDS (1)..(975): transl_table=11
ttgatgacgacttatgccctggtgggtgacgttggcggtacgaatgcccggttggcgctttgcgctgttgcaacgggcgagatattgcaagcaaagacatattcagggttggaatatgaaagtttagaggatgtaatcaaacaatatctatcagagcatcaagccaaggtcaccgatgcttgtatcgcgattgcctgcccgattaccggggattgggtcgcaatgaccaatcatacttgggcattttctattgccgccatgcaacagaatctgggtctggaccatttggaagtgatcaatgacttcaccgcagtctccatggctatccccgtgttacctgcccaagatgttctgcaatttggtggcacacagccacagcctggcaaaccggtggcagtgtatggcgcaggtactgggctgggggtagcacatttagtgaatgttgatcgccgttggattagtttagcgggagagggcgggcatgttgatttcgcgcctaatagtgaagaagaagaccagattctggccgtattgcgccaggagttggggcatgtttccgctgagcgggtgctatctgggccgggcttagtcaatttatatcgggcaattgtgatttctgatgcgcgcctaccagagaaactggcaccgaaagatattaccgcacgggcgctggcggatagctgtaccgattgtcgccgggcattatcactattttgcgtaattatgggccgctttgggggcaatttagcccttaacctcagtacgtttggtggcgtttatattgcggggggcatcgtgccgcgctttatggagttctttaaagcctctggttttcgcgctgcgtttgaagataaaggccgttttaaagatttcttacaagatattccggtgtatatgattactcatccacaacccggtttactgggggctggtgcctatttacgccaaaaattggggtatgagttgtcaagctaa

SEQ ID NO: 49969 - protein, 324 aa, Yersinia pestis KIM
MMTTYALVGDVGGTNARLALCAVATGEILQAKTYSGLEYESLEDVIKQYLSEHQAKVTDACIAIACPITGDWVAMTNHTWAFSIAAMQQNLGLDHLEVINDFTAVSMAIPVLPAQDVLQFGGTQPQPGKPVAVYGAGTGLGVAHLVNVDRRWISLAGEGGHVDFAPNSEEEDQILAVLRQELGHVSAERVLSGPGLVNLYRAIVISDARLPEKLAPKDITARALADSCTDCRRALSLFCVIMGRFGGNLALNLSTFGGVYIAGGIVPRFMEFFKASGFRAAFEDKGRFKDFLQDIPVYMITHPQPGLLGAGAYLRQKLGYELSS

SEQ ID NO: 49970 - DNA, 990 bp, Thermosynechococcus elongatus BP-1
  CDS (1)..(990): transl_table=11
gtggcaatgacggttgtccttggcgccgatgtcggcggcacaaaaacccttgtggagttgtgggaggtggggggtcgtgattggcagttgctctaccgggcgaaataccctagccgcgatttccctaacttgacagcccttttgcaaatgttcctcaaggaaagtcctgcccatccacagcgggcatgtctggggattccaggcccagtcattgaccaagtcgctcaggtaaccaatttgggctggcgggtcagtgctgccgaattagagacggcattacagattcctggcgtgacgctgctgaatgattttgcggccgtggcctatggcgcattggtgctaccgccgacggattttgttgttcttcaggagcggccgcgccgtccccaagcgcctattgccctactgggagccggtactggcttgggggaagcactgctcatttggcagggcgatcgctaccaagtcatgccccttgagggtggtcacaccgattttcctccccgcaacgaagaggaagtgggtctactgcgctatctctggcaaacctacgaacgagtctctgtggagcgggtggtctctggcccagggctggtggccatttacgactatctcaagagtgtccacttcgctgccgagtcagcaggggtggcagcagcaatggcaaggggagaggatcccgccgccgtcgtgagtcagtacggcctcgcgggggatcccctgtgtgcagaagccttgcggatgtttgtcgaagcctacggcgcagaggcgggcaaccttgccctcaaaagtttacccctcggcggggtacttattgctggggggattgcccccaaaattttggcaaaaatggccgatggcacctttctccaagggtttgtgaataagggacggtttcgccccctgatggagcagttgtacgttgctgtgatcatcaatcctgaggtgggattacggggcgcggtacatttagctgctcagggggtctag

SEQ ID NO: 49971 - protein, 329 aa, Thermosynechococcus elongatus BP-1
MAMTVVLGADVGGTKTLVELWEVGGRDWQLLYRAKYPSRDFPNLTALLQMFLKESPAHPQRACLGIPGPVIDQVAQVTNLGWRVSAAELETALQIPGVTLLNDFAAVAYGALVLPPTDFVVLQERPRRPQAPIALLGAGTGLGEALLIWQGDRYQVMPLEGGHTDFPPRNEEEVGLLRYLWQTYERVSVERVVSGPGLVAIYDYLKSVHFAAESAGVAAAMARGEDPAAVVSQYGLAGDPLCAEALRMFVEAYGAEAGNLALKSLPLGGVLIAGGIAPKILAKMADGTFLQGFVNKGRFRPLMEQLYVAVIINPEVGLRGAVHLAAQGV

SEQ ID NO: 49972 - DNA, 960 bp, Pseudomonas putida KT2440
  CDS (1)..(960): transl_table=11
atgaagcacctgctggttggtgatattggcggcaccaatgcccgttttgcgttgtggcgtgacaaccagctgcatgaagtaaatgttttcgccaccgtggactacaccaacccggagcaggccatcgaggcctacctggaaagccaaggtatcgcccgcggtggcctggcggcggtgtgcctggcggtggccggcccggtcgatggcgatgaatttcgcttcaccaacaaccactggcgcctgagtcgcacggcattttgcaagaccttgcaggtcgagcggctgttgctgatcaatgatttcaccgcaatggcactgggcatgacgcgtctgcgcgaaggcgagttccgcgaggtgtgccccggccaggccgacccctcgaggccggcactggtgatcgggccaggtactggcctgggtgtgggctcgctgctgcgcctgggcgaacagctctggaaggccctgccgggtgaaggcgggcatgttgacctgccggtaggcaatgctcgcgaagcggcaatccaccagcagatccacagtcagatcggtcatgtcagcgccgaggccgtgctcagtgggggtggcctggtgcggctgtaccaggcgatctgtgcgctggacggcgacacgcccaggcacaagaccccggcgcatatcaccgatgccgcgctgggcggggagccacgggcgctggcggtggtcgagcagttctgtcgtttccttgggcgagtggcgggtaataatgtgctgacgctgggcgcgcgaggcggggtctatattgtgggcggtgtgattccgcgctttgccgagctgttcctgcgtagcgggtttgccgcgagttttgccgacaaggggtgtatgagtggctatttcaccggggtgccggtgtggctggtgacggcggagttttccgggttggagggagcaggggtagcgttgcagcaggcgttggatcactga

SEQ ID NO: 49973 - protein, 319 aa, Pseudomonas putida KT2440
MKHLLVGDIGGTNARFALWRDNQLHEVNVFATVDYTNPEQAIEAYLESQGIARGGLAAVCLAVAGPVDGDEFRFTNNHWRLSRTAFCKTLQVERLLLINDFTAMALGMTRLREGEFREVCPGQADPSRPALVIGPGTGLGVGSLLRLGEQLWKALPGEGGHVDLPVGNAREAAIHQQIHSQIGHVSAEAVLSGGGLVRLYQAICALDGDTPRHKTPAHITDAALGGEPRALAVVEQFCRFLGRVAGNNVLTLGARGGVYIVGGVIPRFAELFLRSGFAASFADKGCMSGYFTGVPVWLVTAEFSGLEGAGVALQQALDH

SEQ ID NO: 49974 - DNA, 987 bp, Bradyrhizobium japonicum USDA 110
  CDS (1)..(987)
atgagtatcggcaagacaggaaaaattcttctcgccgatatcggcggcaccaatgcgcgctttgcgctgagccaaagcgaaccgggcaacggcgaccagaccggatcgatcgactatgtgaaggtcgccgacttcccgaccgtccaggaagccattgtcgacgtgctggcgcgccgggccggcggcgaaccgccccaacgagccgtgctggccgtcgcaggccccgtcaccaacaaccgctgcgtcatgaccaacagcccctgggtcatcgacggcaacgagctccagccaacgctcggcttcgacagcgtccatgtgctcaacgatttcgaggtggtcgcctggtccctgcccgccttgcggtccgccgatctgatcccgctcggcggacaagatggcctccccggagaaccgttgctggtggtcgggcccggaaccggctttggcgtctcctgtctggttgagcgctatggggcgcggctggccgtcgtcaccgaggctggccacgcgacgttgccggcagagaacgagcgcgaggaacgcgtgatcgcgtccttgcgccgacgtttcggccatgtctccatcgagcgcggcgcgctgtcgggctccggcttgcaaagcctctacgaggcactcgcggagatcgacggcgtccaggtgccgcaccgcgacgcggccgccatcaccaaggcggccctggatggcagctgcccggtcagccgcgcgacgctggagatgttctgcgccaccctgggctcggtcgcgggcaacctcgcggtgaccttcggtgcccgcggcggcgtctatatcgccggcgggatcgtgccgcgcttcccggagttccttgcggcctccgcgttccgcgcgcgcttcgaagccaaggggcgcttccaggactatttgcgcaacatcccgacccggctcgtcacgaagcccgatgccagcttcgtcgggctgaagatgttcgccgaccacaatcctgattga

SEQ ID NO: 49975 - protein, 328 aa, Bradyrhizobium japonicum USDA 110
MSIGKTGKILLADIGGTNARFALSQSEPGNGDQTGSIDYVKVADFPTVQEAIVDVLARRAGGEPPQRAVLAVAGPVTNNRCVMTNSPWVIDGNELQPTLGFDSVHVLNDFEVVAWSLPALRSADLIPLGGQDGLPGEPLLVVGPGTGFGVSCLVERYGARLAVVTEAGHATLPAENEREERVIASLRRRFGHVSIERGALSGSGLQSLYEALAEIDGVQVPHRDAAAITKAALDGSCPVSRATLEMFCATLGSVAGNLAVTFGARGGVYIAGGIVPRFPEFLAASAFRARFEAKGRFQDYLRNIPTRLVTKPDASFVGLKMFADHNPD

SEQ ID NO: 49976 - DNA, 978 bp, Bradyrhizobium japonicum USDA 110
  CDS (1)..(978)
atgatcaaggcgacgctggaaggacgagccgcgttgcttgcagatgttggagggaccaacgcccgcttcgcactgctgactgacggcgagctcggcgcgatcacacatatggcggtcaaggactacgctacctttcaggaggccctcgctgcctatctcggcgcttcggccagggccgagaggcctgctcatgcaatcctcgccgcctctggcgcggttcagaatgcccgctgcgcactcacgaacaattcctggatcgtcgacgcagaggaattgcgcggggcctatgggttttcggccgtccgtttgatcaacgactttgaagcggtcgcatgggccctgccccggcttggccccgacagtttgctgcagctcggcgggcggcagcaggtgccgggggcaccccttgccgcgatcggccccggcaccggcctgggaatggcggtgagcataccacaccccggcggacagatcgttctcgccagcgagggaggccatgccacgctggcaggcggttcgttgcgcgaggatgcggtgattgagcatttgcggcaacgcttcggacatgtgtcggccgaacgcattctgtcgggcgcggggctcgagaacctgtatgacgctctcgcctgcatcgacggcgcgacgccgccaaagcgccgcgcgtccgacattacgcgggccggaattgagggaacgtgtccgatcagccgctccgccgttgacatgttctgcgcgatgctggggtccgtcgcgggcaacctcgcgctcgcgctgaccgcgagaggcgggatattcatcggcggcggcatcttgcgccacctgccggactatcttgccgcgtcccagtttcgccagcgcttcgaggagaaggggcggctccgaaaattcctcgagccgataccggcctatctgatcctggacgacgacgtcgcattcgtcggcctccgtaacctgatggaggtcgaaggcattggctga

SEQ ID NO: 49977 - protein, 325 aa, Bradyrhizobium japonicum USDA 110
MIKATLEGRAALLADVGGTNARFALLTDGELGAITHMAVKDYATFQEALAAYLGASARAERPAHAILAASGAVQNARCALTNNSWIVDAEELRGAYGFSAVRLINDFEAVAWALPRLGPDSLLQLGGRQQVPGAPLAAIGPGTGLGMAVSIPHPGGQIVLASEGGHATLAGGSLREDAVIEHLRQRFGHVSAERILSGAGLENLYDALACIDGATPPKRRASDITRAGIEGTCPISRSAVDMFCAMLGSVAGNLALALTARGGIFIGGGILRHLPDYLAASQFRQRFEEKGRLRKFLEPIPAYLILDDDVAFVGLRNLMEVEGIG

SEQ ID NO: 49978 - DNA, 966 bp, Pseudomonas syringae pv. tomato str. DC3000
  CDS (1)..(966): transl_table=11
gtgaagttggccctggtcggtgatataggcggtaccaatgcacgttttgccatttgggaagacgacacgctgcattctgtccgggtgttcccgaccattgactacgcaggccccgaaaaggccatcgaagtctatctgcaggaccttgaattgcagcgcggtgacattggctatgtgtgcctggcggtcgccgggccggtcgatggcgatctgtttcagttcaccaacagccactggcaactgagccgtgaggcgttctgcgccgacctgaaagtcgatcacctgctgctgatcaacgacttcaccgccatggcgctgggcatgacccggctcaaggacgatgaatacctgacggtctgtcatggcgtcggcaagccggatcgcccgcgcgtggtggtcgggccgggcactgggctgggcatcggcacgctgatcaaactggaagacagccgctggatggccttgccgggcgagggcgggcatgccgacctgccaatcggcacggcgcgcgaggccctgctgtggacgcggctgatggccgagcacgaacatgtcagcgccgaagtggtgctcagtggtgcgggcctgttgttgctgtatcaggtcagttgcgcgctggacggcatggacgcagagctcaagtcgcctgctgcgatcacgtcggctgcgctggcaggcgatccggtcgcggcggcggtgcttgaacagttctgcgtgttcctcggcagagtggtcggcaacaacgttctgaccctgggcagtctgggcggggtctacatcgtgggtggcgtggtgccacgtttcacagaattcttcatgaacagcggcttcaagcgcgccatgggcgagaagggcgtgatgagcggctacttcaagaacctgccggtctggctggtcaccgccgagtacccagggcttatgggttcaggcgttgcgctgcaacaggcgttcggttcgcaaatttga

SEQ ID NO: 49979 - protein, 321 aa, Pseudomonas syringae pv. tomato str. DC3000
MKLALVGDIGGTNARFAIWEDDTLHSVRVFPTIDYAGPEKAIEVYLQDLELQRGDIGYVCLAVAGPVDGDLFQFTNSHWQLSREAFCADLKVDHLLLINDFTAMALGMTRLKDDEYLTVCHGVGKPDRPRVVVGPGTGLGIGTLIKLEDSRWMALPGEGGHADLPIGTAREALLWTRLMAEHEHVSAEVVLSGAGLLLLYQVSCALDGMDAELKSPAAITSAALAGDPVAAAVLEQFCVFLGRVVGNNVLTLGSLGGVYIVGGVVPRFTEFFMNSGFKRAMGEKGVMSGYFKNLPVWLVTAEYPGLMGSGVALQQAFGSQI

SEQ ID NO: 49980 - DNA, 1008 bp, Nitrosomonas europaea ATCC 19718
  CDS (1)..(1008): transl_table=11
atggatcagtacctgttgtctggcgacatcggtggaaccaagactctgttacgttctgccgtggtaagaggtgaagaggttgaattccatcatgagcatctctatgacagtcaccagtacgatgattttgacgccattctggcagattttctggagcgatccggctgccagccggttgctgcttgcctggcagtagccgggccgatcgttgaacaacaggttcatctgaccaatctgccctggatgatcagtgcagccggcattgcagaaaaattttcgattcccgccgtgaaaattatcaatgatttcgagggaacagcagcttccatagaaatattgccgcaggatgatctgattacattgcaggccggtaaaccttcttcttcggcaatgcgtgtcgtgctgggagcagggaccggtatgggcgttgcctggctggcctggcgcggccagtactatgagccccttgcgactgaggcgggacatatcgattttgcaccgaccagtgccattcagatcgaactgctccggtatctgatggtcaggtatcaccgtgtttcgatcgagcggctgctttccggccaggggttgacccacattttcaattttctgcaaacccgcgccactgaagggactcatctcaaaagtatcgaactgaacgtcgacgatggagccaccgtgactcgtctggcattcgaacatcactacccgattgccttgcaggcgctggatctgttcgtggaaatttacggtacttatgcgggcaacctggcgctggcggggttgtgccgcggtggtgtctatattgcgggagggatcgcaccacgtatcatccggattttgcagcaatccggtttcatcgaggcgttttgcaacaagggacgatacagtgcgctggtgcgtgatattcctgtgtatgtggtaatgaatccgaaggccggtctgctgggtgccggactgcttgcgcagcgcatgctgcagcatcagactgtatcatcccggcagtaa

SEQ ID NO: 49981 - protein, 335 aa, Nitrosomonas europaea ATCC 19718
MDQYLLSGDIGGTKTLLRSAVVRGEEVEFHHEHLYDSHQYDDFDAILADFLERSGCQPVAACLAVAGPIVEQQVHLTNLPWMISAAGIAEKFSIPAVKIINDFEGTAASIEILPQDDLITLQAGKPSSSAMRVVLGAGTGMGVAWLAWRGQYYEPLATEAGHIDFAPTSAIQIELLRYLMVRYHRVSIERLLSGQGLTHIFNFLQTRATEGTHLKSIELNVDDGATVTRLAFEHHYPIALQALDLFVEIYGTYAGNLALAGLCRGGVYIAGGIAPRIIRILQQSGFIEAFCNKGRYSALVRDIPVYVVMNPKAGLLGAGLLAQRMLQHQTVSSRQ

SEQ ID NO: 49982 - DNA, 1047 bp, Prochlorococcus marinus subsp. marinus str. CCMP1375
  CDS (1)..(1047): transl_table=11
atgaatttattagcagctgatataggaggaacaaaaacgttacttggggtttttagatatgagggacaaataaaacaattgtataaagcaaaatattcatctgaagattgggataattttgatttaatgctaaaagattttatagccaatcttccttcaaacataactacaccaaaatatgcatgtattggtgttgcgggtgcaattaataataaaattgttaaattaactaatttaaattggcaaataagtcaagaatccctttgcaagacacttaatactgatgaagttatcttgttaaatgatttttcttgcttggtatatgcaataccttatctgcaacaaaaacaatataagtacattcaatccttaaaaacaaatttagattatcaaaaggaaggttccatttttgcaattcttggagctggtacaggtcttggtatggcaagaggcataataactaaatcaggtcttaaagcaatccctagtgaaggcggacatagagaattctcccctcgaaataataaggaatgggaactatgccaatggcttaaaaaagatctaaaactaaccagattgtccatagaaagagtagtaagtggaactggtcttgcaaatattgctcgttggagattaagccaagaggatactaagtctcatccaatattaagcattatagaagccaacaattctcataatttcaacaacaagttactccctgaaagagtatcaatcgcagccaaaggaggcgatccaattatgcgagaagttctagaaatgtggcttagtgcttacggatctgcagctggagaccttgcattacaagaactatctacagaagggctttggattggaggtggaacggcgataaagcatttagatggcctttcatcagaaatatttctaaactccttgaaaaacaaaggtcgtttttcagaatatcttgagaaactaccaataatggtcttaatagacccagaggctgggctatttggagctgcatgtaaagctcatctaatgaccaagtctaatgtcaaaataaactga

SEQ ID NO: 49983 - protein, 348 aa, Prochlorococcus marinus subsp. marinus str. CCMP1375
MNLLAADIGGTKTLLGVFRYEGQIKQLYKAKYSSEDWDNFDLMLKDFIANLPSNITTPKYACIGVAGAINNKIVKLTNLNWQISQESLCKTLNTDEVILLNDFSCLVYAIPYLQQKQYKYIQSLKTNLDYQKEGSIFAILGAGTGLGMARGIITKSGLKAIPSEGGHREFSPRNNKEWELCQWLKKDLKLTRLSIERVVSGTGLANIARWRLSQEDTKSHPILSIIEANNSHNFNNKLLPERVSIAAKGGDPIMREVLEMWLSAYGSAAGDLALQELSTEGLWIGGGTAIKHLDGLSSEIFLNSLKNKGRFSEYLEKLPIMVLIDPEAGLFGAACKAHLMTKSNVKIN

SEQ ID NO: 49984 - DNA, 1038 bp, Prochlorococcus marinus subsp. pastoris str. CCMP1986
  CDS (1)..(1038): transl_table=11
atgaattttcttgcttgtgatctaggaggtacaaaagttcttttaggaattttcaaaaaggaagttaatacttgtactccaattttaattttaaaaaaaaaatatttatcttctgaatgggattcaattgacacaattttagaagatttcttaaaaaatgaatgcaaaaacattaatcatcctttttctgcttgtttcgcggtagcaggtcccatatctaataataatgcggaaataattaatttatcgtggaatatttctggcgatgaattaaaaaagaaatttaaatttaaaaattgcgagctagtaaacgattttgcagtgcaaatttatggaataccttttttgaaaaaaagtcaatattctgctattcaaaatggagaccggtcagtaggcgtcaataaagatttacatgcaatcgttggagcaggaactggtctaggcattgcaaaaggcataatatctggaaataaagtaaaagttttagctagcgaaggtggtcatgttgaatactcgccaaagtcagatttagaatgggaattaaagaattggctcaaatattctttaaaagttgaaagaatatcttgtgaaagaatcataagtgggactgggttatcaagaatagctgagtggagacttagcaaacctgatgccaaaaaccatcctctacaaaaatacttaaaagaattaaaaacttctgataatttaagaaaagaacttcctcaagaaatttgtaatctttctaatctaggggataagatgatgattgaagtggaaagaatatggttagatgcttacgcctcattattgggtgacgttgctcttcaagaattatgttatggagggttatggatttctggaggaaccgctccaaaacatttcataaactttaaatcaggtttatttatgaaacaattttcagataaaggaagattaaaagatattcttaaaaatatacctgtgaatgtaatcttagatgaagagtttggattatttagcgcagcctgcagagcaaaaatgctttcacaaaaagaataa

SEQ ID NO: 49985 - protein, 345 aa, Prochlorococcus marinus subsp. pastoris str. CCMP1986
MNFLACDLGGTKVLLGIFKKEVNTCTPILILKKKYLSSEWDSIDTILEDFLKNECKNINHPFSACFAVAGPISNNNAEIINLSWNISGDELKKKFKFKNCELVNDFAVQIYGIPFLKKSQYSAIQNGDRSVGVNKDLHAIVGAGTGLGIAKGIISGNKVKVLASEGGHVEYSPKSDLEWELKNWLKYSLKVERISCERIISGTGLSRIAEWRLSKPDAKNHPLQKYLKELKTSDNLRKELPQEICNLSNLGDKMMIEVERIWLDAYASLLGDVALQELCYGGLWISGGTAPKHFINFKSGLFMKQFSDKGRLKDILKNIPVNVILDEEFGLFSAACRAKMLSQKE

SEQ ID NO: 49986 - DNA, 1062 bp, Prochlorococcus marinus str. MIT 9313
  CDS (1)..(1062): transl_table=11
atgccgtccccgagaacctttctggcaggtgatttggggggcaccaaaaccttgcttgcgctctatagctgggacgaaaagcaactcaagcaacagcaccggcggaggtatttatccaatcagtggacttcgcttgaacccatgctgagccacttcatcgcccatttgccaggggagatggagcaacccaataacggctgcatcgctgttgcaggatcggttcgccatggtgaggcacgtatcaccaatctgccctggagcctgaaggagaaggacctttgctcagccacgggactgaagcatttggaactgattaatgactttggcgtattgatctacggcctaccctttctcaacgacgcgcagcaggtggagcttcagcgtccacagcagcatttgtctgcacaaggacccattgcagttctgggggcaggtactggacttggaatggcccgtggcctgcccacaaaagatgggatggtggcgctgcccagtgaaggcggacaccgtgaatttgctcctcgcagtgaatgcgagtggcaactttgtgagtggctcaaggccgatttgcagctcgaacgcctttcattggaacgtgttgtcagtggaacgggcctgggacacgtggcgcgctggcgcctacagcacagtgacgcagatggtcatcctctgcgaggtctggccgatgcttggcgccatggtgctaatgatcattgcgaccatttggatctgcctgctcttgctagtcaagccgcaagcgaaggcgattcaattcttcaagaagccttacagctctggctcgctgcttacggctctgctgcgggagatttagctctgcaggaactctgtgtcggaggcctctgggtgggtgggggtaccgctgcgaagcagcttcaaggtcttcgctcaagcacctttcttgaagccttccgcaacaaggggcgcttccgtccgtttctagagcaattgccagtgatggcagtgatcgatcccgaggtgggcctgttcagtgcagcctgcagagcacacatgcttgctgagcaaggtgggacactgacctaa

SEQ ID NO: 49987 - protein, 353 aa, Prochlorococcus marinus str. MIT 9313
MPSPRTFLAGDLGGTKTLLALYSWDEKQLKQQHRRRYLSNQWTSLEPMLSHFIAHLPGEMEQPNNGCIAVAGSVRHGEARITNLPWSLKEKDLCSATGLKHLELINDFGVLIYGLPFLNDAQQVELQRPQQHLSAQGPIAVLGAGTGLGMARGLPTKDGMVALPSEGGHREFAPRSECEWQLCEWLKADLQLERLSLERVVSGTGLGHVARWRLQHSDADGHPLRGLADAWRHGANDHCDHLDLPALASQAASEGDSILQEALQLWLAAYGSAAGDLALQELCVGGLWVGGGTAAKQLQGLRSSTFLEAFRNKGRFRPFLEQLPVMAVIDPEVGLFSAACRAHMLAEQGGTLT

SEQ ID NO: 49988 - DNA, 1035 bp, Synechococcus sp. WH 8102
  CDS (1)..(1035): transl_table=11
atgccccgtcccactcttctcgctggcgacatgggggggaccaagacccttcttgcgctctacgacctcgagggtgaaacgctgatcaaacgtcaccagcaacggtttgtctcagctgattggtcatcgctggagccgatgcttcaggcgtttgttgaggaacggcccaaggacgtccaggcgccaacccatggctgcatcgccgtggcaggccctgttcgcaatcggcaggcccggatcaccaacctcccctggcagctcaaggaagaggatctggctgccgccgcagggatgcagcaactggagctggtgaacgatttcggtgtgctgatctacggcctgcctcacttcggcgcggatcagcaggtggtgctgcaggaggggagtcaggacgacgggcccctggccatccttggagctgggaccggcctcggcatggctcgaggcgttcgcaccagcaacgggctgatggctctctccagcgagggtggacatcgcgaattcgcaccgcgcagcgatgaggaatggcaactggcctgctggctcaaacaggacctgggagtcgaccgcctgtcgatcgagcgggtggtgagcggcacagggcttggccacatcgcccattggctgctgcagcagccaggcgcacaatcccacccccttcgtcctgtggctgaggcctggcggcgaaatatggccagtgaccttccagctcaggtgtctctcgcggccgaagagggggaccctctgatgcgacatgcccttgacctgtggctgtcggcctacggctcagccacaggtgacctggccctgcaggaactctgcagcggtggtctctgggtgggaggcggcacggcctcaaaacaacgcaacggactgcaatccccgctgttccttgaggcaatgcgcgacaaaggtcggttcaaggacttcatcagcggtctgaaggtcaccgctgtgatcgatccggaggctggtctgttcagctctgcctgccgagcacggatgttggcggagtcgggtgggacactggcctga

SEQ ID NO: 49989 - protein, 344 aa, Synechococcus sp. WH 8102
MPRPTLLAGDMGGTKTLLALYDLEGETLIKRHQQRFVSADWSSLEPMLQAFVEERPKDVQAPTHGCIAVAGPVRNRQARITNLPWQLKEEDLAAAAGMQQLELVNDFGVLIYGLPHFGADQQVVLQEGSQDDGPLAILGAGTGLGMARGVRTSNGLMALSSEGGHREFAPRSDEEWQLACWLKQDLGVDRLSIERVVSGTGLGHIAHWLLQQPGAQSHPLRPVAEAWRRNMASDLPAQVSLAAEEGDPLMRHALDLWLSAYGSATGDLALQELCSGGLWVGGGTASKQRNGLQSPLFLEAMRDKGRFKDFISGLKVTAVIDPEAGLFSSACRARMLAESGGTLA

SEQ ID NO: 49990 - DNA, 1014 bp, Chromobacterium violaceum ATCC 12472
  CDS (1)..(1014): transl_table=11
ctgctcggcgacgtcggcggcagcaacgcgcgcttcgcgctggaaaccgcgcccggggtgattgaagacatcctgacgctgtccaatgagcgctacccgacgctggaggacgcgctgcgcgactacctggcccaggtcggcgcgcgccgcgtcgcccacgccgccatcggcatcgccaatccgctgaacggcgacctggtgcggatgaccaattgccattggtcgttttccatcgaagcgacgcgccgcgcgctgggcctctccacgctgctgctgctcaacgacttcaccgcgctggcgctggccctgcccaggctgccgcgccgggagctggcccaggtgggcggcggcgcgccgcggccggacgcgccgctggcgctgatcggccccggcaccgggctgggcgtgtcggcgctggtgccgcacgccggcggctggcgcgcgctggccggcgagggcggccacacctcgttcgcgccggccaacgaacgcgaaatcggcatctggcgctacgcgtccgcccgcttcggccacgtgtcgcacgagcggctgctgtccggctccggcctcagcctgctgcaccgggcgctgtgcgcgctggacggggcggaagaggccggcctggcgccggccgaagtcagcgcccgcggcctgtccggcgccgacgcgcgctgccgcgaagcactggaaatcttctgcgcgctgctgggttcggcggccgggaatctggccttgaccctcggtgcccgtggcggggtgtacataggtggtggtattgtgccgcgtttgagcggtttttttgaacaatccccatttcgccgccgtttcgaggacaaggggcggatgtcggcctatctggccgacatcccggtttacctgatcaccagcgcctacccggccctgccgggcgtggccgcccatctggcggaccacctggcgccgcgcagcgacccggccccggtggcagcgcccacccatcctcgcggcggcacagcaggagacatgcatgcttga

SEQ ID NO: 49991 - protein, 337 aa, Chromobacterium violaceum ATCC 12472
MLGDVGGSNARFALETAPGVIEDILTLSNERYPTLEDALRDYLAQVGARRVAHAAIGIANPLNGDLVRMTNCHWSFSIEATRRALGLSTLLLLNDFTALALALPRLPRRELAQVGGGAPRPDAPLALIGPGTGLGVSALVPHAGGWRALAGEGGHTSFAPANEREIGIWRYASARFGHVSHERLLSGSGLSLLHRALCALDGAEEAGLAPAEVSARGLSGADARCREALEIFCALLGSAAGNLALTLGARGGVYIGGGIVPRLSGFFEQSPFRRRFEDKGRMSAYLADIPVYLITSAYPALPGVAAHLADHLAPRSDPAPVAAPTHPRGGTAGDMHA

SEQ ID NO: 49992 - DNA, 984 bp, Gloeobacter violaceus PCC 7421
  CDS (1)..(984): transl_table=11
atgattcttgcgggtgatgtgggcggaaccaacacgcggctggccggcttcgagccggtcgcgggcaacttgatgccgatcgtctccgagacctatgccagccgggattactccagtctcgaccaaatcgtctatctttttatttctgagtaccatctgcgggtcgccgccgcctgcttcggggtggcggggccggtcaggcggggccgggccgagacgaccaacctgccctggtcgatcgacgcctccaccctggctgccgggctcaagctgccgacggtgggactgattaacgatctggaggccaacgcccacggcattgcgctgctgggaccggcggattttgccgtactcaacccgggcgcggcggatgcgatgggcaaccaggcggtgatcgccgccggaacggggcttggggaggcgggtttgttttgggatggcaggcggcatcggccctttgccaccgagggcggccacaccgattttgcgcccggcgacgcgctgcagatcgagttgctgcaccatctgcgggtgcgctttgcccatgtgagctgggagcgggtgctctccggtccgggactggtgaatatctatcaatttctgcgggacacccggcgcggggaggaacccaactggctcaccgaggagcttcgcaaccatcccaacccggcggcggtcatctcgcaggtggcgctcgcgggcaagtcctggttgtgcgaacaggccctcgatttgctgattgtcctgtacggtgcagaggcgggcaatctcgccctgaaggtcgccgccctaggcggggtgtttttggggggcggcatcgcccccaaactggtggagcggctcaaaggaccggcatttttggaggcgtttcttgccaaggggcgtctgcgcccgcttttagaggcgatgccggtgcgcgtcatcctcaacgatcgggccgccctgcttggagcggcccactgcgccatgcaaactttgatctag

SEQ ID NO: 49993 - protein, 327 aa, Gloeobacter violaceus PCC 7421
MILAGDVGGTNTRLAGFEPVAGNLMPIVSETYASRDYSSLDQIVYLFISEYHLRVAAACFGVAGPVRRGRAETTNLPWSIDASTLAAGLKLPTVGLINDLEANAHGIALLGPADFAVLNPGAADAMGNQAVIAAGTGLGEAGLFWDGRRHRPFATEGGHTDFAPGDALQIELLHHLRVRFAHVSWERVLSGPGLVNIYQFLRDTRRGEEPNWLTEELRNHPNPAAVISQVALAGKSWLCEQALDLLIVLYGAEAGNLALKVAALGGVFLGGGIAPKLVERLKGPAFLEAFLAKGRLRPLLEAMPVRVILNDRAALLGAAHCAMQTLI

SEQ ID NO: 49994 - DNA, 1020 bp, Desulfovibrio vulgaris subsp. vulgaris str. Hildenborough
  CDS (1)..(1020): transl_table=11
atggagaagggctgccgtatccttgccgcagacatcggcgggacacgcagccgctttgcctacttcgactatgccggaggggagcttggcatgggcgatgtcgtccgcatccccacggcggaggctaccgggttcgacgacctgcttggcagggtgcgcgcagccgcgcccggtgcatgggcgcgactgacgcgacagactgacaccgggaatgatgctccggatacgcccgatgcaagcgtcaccgccttcgccgcctttgccgtggcagggcctgtcgaggagggggcgcgttgtctgcctcccaacatcggttggcatatcgacctcgccaccacgcgtggtttgccgtgtgcagcgtcgctgctcaacgatttcgaggcgcagggatgggcctgtctgctgcccggggcgcaacagtgccttcagctactgcccggaaagccggacgcgacggcacctgtggctgtcgtcggggcaggcacggggcttggcaaatgccttctgcttccgggcacgccgcacagggtgctgccctcggagggagggcacgccacgttcgccttcgaggggcgtgccgaggccgaatacgccgcctttgctgccgaccgccttggcgtgggacgactgattggcgatgacgtgctttccgggcccgggctgtctctgttgtacgcctatcatcacggcgagacgctacccccgcacgaggtggcggcacgtctcaccggaagtgacgtcgtcgtcgagtggttcgcgcgtttctacgggcgcacctgccgtgactgggcgttgcatacccttgccagaggcggtgtgcgcatcgcggggggagtggcggctgccaaccccatgctggtgcagcatggggccttcgccgaggcgttcttcgattgccccacgcacacgcacctcttgcgcaccatccccgtctcactggtcaccaatgccgacgccggcctatggggggcggccatctttgccctgcttcatgccgggacaaggagaacgccacgatga

SEQ ID NO: 49995 - protein, 339 aa, Desulfovibrio vulgaris subsp. vulgaris str. Hildenborough
MEKGCRILAADIGGTRSRFAYFDYAGGELGMGDVVRIPTAEATGFDDLLGRVRAAAPGAWARLTRQTDTGNDAPDTPDASVTAFAAFAVAGPVEEGARCLPPNIGWHIDLATTRGLPCAASLLNDFEAQGWACLLPGAQQCLQLLPGKPDATAPVAVVGAGTGLGKCLLLPGTPHRVLPSEGGHATFAFEGRAEAEYAAFAADRLGVGRLIGDDVLSGPGLSLLYAYHHGETLPPHEVAARLTGSDVVVEWFARFYGRTCRDWALHTLARGGVRIAGGVAAANPMLVQHGAFAEAFFDCPTHTHLLRTIPVSLVTNADAGLWGAAIFALLHAGTRRTPR

SEQ ID NO: 49996 - DNA, 999 bp, Desulfotalea psychrophila LSv54
  CDS (1)..(999): transl_table=11
atgatacttgccggtgatatcggtggtacaaaaacaaatctagcgctttacacctgttcatgtccggcgggtaatggctcattgatcgatagctcagcaaagacctatttgaatgcagatttcgccagcggcgaagagttggtgtgtggctatctggcaggcatcgacactacaattaaaagggcggtattcgctgtggccgggccgatacgggatgggcaggtaaaaatcaccaatctgccttggctgataagtgtagaacagttaagcgttgcgacgggtatcgcgacaattcacctgatgaacgatttggaggcgaccgcgtacgctgtgccttttctttcgcgggacgagttgtacaccctcaatcaggggatatcggtagagaggggaaatattgctcttattgccccggggacaggactgggggagtccttcctgacatgggaagggacgcgttatagtgcccatgccacagaggggagtcatgtcgatttcgcccccaccaatgcgcttcagataaaactgctggattatctgctcaggggctatgagcatgtgagctatgaacggatctgttcgggaataggaattcccaatatctatggctttttgaaacacagccagaacattgaggagccggaatggctacgcgagcaactctcacaggagaaagaccacaccgctgtgatagtcaatgccgctctcgatgctcaacggccatgccccatctgcaggatgacagttgaaatttttctctcagttctcggtgcggaggcggggaatatcgctctgaaagttatggcggctggcggtgtgtatgtgggaggaggtattgttccccgcattctgtctttgttaggaaacggcctcttcatggaaacctttaacagtaaggggcgaatgtccgaactcctggtcgacgttccggtacatataattctcaatcctaaagttgcggtttttggcgctgcgcgttacgggatggaaatttgttga

SEQ ID NO: 49997 - protein, 332 aa, Desulfotalea psychrophila LSv54
MILAGDIGGTKTNLALYTCSCPAGNGSLIDSSAKTYLNADFASGEELVCGYLAGIDTTIKRAVFAVAGPIRDGQVKITNLPWLISVEQLSVATGIATIHLMNDLEATAYAVPFLSRDELYTLNQGISVERGNIALIAPGTGLGESFLTWEGTRYSAHATEGSHVDFAPTNALQIKLLDYLLRGYEHVSYERICSGIGIPNIYGFLKHSQNIEEPEWLREQLSQEKDHTAVIVNAALDAQRPCPICRMTVEIFLSVLGAEAGNIALKVMAAGGVYVGGGIVPRILSLLGNGLFMETFNSKGRMSELLVDVPVHIILNPKVAVFGAARYGMEIC

SEQ ID NO: 49998 - DNA, 1926 bp, Burkholderia mallei ATCC 23344
  CDS (1)..(1926): transl_table=11
atgtctactggtgcgcaaactaaggccgccgcggcgagccagcacgcggacgggccgcgcctattggccgacgtcggcggcacgaacgcgcgcttcgcgctcgagacgggcccgggagaaatcacgcagatccgcgtgtacccgggcgccgagtatccgacgctcaccgacgcgatccgcaagtatctgaaggacgcgaagatcggccgcgtgaatcacgcggcgatcgcgatcgcgaaccccgtcgacggcgatcaggtccggatgacgaatcacaactggagcttctcgatcgaggcgacgcgccgcgcgctcggcttcgatacgctgctcgtcgtcaacgatttcaccgcgctcgcgatggcgctgcccggcctgaccgatgcgcagcgcgtacagatcggcggcggcacgcgccgacagaacagcgtgatcggcctgatggggccgggcacggggctcggcgtgtcggggctcattcccgccgacgaccgctggatcgcgctcggcagcgaaggcggccacgcgacgttcgcgccgatggacgagcgcgaggatctcgtgctgcaatacgcgcgccgcaagtatcctcacgtgtcgttcgagcgcgtatgcgcgggcccgggcatggagatcatctatcgcgcgctcgccgcgcgcgacaagaagcgtatcgccgcgaacgtcgacacggccgacatcgtcgagcgcgcgcacgcgggcgatgcgctcgcgctcgaggcggtcgagtgcttctgcgcgattctcggcacgttcgccggcaacctcgcggtcacgctcggcgcgttgggcggcatctatatcggcggcggcgtcgtgccgaagctcggcgagctgttcatgcgctcgccgtttcgcgcgcgcttcgaggcgaagggccgcttcgaggcgtatctcgcgaacatcccgacctacctgatcaccgcggaatacccggcgtttctcggcgtatcggcgatcctcgccgagcaactgtcgaaccgcacgggcggcgcgtcgtcggccgtgttcgagcgcatccgccagatgcgcgacgcgttgacgcccgccgagcggcgcgtcgccgatctcgcgctcaaccatccgcgctcgatcatcaacgatccgatcgtcaacatcgcgcgcaaggccgacgtgagccagcccaccgtgatccgcttctgccgctcgctcggctgccaggggctgtcggacttcaagctgaagctcgcgacgggcctcaccggcacgatcccgatgagccacagccaggtgcatctgggcgacaccgcgaccgatttcggcgcgaaggtgctcgacaacacggtatcggcgatccttcagttgcgcgagcatctgaacttcgagcacgtcgagcaggcgatcgacatcctgaacaatgcgcggcgcatcgagttctacggcctgggcaattcgaacatcgtcgcgcaggacgcgcactacaagttcttccgcttcgggattccgacgatcgcgtacggcgacctgtacatgcaggcggcgtcggccgcgctcctcggcaagggcgacgtgatcgtcgcggtgtcgaagtcggggcgcgcgccggagctgttgcgcgtgctcgacgtcgcgatgcaggcgggcgcgaaggtgatcgcgatcacgtcgagcaacacgccgctcgccaagcgcgcgacggtcgcgctcgagaccgatcacatcgagatgcgcgagtcgcagttgtcgatgatctcgcggatcctgcatctcgtgatgatcgacatcctcgcggtcggcgtcgcgatccgccgcgccgcgccgaacgcggagctcgcggaggcgatggcgcgcgcgaaggcgcgcgcgggcgcgagcgcgggcgacgaggccgccgacgtgctcgactggctgagccacggcgcggcgcccgcggcgaaggactga

SEQ ID NO: 49999 - protein, 641 aa, Burkholderia mallei ATCC 23344
MSTGAQTKAAAASQHADGPRLLADVGGTNARFALETGPGEITQIRVYPGAEYPTLTDAIRKYLKDAKIGRVNHAAIAIANPVDGDQVRMTNHNWSFSIEATRRALGFDTLLVVNDFTALAMALPGLTDAQRVQIGGGTRRQNSVIGLMGPGTGLGVSGLIPADDRWIALGSEGGHATFAPMDEREDLVLQYARRKYPHVSFERVCAGPGMEIIYRALAARDKKRIAANVDTADIVERAHAGDALALEAVECFCAILGTFAGNLAVTLGALGGIYIGGGVVPKLGELFMRSPFRARFEAKGRFEAYLANIPTYLITAEYPAFLGVSAILAEQLSNRTGGASSAVFERIRQMRDALTPAERRVADLALNHPRSIINDPIVNIARKADVSQPTVIRFCRSLGCQGLSDFKLKLATGLTGTIPMSHSQVHLGDTATDFGAKVLDNTVSAILQLREHLNFEHVEQAIDILNNARRIEFYGLGNSNIVAQDAHYKFFRFGIPTIAYGDLYMQAASAALLGKGDVIVAVSKSGRAPELLRVLDVAMQAGAKVIAITSSNTPLAKRATVALETDHIEMRESQLSMISRILHLVMIDILAVGVAIRRAAPNAELAEAMARAKARAGASAGDEAADVLDWLSHGAAPAAKD

SEQ ID NO: 50000 - DNA, 1926 bp, Burkholderia pseudomallei K96243
  CDS (1)..(1926): transl_table=11
atgtctactggtgcgcaaactaaggccgccgcggcgagccagcacgcggacgggccgcgcctattggccgacgtcggcggcacgaacgcgcgcttcgcgctcgagacgggcccgggagaaatcacgcagatccgcgtgtacccgggcgccgagtatccgacgctcaccgacgcgatccgcaagtacctgaaggacgcgaaaatcggccgcgtgaatcacgcggcgatcgcgatcgcgaaccccgtcgacggcgatcaggtccggatgacgaatcacaactggagcttctcgatcgaggcgacgcgccgcgcgctcggcttcgatacgctgctcgtcgtcaacgatttcaccgcgctcgcgatggcgctgcccggcctgaccgatgcgcagcgcgtgcagatcggcggcggcgcgcgccggcagaacagcgtgatcggcctgatggggccgggcacggggctcggcgtgtcggggctcattcccgccgacgaccgctggatcgcgctcggcagcgaaggcggccacgcgacgttcgcgccgatggacgagcgcgaggatctcgtgctgcagtacgcgcgccgcaagtatcctcacgtgtcgttcgagcgcgtgtgcgcgggcccgggcatggagatcatctatcgcgcgctcgccgcgcgcgacaagaagcgcatcgccgcgaacgtcgacacggccgacatcgtcgagcgcgcgcacgcgggcgatgcgctcgcgctcgaggcggtcgagtgcttctgcgcgattctcggcacgttcgccggcaacctcgcggtcacgctcggcgcgttgggcggcatctatatcggcggcggcgtcgtgccgaagctcggcgagctgttcatgcgctcgccgtttcgcgcgcgcttcgaggcgaagggccgcttcgaggcgtatctcgcgaacatcccgacctacctgatcaccgcggaatacccggcgtttctcggcgtatcggcgatcctcgccgagcaactgtcgaaccgcacgggcggcgcgtcgtcggccgtgttcgagcgcatccgccagatgcgcgacgcgttgacgcccgccgagcggcgcgtcgccgatctcgcgctcaaccatccgcgctcgatcatcaacgatccgatcgtcgacatcgcgcgcaaggccgacgtgagccagcccaccgtgatccgcttctgccgctcgctcggctgccaggggctgtcggacttcaagctgaagctcgcgacgggcctcaccggcacgatcccgatgagccacagccaggtgcatctgggcgacaccgcgaccgatttcggcgcgaaggtgctcgacaacacggtatcggcgatccttcagttgcgcgagcatctgaacttcgagcacgtcgagcaggcgatcgacatcctgaacaatgcgcggcgcatcgagttctacggcctgggcaattcgaacatcgtcgcgcaggacgcgcactacaagttcttccgcttcgggattccgacgatcgcgtacggcgacctgtacatgcaggcggcgtcggccgcgctcctcggcaagggcgacgtgatcgtcgcggtgtcgaagtcggggcgcgcgccggagctgttgcgcgtgctcgacgtcgcgatgcaggcgggcgcgaaggtgatcgcgatcacgtcgagcaacacgccgctcgccaagcgcgcgacggtcgcgctcgagaccgatcacatcgagatgcgcgagtcgcagttgtcgatgatctcgcggatcctgcatctcgtgatgatcgacatcctcgcggtcggcgtcgcgatccgccgcgccgcgccgaacgcggagctcgcggaggcgatggcgcgcgcgaaggcgcgcgcgggcgcgagcgcgggcgacgaggccgccgacgtgctcgactggctgagccacggcgcggcgcccgcggcgaaggactga

SEQ ID NO: 50001 - protein, 641 aa, Burkholderia pseudomallei K96243
MSTGAQTKAAAASQHADGPRLLADVGGTNARFALETGPGEITQIRVYPGAEYPTLTDAIRKYLKDAKIGRVNHAAIAIANPVDGDQVRMTNHNWSFSIEATRRALGFDTLLVVNDFTALAMALPGLTDAQRVQIGGGARRQNSVIGLMGPGTGLGVSGLIPADDRWIALGSEGGHATFAPMDEREDLVLQYARRKYPHVSFERVCAGPGMEIIYRALAARDKKRIAANVDTADIVERAHAGDALALEAVECFCAILGTFAGNLAVTLGALGGIYIGGGVVPKLGELFMRSPFRARFEAKGRFEAYLANIPTYLITAEYPAFLGVSAILAEQLSNRTGGASSAVFERIRQMRDALTPAERRVADLALNHPRSIINDPIVDIARKADVSQPTVIRFCRSLGCQGLSDFKLKLATGLTGTIPMSHSQVHLGDTATDFGAKVLDNTVSAILQLREHLNFEHVEQAIDILNNARRIEFYGLGNSNIVAQDAHYKFFRFGIPTIAYGDLYMQAASAALLGKGDVIVAVSKSGRAPELLRVLDVAMQAGAKVIAITSSNTPLAKRATVALETDHIEMRESQLSMISRILHLVMIDILAVGVAIRRAAPNAELAEAMARAKARAGASAGDEAADVLDWLSHGAAPAAKD

SEQ ID NO: 50002 - DNA, 993 bp, Methylococcus capsulatus str. Bath
  CDS (1)..(993): transl_table=11
gtgctgctggcgggggacgtcggcgctaccaagacggtcctcgggctgttcgactgctggggcgacaggctggtcagtctgagcgaggcgattttcgccagcacggactatgcctcgctggagacggtggtggcggcgttcctggatgggcaggaggaacggaggcccgaagtcgcctgtttcggggtgccgggaccggtgagcgaaggccgctgcgaaatcaccaacctgccgtgggttctgtccgagcgggaacttgcggcggcgacgggggtgagtgcagtgcgcctgctgaacgacgtccaggccatggccctgggcatggcttaccggttgggcgaggacgattgggtggagctgaaccccggcgccggccgtccgcgatccggaaacgtcgcggtgatcgccgcggggacgggattgggcgaggccatcctgtattgggatggcgagcgctaccatgcgctgccgaccgaaggcggacacagcgatttcgcccccaacggaccgctggaagaagggttgctcgccttcctgcgggatcgcttctgcgggcatgtcagctacgagcggatactgtctggttcggggctggccaatctctacgactatctgcgtcacgccggcgtggcgccggaaagcgaggcactgcacgccgccctggccagcgctcccgaccgtgccccgatcatcgccgagtgggcactggaacggcgtgacgccctttgcaccgcggtgctcgatctcttcgcggcaatctacggggcggaagccgggaatctggccctcaagtcgctcgcgctcggtggcgtgatcctgggcgggggtatcgcgccgaaaatccttccggtcctgcaggcggggaggttcatggccgctttcacggcaaagggaaggctgtcccccctcctggggcggcttcccgtgcgggtcgccatccatccccagccggccctgctgggggcggcgcatgccgcctcggccatgctttga

SEQ ID NO: 50003 - protein, 330 aa, Methylococcus capsulatus str. Bath
MLLAGDVGATKTVLGLFDCWGDRLVSLSEAIFASTDYASLETVVAAFLDGQEERRPEVACFGVPGPVSEGRCEITNLPWVLSERELAAATGVSAVRLLNDVQAMALGMAYRLGEDDWVELNPGAGRPRSGNVAVIAAGTGLGEAILYWDGERYHALPTEGGHSDFAPNGPLEEGLLAFLRDRFCGHVSYERILSGSGLANLYDYLRHAGVAPESEALHAALASAPDRAPIIAEWALERRDALCTAVLDLFAAIYGAEAGNLALKSLALGGVILGGGIAPKILPVLQAGRFMAAFTAKGRLSPLLGRLPVRVAIHPQPALLGAAHAASAML

SEQ ID NO: 50004 - DNA, 1008 bp, Legionella pneumophila str. Lens
  CDS (1)..(1008): transl_table=11
atgaatttttttatgatgcctcatgatttagcgcagtatgctattgttgcggacataggcggtacttttgctcgtttcagtagagttaatcttgtcaatttgcagatggataaaattgaagtttctccttgtgccgagtttattagtcttgagtccgcgctattaacttataaaaaccggcattctttacaagaaataaaacatattgcaatagcgattgcgtgtccggtcatcgatgatttggtttctatgacgaattgtcattggcaattttcaataacagagttaaaacagagacttggccttgaagttctggaagtcatgaatgattttactgcgattgcgatgagtttacctgtattatcgactcaggatctggtgcagattggtaatggttacctggatgccagtaaagtgaaagtggtgttaggcgcagggaccggtttgggtgttgcttatttaattcctcatcaacatcactatagtgcttttgcaggggaaggggggcatgctgattggggagcaaaaactgagcaggaatggtttatctatcgttatttaaaaagtaaatactcccatgtatcttatgagcgcttgctgtctggccaaggactggaaaatttatatcaagctttagccgcgtatcatagtaaaaaagttgaatttttgtcagcagcgcaaattatatctttagcattaaatcaggaatgtttcatagctcataaggcagtagcccaatttttttcaagtttgggatcgtttgctggtgatttagcattaacttatggagcttttggtggtgtttatattgcaggagggattatgccgcgtttgctctccttggtacaccaaagcgactttagaatccaatttgaagacaaaggacgatttagtgattttaatgccttaattcccacttatgtcattgcagcctctcaaccaggtattttaggcgcgagcgtcagtttaaaacaaatattgacaggagcttctcatgtccatttctga

SEQ ID NO: 50005 - protein, 335 aa, Legionella pneumophila str. Lens
MNFFMMPHDLAQYAIVADIGGTFARFSRVNLVNLQMDKIEVSPCAEFISLESALLTYKNRHSLQEIKHIAIAIACPVIDDLVSMTNCHWQFSITELKQRLGLEVLEVMNDFTAIAMSLPVLSTQDLVQIGNGYLDASKVKVVLGAGTGLGVAYLIPHQHHYSAFAGEGGHADWGAKTEQEWFIYRYLKSKYSHVSYERLLSGQGLENLYQALAAYHSKKVEFLSAAQIISLALNQECFIAHKAVAQFFSSLGSFAGDLALTYGAFGGVYIAGGIMPRLLSLVHQSDFRIQFEDKGRFSDFNALIPTYVIAASQPGILGASVSLKQILTGASHVHF

SEQ ID NO: 50006 - DNA, 996 bp, Azoarcus sp. EbN1
  CDS (1)..(996): transl_table=11
atgcccactggctgctccgacacctacccccggctgatcggcgacatcggcggcacgcacgcccgctttgccgtcatcgactcgccgggcagcccgccgacgcgctttcgcacgctgtgctgtgacgatcacgccggactcctggaggccgtccaggcttacctgctgctggaacggggacttgccgggccgcgtgtcgccgcgttcggcatcgcgaatcccgtcgagggcgatcgggtacggatgacgaatcacgactggtcgttttcgatcgagcagctgcgcatcgagctcgggctcgcgcggctcgtggtcctcaacgacttcaccgcgctcgcgctgtcgctgccccgactgcaggccggtgaacggcgtcagatcggcggcggcaacgagtgcgccgggcggccggtcgcgctgatcggaccgggcaccggtctcggcgtgtcggggctggtgcgctgcggcaacggctacgcgccgctcgaaggcgaaggcggccacgtcacgctggcggcgtccacgccacgcgaagcggagctcatcgcagtgctcgccgcgcgcttcgaccacgtgtcggccgagcgggcgctgtcgggaccggggctgatcgccctgcacgacgcgatccggcagctcgcgggcgccccgccgctggccctcgaagcggacgagatcagcgcccgggcgatggccgcgagctgtccatggtgcgccgaggcgctgcaggtcttctgcgggatgctcggcagcgtcgccggcgacctcgcgctgacgctgggcgcattcggcggcgtgtatatcggggggggaatcgtgccgaagctcggcgacttcttcgatcgatcggatttccgccggcgcttcgaacagaaaggacggttttccgaatacctcgcgcgcatcccctgttacgtcatcctcgccgaatatcctgcgctgctcggcgccgcgacggcgctcgacaacgcgctcgccggcgaaacgggcacctga

SEQ ID NO: 50007 - protein, 331 aa, Azoarcus sp. EbN1
MPTGCSDTYPRLIGDIGGTHARFAVIDSPGSPPTRFRTLCCDDHAGLLEAVQAYLLLERGLAGPRVAAFGIANPVEGDRVRMTNHDWSFSIEQLRIELGLARLVVLNDFTALALSLPRLQAGERRQIGGGNECAGRPVALIGPGTGLGVSGLVRCGNGYAPLEGEGGHVTLAASTPREAELIAVLAARFDHVSAERALSGPGLIALHDAIRQLAGAPPLALEADEISARAMAASCPWCAEALQVFCGMLGSVAGDLALTLGAFGGVYIGGGIVPKLGDFFDRSDFRRRFEQKGRFSEYLARIPCYVILAEYPALLGAATALDNALAGETGT

SEQ ID NO: 50008 - DNA, 924 bp, Silicibacter pomeroyi DSS-3
  CDS (1)..(924): transl_table=11
atgaccgtcctggtggcagatgtggggggcaccaatacccgcgtcgcgctggccagcgccgggcagctggtgcatctggcccggttcgccaacgatgcctatggctctttcgccgaggtgctgacggcctatgcgcggggcagggacctgccgggtctgcgcggcgtctgtgtcgcggtggcgggcccggtggcgaatgggcgcgccgagctgaccaaccggaactggcatttcgatacggcagagctggccgcgccgctgccagggcagggcgatgttgcggcgcggctgatcaacgatctggtggcgctgggccatgccttgccggggctgacggcagcgcagcttgacgtgatccgcgcgggcgccgtacagccttcgaacgatcaggcgctggtggccgggctgggcaccggtttcaacacctgcctgctcaagggtggcgcggtggtcgaggcggaactgggccatgccagcctgccgctggccatcgccgaggaactgcgcgcgcagcttggcgacgcggcgggcgggtttcgcaccaacgaatgcctgttctcgggccggggcctgtcgcggctgcatgccatcctgtccggtcaggaccggcgcggacaggacatcctggcggattatgcaattggcgaggacccgcaggccgccgccacggtgactctgaccgcgcggctcttgggtctgttcgcccgcgaactggtgtttcagtacctgccgtttcgcggcatccactttgccggcggggccgcgcgcggcatcctcggctcggcggcgcgcgccgaattcctgtcggccttcgaggccgatgggcggtttgccgaccatctggaccgggtaccggtgcggctgatcgccgacgatgccgcagcgctcagcggcgcagcgcgactgatggaggaatgcgcatga

SEQ ID NO: 50009 - protein, 307 aa, Silicibacter pomeroyi DSS-3
MTVLVADVGGTNTRVALASAGQLVHLARFANDAYGSFAEVLTAYARGRDLPGLRGVCVAVAGPVANGRAELTNRNWHFDTAELAAPLPGQGDVAARLINDLVALGHALPGLTAAQLDVIRAGAVQPSNDQALVAGLGTGFNTCLLKGGAVVEAELGHASLPLAIAEELRAQLGDAAGGFRTNECLFSGRGLSRLHAILSGQDRRGQDILADYAIGEDPQAAATVTLTARLLGLFARELVFQYLPFRGIHFAGGAARGILGSAARAEFLSAFEADGRFADHLDRVPVRLIADDAAALSGAARLMEECA

SEQ ID NO: 50010 - DNA, 1038 bp, Synechococcus elongatus PCC 6301
  CDS (1)..(1038): transl_table=11
atgaccttgctattggccggggatatcggcggaaccaaaacgaatttaatgttggcgatcgcctctgattgcgatcgtttagaaccgctccatcaggccagttttgccagtgcggcctaccctgatttagtgccgatggtgcaggagtttttggctgccgcaccctccgccgaggtgcgatcgccagttgtggcttgttttggcattgccggccccgttgtccatggaaccgcgaagctgacgaacctgccttggcagctctctgaagcgcggctggcgaaggaattgggcattgcgcaggtggcgttgatcaatgattttgctgcgatcgcctacggcctacccggcttgaccgccgaagatcaagtcgttgtgcaagtcggtgaagccgatccggcggctccgatcgccattctgggggcaggaactggcttgggcgaaggcttcatcattcccacagcccaaggccgccaagtgtttggcagcgaaggttctcacgctgactttgcgccgcaaaccgaactggagtccgagttactgcattttctacgcaatttttacgcaatcgagcatatctcggtcgagcgagtggtctccggccaagggattgcagccatctacgccttcctgcgcgatcgccatcccgaccaagaaaatccagcccttggggcgattgcctcggcttggcaaacgggcggcgaccaagcccctgatctggcagcagccgtatcccaagcagccttgagcgatcgcgatccgctggccctacaagccatgcagatatttgtcagtgcttacggggcggaagccggcaacctcgcgttgaaattgctctcctacggcggggtctacgtcgccggcgggattgcgggcaaaatcctgccgctcttgactgatggcacttttctgcaagccttccaagccaagggacgggtgaaggggctgctgacgcggatgcctatcacgatcgtcacgaaccacgaagtcgggctgatcggggctggactgcgggcggctgcgatcgctactcaaccatga

SEQ ID NO: 50011 - protein, 345 aa, Synechococcus elongatus PCC 6301
MTLLLAGDIGGTKTNLMLAIASDCDRLEPLHQASFASAAYPDLVPMVQEFLAAAPSAEVRSPVVACFGIAGPVVHGTAKLTNLPWQLSEARLAKELGIAQVALINDFAAIAYGLPGLTAEDQVVVQVGEADPAAPIAILGAGTGLGEGFIIPTAQGRQVFGSEGSHADFAPQTELESELLHFLRNFYAIEHISVERVVSGQGIAAIYAFLRDRHPDQENPALGAIASAWQTGGDQAPDLAAAVSQAALSDRDPLALQAMQIFVSAYGAEAGNLALKLLSYGGVYVAGGIAGKILPLLTDGTFLQAFQAKGRVKGLLTRMPITIVTNHEVGLIGAGLRAAAIATQP

SEQ ID NO: 50012 - DNA, 969 bp, Gluconobacter oxydans 621H
  CDS (1)..(969): transl_table=11
atgagggaaatcgtagccgtcgatatcggtggaacgcacgcacggtttgcaatcgcgaccatcgaggatggcaaggtcgtctcactgggtgaggccacgacgctgaaatgcgcggaacatggcagtctggccttggcctgggaaacattcggccgttccctgaaccggacgcttccacgcgaagccggcattgccgtagcctgtccggtaagcggcgagatcctcaagctgaccaacaatccttggatcatccagccgagccagctcggcgcgcgcctgcatctcgacaatttcgtactcgtcaacgatttcggagccgtggctcacgccgtagcccaggtcgattcctcgcacatgaaacatctctgcggaccggacatcgaccttccgacggaaggcgccatcacgatcgtcggcccgggcacaggactgggtgcagcctgcctgcttcgccgcagtgaccgctattttgtcatggaaaccgaaggcggccatctggactatccgccgctcgacgaactcgaagacaagatcctcagcgccctgcgtctgcgttttcgccgcgtctctgccgagcggatcgtctccggaccgggcctgaccaatctgtacgaagtcattgccgagatgcagggctggcccatcaccctgcgtgataaccgcaccttgtggaaaaacgccctcgatggctccgatacggtcgccgtggctgccctggaacgcttctgcctcagcctgggcgccatttccggcgatctggcgctggcacatggcgcacgcggcgtcgtcatcggtggtggtctgggactgcgtctcgccgacagcctcggccattccggattcgccgaacgcttcgtcgcaaagggccgcttcgaggcgatgatgaccgaaatgccggtcaagatcatcacacatccacagcccggcctgttcggcgctgcggcagcatacgcggaagcgcatccgtaa

SEQ ID NO: 50013 - protein, 322 aa, Gluconobacter oxydans 621H
MREIVAVDIGGTHARFAIATIEDGKVVSLGEATTLKCAEHGSLALAWETFGRSLNRTLPREAGIAVACPVSGEILKLTNNPWIIQPSQLGARLHLDNFVLVNDFGAVAHAVAQVDSSHMKHLCGPDIDLPTEGAITIVGPGTGLGAACLLRRSDRYFVMETEGGHLDYPPLDELEDKILSALRLRFRRVSAERIVSGPGLTNLYEVIAEMQGWPITLRDNRTLWKNALDGSDTVAVAALERFCLSLGAISGDLALAHGARGVVIGGGLGLRLADSLGHSGFAERFVAKGRFEAMMTEMPVKIITHPQPGLFGAAAAYAEAHP

SEQ ID NO: 50014 - DNA, 1101 bp, Xanthomonas oryzae pv. oryzae KACC10331
  CDS (1)..(1101): transl_table=11
ttgctgacaacgttgtctaccccgtttgccgttcgtcggacaacgggcgacgacgccaggcgtcgccacagatcaggagaatgcgtgagcgcaagcagtccaatggaagcggtggcctttccgcgccccgaaaccttcgttgccgccgatgtgggcgggacgcacgtgcgcctggcgctggtgtgcgaaagcaatgacgcaggcaagccagtcactgtgctggactatcgcaagtaccgttgcgccgagtatccgggtcttgccgagatcatggccgccttcttcgcggaggtgggctgcgcgccggtgcgccgtggcgtgatcgccagcgccggttacgcattggacgacggcagcgtgatcaccgccaatctgccctgggtgctggcccccgaacagattcgccgccagctgggcatgcaggccttgtatctggtcaacgatttcgaagcggtcgcctacgcggccaattacatgagcggcaaccaggtcatgcagttgtcgggccccgcgcaaggcgccgcgggcccggcgttggtgctcggtccggggacgggcctgggtgcggcgctgtggattccccacggtgcccacccggtagtgctgccgaccgaggctggccacgcggccctggcacctgccagcgatctggaagtggaactgctgcaggaactgcggcgcacgcgtacccacgtgtgcaccgagacgctgttgtccggcccgggcctgttgaatctgtacaccgcgctgggcgcactgcgcggcgacgctgtgctgcatgccaaccccgccgagatcaccgctgccgcattggctggcaacgatgcactggcgcacgatgccttgcaggcgttctgcgggttcatgggcagcgtggtcggcgacctgatgctgctgtatggcgtgcgtagcggtgtctatctggctggcggcttcctgccgcagatcgccggctttatcgctgaaagcgatttcgtcgcacgcctgctcgacaagggcgcgttgcgtccggcgctggaacaggtgccggtgagcatcgtcgagcacggccagctcggcgtcatcggtgcggccagctggtttctgctgcacggccgctga

SEQ ID NO: 50015 - protein, 366 aa, Xanthomonas oryzae pv. oryzae KACC10331
MLTTLSTPFAVRRTTGDDARRRHRSGECVSASSPMEAVAFPRPETFVAADVGGTHVRLALVCESNDAGKPVTVLDYRKYRCAEYPGLAEIMAAFFAEVGCAPVRRGVIASAGYALDDGSVITANLPWVLAPEQIRRQLGMQALYLVNDFEAVAYAANYMSGNQVMQLSGPAQGAAGPALVLGPGTGLGAALWIPHGAHPVVLPTEAGHAALAPASDLEVELLQELRRTRTHVCTETLLSGPGLLNLYTALGALRGDAVLHANPAEITAAALAGNDALAHDALQAFCGFMGSVVGDLMLLYGVRSGVYLAGGFLPQIAGFIAESDFVARLLDKGALRPALEQVPVSIVEHGQLGVIGAASWFLLHGR

SEQ ID NO: 50016 - DNA, 987 bp, Neisseria gonorrhoeae FA 1090
  CDS (1)..(987): transl_table=11
atgtcttctacgccgaataaacacgccgattacccgaggctggttgccgacatcggcggcacaaacgcccgtttcgcattggaaaccgcgccgtgcgtgattgagaaagtcgccgtcctgccgtgtaaggaatacgacacggttaccgacgcggtgcgtgcctatctgaaccaaagtggtgcaacgggcgtacggcacgcggcatttgccatcgccaacccgattttgggcgactgggtgcagatgaccaaccaccattgggcgttttccatcgaaaccacccgtcaggctttggggctggacaccctcatccttttgaacgactttaccgcgcaggcattggcggtaacgcagacttcaagcaaagacctgatgcaggtaggcgggcaaaagcctgtcgaattcgcccccaaggccgttatcggccccggtaccggcttgggcgtgagcggattggtgcacagccccgcaggctgggtggcgttggcgggcgagggcgggcataccagtttcccgccgtttgacgatatggaagtgttgatttggcagtacgccaaaaacaaataccgccacgtttccgccgaacgtttcctcagcggcgcaggtttgagcctgatttatgaaacgctggcggtcaagcagaaagccgaaccggcaaaactgatgccgtctgaaattaccgaaaaggcattaaattgcgaatcgcccctgtgccggcaggcattggacattttctgcgcgatgctgggcacggtcgcttccaacctcgccctgactttgggcgcgcgcgggggcgtgtatttgtgcggcggcattatcccgcgaatgttggattacttcaaaacctcccccttccgcagccgctttgaaaacaaagggcgttttgaagcctaccttgccgcgattcccgtttatgtcgtcttgagcgaatttccgggtattgccggcgcggcggcggcgctcggcaaccacctgaaaaacgtctaa

SEQ ID NO: 50017 - protein, 328 aa, Neisseria gonorrhoeae FA 1090
MSSTPNKHADYPRLVADIGGTNARFALETAPCVIEKVAVLPCKEYDTVTDAVRAYLNQSGATGVRHAAFAIANPILGDWVQMTNHHWAFSIETTRQALGLDTLILLNDFTAQALAVTQTSSKDLMQVGGQKPVEFAPKAVIGPGTGLGVSGLVHSPAGWVALAGEGGHTSFPPFDDMEVLIWQYAKNKYRHVSAERFLSGAGLSLIYETLAVKQKAEPAKLMPSEITEKALNCESPLCRQALDIFCAMLGTVASNLALTLGARGGVYLCGGIIPRMLDYFKTSPFRSRFENKGRFEAYLAAIPVYVVLSEFPGIAGAAAALGNHLKNV

SEQ ID NO: 50018 - DNA, 966 bp, Salmonella enterica subsp. enterica serovar Choleraesuis str
  CDS (1)..(966): transl_table=11
atgacaaagtatgctttagtaggagatgtaggcggcacgaatgcgcgtcttgccctgtgtgatatcgccagtggagaaatctcgcaggccaaaacgtattccggcctggattatcccagtcttgaggccgtggtgcgcgtttatctcgatgagcatagcgtcagcgtggaagatggttgtatcgccatagcctgcccgattaccggtgactgggtagcgatgactaaccatacctgggctttttctattgcggaaatgaaaaaaaatctcggctttagccatctggaaatcatcaacgatttcaccgccgtgtcgatggcgatcccgatgctgaaaaaagagcatttaattcagttcggcggcggcgaaccggtagacggcaaacctattgcggtgtatggcgcgggaaccggcttgggcgtggcgcatctggtgcatgtggataagcgttggattagccttccgggcgaaggcgggcatgtcgattttgcgcctaatagcgaagaagaagctatgattctggaaatattgcgcgccgaaattggccacgtttccgccgagcgcgtgctgtctggcccggggctggtgaatctttaccgggcgattgttaagtccgacaaccgtttgccggagaatctgcgcccgaaagatattaccgaacgcgccctggcggataactgtatcgattgtcgccgcgcgttgtcgctcttttgcgtcatcatggggcgatttggcggcgatctggcgttaaccatggggacatttggcggcgtttatatcgctggcggtattgtcccgcgcttcctggaattttttaaagcgtctggcttccgtgggggctttgaagataaaggccgctttaaagattatgtacacggtattccggtctatctgattgtccatgataaccccggcttgttaggctccggcgcgcatctgcgccagacattaggtcatattctataa

SEQ ID NO: 50019 - protein, 321 aa, Salmonella enterica subsp. enterica serovar Choleraesuis str
MTKYALVGDVGGTNARLALCDIASGEISQAKTYSGLDYPSLEAVVRVYLDEHSVSVEDGCIAIACPITGDWVAMTNHTWAFSIAEMKKNLGFSHLEIINDFTAVSMAIPMLKKEHLIQFGGGEPVDGKPIAVYGAGTGLGVAHLVHVDKRWISLPGEGGHVDFAPNSEEEAMILEILRAEIGHVSAERVLSGPGLVNLYRAIVKSDNRLPENLRPKDITERALADNCIDCRRALSLFCVIMGRFGGDLALTMGTFGGVYIAGGIVPRFLEFFKASGFRGGFEDKGRFKDYVHGIPVYLIVHDNPGLLGSGAHLRQTLGHIL

SEQ ID NO: 50020 - DNA, 966 bp, Pseudomonas syringae pv. syringae B728a
  CDS (1)..(966)
atgaagttggccctggtcggtgatataggcggtaccaatgcacgttttgccatttgggaaaacagcacgctgcattctgtccgggtattcccgaccattgactacgcgggtccggagaaggccatcgaagtctatctgcaagacctggagctgcagcgcggcgatatcggtcatgtatgcctggcggtcgccggaccggtcgacggtgatttttttcagttcaccaacagccactggcaattgagccgcgaggcgttctgcgccgacctgcaggtcgatgaactgctgttgatcaacgacttcaccgccatggcgctgggcatgacccggctcaaggacgatgaatacctgacggtctgccacggtgtcggcaagcctgaccgcccgcgcgtggtggtggggccggggaccgggctgggcgtcggtacgctgatcaaactcgaaggcagtcgctggatggcgttgccgggcgagggcgggcatgccgatctgcccatcgggactgcgcgcgaggcgctgctgtggacacggctgatggccgagcacgagcatgtcagcgccgaggtcgttctcagcggtgccggcttgctgttgctgtatcaggtcagttgcgcgctggacgatatcgaaccggtgctcaaatcgcctgcggcgatcaccaccgccgcgctctcgggcgacccggtagccgcggcagtcctggagcaattctgcgtgtttctcggcagagtggtcggcaaccatgtgctggccctgggcagcctcggcggggtttatatcgtcggtggcgtggtgcctcgttttactgagttcttcatcaacagcgggttcaagcgcgccatggccgagaagggcgtcatgagcgactatttcaaaggtctgccggtgtggctggtaacggccgaataccctggcctcatggggtcgggcgtggccctgcaacaggcgtttggtgcgcagatctga

SEQ ID NO: 50021 - protein, 321 aa, Pseudomonas syringae pv. syringae B728a
MKLALVGDIGGTNARFAIWENSTLHSVRVFPTIDYAGPEKAIEVYLQDLELQRGDIGHVCLAVAGPVDGDFFQFTNSHWQLSREAFCADLQVDELLLINDFTAMALGMTRLKDDEYLTVCHGVGKPDRPRVVVGPGTGLGVGTLIKLEGSRWMALPGEGGHADLPIGTAREALLWTRLMAEHEHVSAEVVLSGAGLLLLYQVSCALDDIEPVLKSPAAITTAALSGDPVAAAVLEQFCVFLGRVVGNHVLALGSLGGVYIVGGVVPRFTEFFINSGFKRAMAEKGVMSDYFKGLPVWLVTAEYPGLMGSGVALQQAFGAQI

SEQ ID NO: 50022 - DNA, 954 bp, Rhodobacter sphaeroides 2.4.1
  CDS (1)..(954)
atggccgacgcgcccctttgcctcgtcgccgacatcggtggcacgaacacccgcgtggcgctggcggagggatcccggctgcggcccgaaacgacgcgccgcttccggaatgccgattatcctgctctggcgccggtcctgcgcgacttcctctccgtcgccggcagccccgagatcgacggcacctgcgtggccgccgcgggcccggtccgggacggggtggcccttctcacgaacctcgcctggaccgtcgacggcgccgaactgcagcgcgcgaccggcgcgccgcgcgtggcggtgctgaacgatcttcaggcgcagggccatgcgctgggccatctggatccggccaatctgcgcgtcctgatcccggggcctactccccgccgcgggggcccgatgctcgtcgtgggcgtcggcaccggcttcaacgcggcgcccgtccacgatgtcgcgggcctgcgcctggtggcggcctccgagtgcggccatgccgggatgcccgtccgcaccgcgcgcgacctccggctcgcggaattcgtccagacggcccacggtttcgccggcgtcgaggatgtgctgtcgggccgcggtctcgagcggctctatgccttcaccgccgctgaggccggcctcgaggaccgcaagtcggcggccgagatcatggcggccatcgccgaacccggcccggcgcgcgccgcggccgagctcttcgcccggctcctcggcgccgaggcgggcaatctcgccctgatccacctgcccttcggcggcctctatctctgcggcggcgtggcccgggccttcgccgcccatctgggcccgatgggctttgccgagaacttccgcgacaagggccgcttctcggccttcatggacgatttcccggtctgcatcgtcgaggacgattacgcggccctcaccggctgcgcagcctacctcgccaccctctga

SEQ ID NO: 50023 - protein, 317 aa, Rhodobacter sphaeroides 2.4.1
MADAPLCLVADIGGTNTRVALAEGSRLRPETTRRFRNADYPALAPVLRDFLSVAGSPEIDGTCVAAAGPVRDGVALLTNLAWTVDGAELQRATGAPRVAVLNDLQAQGHALGHLDPANLRVLIPGPTPRRGGPMLVVGVGTGFNAAPVHDVAGLRLVAASECGHAGMPVRTARDLRLAEFVQTAHGFAGVEDVLSGRGLERLYAFTAAEAGLEDRKSAAEIMAAIAEPGPARAAAELFARLLGAEAGNLALIHLPFGGLYLCGGVARAFAAHLGPMGFAENFRDKGRFSAFMDDFPVCIVEDDYAALTGCAAYLATL

SEQ ID NO: 50024 - DNA, 1005 bp, Xylella fastidiosa Dixon
  CDS (1)..(1005)
atgattccgacccctacccgagatgcacccaatatcccgtcctttcttgccgccgatgtcggcggcactcacgtgcgcgtcagcgtggttgcagccgcgcccacgtgtgctagtccaccgcaactgtttgatgtgcgcacttaccgctgcgctgactatcccagcctcagcacaattctgaacgacttcctcggtacaagatcagcagtacgtgattgcgtcatcgccagtgccggttttcagcgcagcgatggtactgttatcactaccaacctaccgtggccgctatcaccacaccggctacgcgcagatctcaatctggcagaggtctctctggtcaacgactttgaggcgctggcctacgccacggaggatatggaggctgcgcaattgctgcacctcactggtccagccaaagcgcaggatgggccacgcctgttgctcggtccgggaaccggcctgggtgcagcactctggattcccaataacggacgccccattgtcctccccacggaagccggtcaagcagcattgccgagtacaactgaacttgaaatgcaactggtacgacacatgctgaacaaccgcacacatgtgccgattgagcatgccttatctgggccaggaatactcaatgtgtaccgcgccttgtgtgcgctacagtccgtcctcccccagcacgcgagcccagatgcgatcagtcacgctgcggcagcaggaacagacatgctgtcatcacagactctagaggtgttctgcgacttcctcggcagcatcgttggtgatttggtcatgatgtacggtgcacaggggggtgtctatctggccggaggaatcctgccacagctgcgtgagccgctgctacgcagtcactttgtcgaacgcttcctcaataaaggccccatgggtgaggcattacagcacgtcccggtgcggctgatcgaacatggacaactcggtatcgtaggtgcggcacgctggtacttaaataagaaagcaacttaa

SEQ ID NO: 50025 - protein, 334 aa, Xylella fastidiosa Dixon
MIPTPTRDAPNIPSFLAADVGGTHVRVSVVAAAPTCASPPQLFDVRTYRCADYPSLSTILNDFLGTRSAVRDCVIASAGFQRSDGTVITTNLPWPLSPHRLRADLNLAEVSLVNDFEALAYATEDMEAAQLLHLTGPAKAQDGPRLLLGPGTGLGAALWIPNNGRPIVLPTEAGQAALPSTTELEMQLVRHMLNNRTHVPIEHALSGPGILNVYRALCALQSVLPQHASPDAISHAAAAGTDMLSSQTLEVFCDFLGSIVGDLVMMYGAQGGVYLAGGILPQLREPLLRSHFVERFLNKGPMGEALQHVPVRLIEHGQLGIVGAARWYLNKKAT

SEQ ID NO: 50026 - DNA, 1005 bp, Xylella fastidiosa Ann-1
  CDS (1)..(1005)
atgattccgacccctacccgagatgcacccaatatcccgtcctttcttgccgccgatgtcggcggcactcacgtgcgcgtcagcgtggttgcagccgcgcccacgtgtgctagtccaccgcaactgttcgatgtgcgcacttaccgctgcgctgactatcccagcctcagcacaattctgaacgacttcctcggtacaagatcagcagtacgtgattgcgtcatcgccagtgccggttttcagcgcagcgatggtactgttatcactaccaacctaccgtggccgctatcaccacaccggctacgcgcagatctcaatctggcagaggtctgtctggtcaacgactttgaggcgctggcctacgccacgcaggatatggaggctgcgcaattgctgcacctgactggtccagccaaagcgcaagatgggccacgcctgttgctcggtccgggaaccggcctgggtgcagcactctggattcccaataacggacgccccattgtcctccccacggaagccggtcaagcagcattgccgagtacaactgaacttgaaatgcaactggtacgacacatgctgaacaaccgcacacatgtgccgattgagcatgccttatctgggccaggaatactcaatgtgtaccgcgccttgtgtgcgctacagtccgtcctcccccagcacgcgagcccagatgcgatcagtcacgctgcggcagcaggaacagacatgctgtcatcacagactctagaggtgttctgcgacttcctcggcagcatcgttggtgatttggtcatgatgtacggcgcacaggggggtgtctatctggccggaggaatcctgccacagctgcgtgagccgctgctacgcagtcactttgtcgaacgcttcctcaataaaggccccatgggtgaggcattacagcacgtcccggtgcggctgatcgaacatgggcaactcggtatcgtaggtgcagcacgctggtacttaaataaaaaagcaacttaa

SEQ ID NO: 50027 - protein, 334 aa, Xylella fastidiosa Ann-1
MIPTPTRDAPNIPSFLAADVGGTHVRVSVVAAAPTCASPPQLFDVRTYRCADYPSLSTILNDFLGTRSAVRDCVIASAGFQRSDGTVITTNLPWPLSPHRLRADLNLAEVCLVNDFEALAYATQDMEAAQLLHLTGPAKAQDGPRLLLGPGTGLGAALWIPNNGRPIVLPTEAGQAALPSTTELEMQLVRHMLNNRTHVPIEHALSGPGILNVYRALCALQSVLPQHASPDAISHAAAAGTDMLSSQTLEVFCDFLGSIVGDLVMMYGAQGGVYLAGGILPQLREPLLRSHFVERFLNKGPMGEALQHVPVRLIEHGQLGIVGAARWYLNKKAT

SEQ ID NO: 50028 - DNA, 990 bp, Magnetospirillum magnetotacticum MS-1
  CDS (1)..(990)
atgagcgggagtgcatcaggatttgtcctggtcgccgatatcggtggcacacatgcccgcttcgccctggtgggcgaggacggggaggcggtcaatcctgtcgtgttgcgctgcgccgattacgacggcccggctccggccatcaaggcctatctttccgatcagggcgcgggcgccgcacccagacgcggtgctttcgccgtggcctcggtcattgacggcgatcgtatcgaactgaccaattcgccttggcgcttttccatctccgagacccaaagggccgtggggctggagcggctggaggtggtcaacgacttcaccgccgtggccctgtcggtacgccatctgaagcctgaacatctgttgaccatcggcggcggcgcggcgcaagcgggtctgcccattgccgtgctggggccgggaacggggctgggggtgtcggccttgattcctggcgaatccggtcggtggacagccctggccaccgagggcggacacgtcaccatggccgccgccagcgagcgcgaggcccgcatcctcgaccgcttgcgcacccagttcgaccatgtttccgccgagcgggtcctgtcgggccaggggctggtcaacctctatcaggcggtcgccgccctgtcggggcatcaggcggtgttctccacccccgacgtcatcaccaagcgcgggctggacggatcgtgtcccatcagccgcgaggcggtggagacattcttcgccatgatggggactgtggccggaaatctggctctgtctctgggggccaagggcggcgtgttcatcgcgggcggcatcctgccgcgcatggccgatgccttccgcgcctcctccttcaggacccgcttcgaggcccatgggcgtttccagccctatctggccgccatccccacctggctgatcacccatccgctgcccgcctttgttggacttgcggggttgatccggccaaaggccgaccatcggactttggcctag

SEQ ID NO: 50029 - protein, 329 aa, Magnetospirillum magnetotacticum MS-1
MSGSASGFVLVADIGGTHARFALVGEDGEAVNPVVLRCADYDGPAPAIKAYLSDQGAGAAPRRGAFAVASVIDGDRIELTNSPWRFSISETQRAVGLERLEVVNDFTAVALSVRHLKPEHLLTIGGGAAQAGLPIAVLGPGTGLGVSALIPGESGRWTALATEGGHVTMAAASEREARILDRLRTQFDHVSAERVLSGQGLVNLYQAVAALSGHQAVFSTPDVITKRGLDGSCPISREAVETFFAMMGTVAGNLALSLGAKGGVFIAGGILPRMADAFRASSFRTRFEAHGRFQPYLAAIPTWLITHPLPAFVGLAGLIRPKADHRTLA

SEQ ID NO: 50030 - DNA, 1026 bp, Nostoc punctiforme PCC 73102
  CDS (1)..(1026)
atgactttattactagcaggagacatcggcggtacgaaaactattttgcaattggttgaaacatcagattcacaaggtttacatactatttatcaggaaagttaccacagtgctgattttcccgatttagtacctatagtgcagcagtttttaatcaaagctaatacaccaataccagaaaaggcttgttttgcgatcgcagggcccattgtcaaaaatactgccaaactgaccaatttagcctggttcctagataccgaacgtctacaacaagaattgggtatcccacatatttatttgattaacgacttcgccgccgttggctatggcatttcaggtttacaaaaacaagacttgcacccgttgcaagttgggaaacctcaacccgaaaccccgattggaattattggtgctggtactggcttagggcaaggatttttaattaagcagggaaacaactatcaagtttttccttcagaaggtggacacgctgacttcgcgcctcggaacgagatagagtttcaattgttgaaatacctgctggataaacatgatatccagcgcatttctgtagaacgggtagtttctggaatgggaattgtggcgatttaccaatttttgcgcgatcgcaaatttgccgccgaatcaccagatatcgcccaaatcgtcagaacttgggaacaagaagccggacaggaagagaaaagtgtcgatcccggtgctgctattggtacagctgcactagaaaaacgcgatcgcctttccgaacaaaccttgcaattatttatagaagcttatggtgcagaagccggcaatctcgcccttaaactcctaccttatggtggcttatacattgctggtggaattgcgcctaaaattctccccttaatccaaaatagcggtttcttattaaacttcacccaaaaaggcaggatgcgccccctcctggaagagatacctgtgtatattatcctcaacccacaagtggggctaataggtgctgctttatgtgctgctaggttataa

SEQ ID NO: 50031 - protein, 341 aa, Nostoc punctiforme PCC 73102
MTLLLAGDIGGTKTILQLVETSDSQGLHTIYQESYHSADFPDLVPIVQQFLIKANTPIPEKACFAIAGPIVKNTAKLTNLAWFLDTERLQQELGIPHIYLINDFAAVGYGISGLQKQDLHPLQVGKPQPETPIGIIGAGTGLGQGFLIKQGNNYQVFPSEGGHADFAPRNEIEFQLLKYLLDKHDIQRISVERVVSGMGIVAIYQFLRDRKFAAESPDIAQIVRTWEQEAGQEEKSVDPGAAIGTAALEKRDRLSEQTLQLFIEAYGAEAGNLALKLLPYGGLYIAGGIAPKILPLIQNSGFLLNFTQKGRMRPLLEEIPVYIILNPQVGLIGAALCAARL

SEQ ID NO: 50032 - DNA, 990 bp, Desulfovibrio desulfuricans G20
  CDS (1)..(990)
atggaacgcattctcgcagtggacatagggggaaccaacagccggtttgcggcctttgtgctgcaggctgacggtacgctgaaatttgaagacagcttatggctttccactcagggcgcgcagtcttttccggcgttgctggcagagctggaaaaccgcgggttttcgctgctgccgcgtgatgcggacgtcatggtgctggctgtggcaggtgctgtcgaaaaaaaagggcgctattgcaaaatatccaatgcatcgtgggcggttgatctggatgaagtggcacagacgttcggtatcgcccgcggtcgtctgatcaatgattttgaagcgcaggcttacgcctgcctgtccgaagccgtgcatgacgctgttacggtgcagcacggtgttgcagaggacggcgcccccatagccgtggtgggggggggaaccggactgggcaagtgtctgctggtgtgtgacggggtggggcgttatatcaccgtgccgtcagagggcgggcattcagtctttccttttgtaggcagagaagaactggaatttgcggaatttatactgcgtgagacaggaagaccgcaggttatcggcgatctggtggtcacaggaacaggcctgcggctgctccaccagtttcataccggcgaacggctgtcatcgcgtgaagtaagccgcaagctggaaggcgactccgttgttcttgagtggtttgcccgtttttacggcagagcctgtcacgattatgtgctggaaaccatggcactgggggggctgtatatcgccggcgggcttgcttcgggtaatccgggacttgtcacccaccacgcgtttgtacaggagtttgtgcagagcgatgtgcacgggcatcttttgcgcaaagtgcctgtgcgtctgaaccgcaatgaagaatcgggcctgtggggcgcggccgtgtgcggcgtgcagatgctgagaaccggccgccttgtacgctccgccggcggagcctga

SEQ ID NO: 50033 - protein, 329 aa, Desulfovibrio desulfuricans G20
MERILAVDIGGTNSRFAAFVLQADGTLKFEDSLWLSTQGAQSFPALLAELENRGFSLLPRDADVMVLAVAGAVEKKGRYCKISNASWAVDLDEVAQTFGIARGRLINDFEAQAYACLSEAVHDAVTVQHGVAEDGAPIAVVGGGTGLGKCLLVCDGVGRYITVPSEGGHSVFPFVGREELEFAEFILRETGRPQVIGDLVVTGTGLRLLHQFHTGERLSSREVSRKLEGDSVVLEWFARFYGRACHDYVLETMALGGLYIAGGLASGNPGLVTHHAFVQEFVQSDVHGHLLRKVPVRLNRNEESGLWGAAVCGVQMLRTGRLVRSAGGA

SEQ ID NO: 50034 - DNA, 996 bp, Pseudomonas aeruginosa UCBPP-PA14
  CDS (1)..(996)
atgaataacgacaacaagagaagcgccggcggcctcggcctggtcggcgatatcggcggcaccaatgcgcgtttcgcgctctggcgcgggcagcgcctggaatccatcgaggtgctcgcctgcgccgactacccacggcctgaactggccgtgcgcgactacctggcgcggatcggcgaatcggtggcgaacatcgactcggtctgcctggcctgcgccggtccggttggggcggcggatttccgtttcaccaacaaccactgggtgatcaatcgcgccgcgttccgcgaggagctggggctggatcacctgctgctggtcaacgacttcagcaccatggcctgggccgcctcgcggctgggcgcggacgagctggtgcaggtccgggccggcagcgcccaggcggatcgcgcccggctgatcatcggtcccggcaccggccttggcgtcggcagcctgctgccgctgggcgggggacgttgggaagtgctgccctgcgagggcgggcatgtcgacctgccggtcacttcgccgcgcgacttcgcgctctggcagggcctgcaggcgcgctacggacacgtctccgccgagcgcgcactgtccggcaacggcctgctcgccctctatgaaatcagctgtgccctggacggggtcgccgtccgcgcgagcagtgcggcggaagtcggtgccctggccatggccggcgacgcccaggcggacgccgtgctggagcacttcttcctgtggctggcgcgggtcgccggcaacgcggtgctcaccgtcggcgcgctcggtggcgtctacattaccggcggcatcgtcccgcgtttcctcgagcgcttcatcgccagcggtttcgccgaggccttcgccaggcgtggcaagaccagtggcgcttacctgcaggacgtaccggtgtgggtcatgaccgccgaacatccgggcctgctcggcgccggcgtcgccctgcagcaggccctggacgccgagggctga

SEQ ID NO: 50035 - protein, 331 aa, Pseudomonas aeruginosa UCBPP-PA14
MNNDNKRSAGGLGLVGDIGGTNARFALWRGQRLESIEVLACADYPRPELAVRDYLARIGESVANIDSVCLACAGPVGAADFRFTNNHWVINRAAFREELGLDHLLLVNDFSTMAWAASRLGADELVQVRAGSAQADRARLIIGPGTGLGVGSLLPLGGGRWEVLPCEGGHVDLPVTSPRDFALWQGLQARYGHVSAERALSGNGLLALYEISCALDGVAVRASSAAEVGALAMAGDAQADAVLEHFFLWLARVAGNAVLTVGALGGVYITGGIVPRFLERFIASGFAEAFARRGKTSGAYLQDVPVWVMTAEHPGLLGAGVALQQALDAEG

SEQ ID NO: 50036 - DNA, 930 bp, Dechloromonas aromatica RCB
  CDS (1)..(930)
atgctgctcggcggcgatctcggcggcaccaagacgctgctggcactggccgaagtgattgatggccgcatcgagattgtccgccagcaacgctacgccagcctggattacgccagcttcgacgacctgctggctgaatttatcgccgggcacccggccatcaataccgcctgcttcggcgtcgccggcccaaccgatgggcgccatgccaagctgacctacctgccctggcaactgaccgccagcgagctggagcaaaagttcgccatcggccgcgtctcactgatcaacgattttgccgctgctgcgaacggcctacccttggtcgacgaccaggacatcctgaccctgcacaccggccagcccgaagaacacgccccgcgtgtcattctcggcgccggcactggcctcggcgtggccgggctgatctgggaaagcgaccgttatcgcgtcatccccggcgaaggcggtcacttcggcttctcgccgcaaaccgcacagcaaggcgaactctgggcctggctactggctcaaaacggccgggttactgtcgaagacatcgtttccggccctggcctgtcacggatttttgctttcctttccggtcaaacgcgtgcaccggaggaaatcggacgagccgccctcgccggtatcgatccgtcagccaatgcggcgttacagctctggcttgaatgctatggcgccttcgccggcgacctcgccatgcactggctggcccgaggcggcgtctatctggccggcggcatcgccgccaaactattgcctcacatcgatgccagctccttcacggcagccttcctggccaaacgcgagcacagcgaactggtcaagagcatgcccatccggctgctgaccgtggaagacctcggcctgcgcggcacattggcgcgagccgcccaacaagactga

SEQ ID NO: 50037 - protein, 309 aa, Dechloromonas aromatica RCB
MLLGGDLGGTKTLLALAEVIDGRIEIVRQQRYASLDYASFDDLLAEFIAGHPAINTACFGVAGPTDGRHAKLTYLPWQLTASELEQKFAIGRVSLINDFAAAANGLPLVDDQDILTLHTGQPEEHAPRVILGAGTGLGVAGLIWESDRYRVIPGEGGHFGFSPQTAQQGELWAWLLAQNGRVTVEDIVSGPGLSRIFAFLSGQTRAPEEIGRAALAGIDPSANAALQLWLECYGAFAGDLAMHWLARGGVYLAGGIAAKLLPHIDASSFTAAFLAKREHSELVKSMPIRLLTVEDLGLRGTLARAAQQD

SEQ ID NO: 50038 - DNA, 1029 bp, Anabaena variabilis ATCC 29413
  CDS (1)..(1029)
atgaccttattgttagcaggagatatcggcgggacgaaaactattttgcgattggtagaagtatcaaattcgtcggaactgcacaatatttatgaggaaagttaccagagtggggattttcccgatttagtgccgatggtgcagcaatttttagtcaaggctaatatacctagtcatcccgaaaaggcttgctttgcgatcgccggcccagtggtgaataatactgccaagctgaccaacttagtctggtttttggatactgaacggctagcacaagaattaagtatccccttcatttccctcattaatgattttgctgctgttggctatgggatttttgggttaagtaaacaagatttgttcaccttacaagctggtaaacatcaaactgaagcgcctattgctattattggtgctggtactggattaggacaaggatttttaattaaacagggaaaccagtatcaagttttcccatcggaaggtggacacgctgactttgccccccgcaacgagttagagtttcagttattgaaatatctgctggataaacatgatatccagcgtgtttctgtggaacgggtggtttctggacagggggttgtcgccatttatcaatttttacgcgaccgcaaattagcgatagaatccccagaaattgcccaagttgtccgcacttgggaacaacaagcaggacaggctgaaaaaaccgttgatcctggtgcagctattggtaaagccgcagtccaaggaagcgatcgcctttccgaacaaaccctacaattatttattgatgcctatggcgcagaagcgggaaatcttgccctcaaactcctaccatacggcggtttgtacattgcgggtgggattgcgcctaaagtcttgccattgattgaaaatagcaatttcttgcttaatttcagccaaaaaggcagaatgcgtcctctgctagaagaaatacccgtgcatatcattcttaacccacaagtgggactcataggtgctgctttgtgtgctgctaggttataa

SEQ ID NO: 50039 - protein, 342 aa, Anabaena variabilis ATCC 29413
MTLLLAGDIGGTKTILRLVEVSNSSELHNIYEESYQSGDFPDLVPMVQQFLVKANIPSHPEKACFAIAGPVVNNTAKLTNLVWFLDTERLAQELSIPFISLINDFAAVGYGIFGLSKQDLFTLQAGKHQTEAPIAIIGAGTGLGQGFLIKQGNQYQVFPSEGGHADFAPRNELEFQLLKYLLDKHDIQRVSVERVVSGQGVVAIYQFLRDRKLAIESPEIAQVVRTWEQQAGQAEKTVDPGAAIGKAAVQGSDRLSEQTLQLFIDAYGAEAGNLALKLLPYGGLYIAGGIAPKVLPLIENSNFLLNFSQKGRMRPLLEEIPVHIILNPQVGLIGAALCAARL

SEQ ID NO: 50040 - DNA, 1032 bp, Ralstonia eutropha JMP134
  CDS (1)..(1032)
atgagcaacgccatggctgcttccgccgtgcccgatgacaccgcctatccgcgtttgctggccgacgtgggcgggaccaatgtgcgcttcgcactggaaacggcgccgatgcagatcggcgccgtgaccgcgctgaaggtggccgaccatccgtcgctggaagcggccatgcgccactaccgcgatgcgctgtctgcctcgggtgccaagttgccgcgccatgctgccatcggtctcgcgaatccggtcacgggcgaccacgttcgcctgaccaaccacgactgggccttctcgatcgaagccacgcggcaagcgctcgggctgcagacgctcgtggccatcaacgatttcacgtcgctggcgctgggcttgccttaccttggcgcgaacgatctcgtgcagatccgctccggccaagccgtggccactgcgccgcgtgcgctgatcgggcctggcaccgggttgggcgtgtcggggctggtgcccgcgccgggcggtggcgccgtggcgctggcgggggagggcggccatatcgaactcatgcccgtgaccgacgacgagtggatcgcctggcgcgccacgcacgcgagccttgggcgggtgtcggcggagcggttgttgtcaggcatggggctgtcgcagatccatgccgcgctgtccgcagaaacgggtacgcgcgtggacgtgccgctgacgcccgagcaggtcacgacgggtgccttcgcacggcacgatccgctctgcgagcgcaccatggcggtgttttttggcctgctcggatctgtcgcagcggacatcgcgctggtaatgggcgcgcttggcggcgtgtatctcggtggcggcatcctgccgcgcttcgtgccagcgctgcaggcgtcggccttcaatgcgcgcttcgtcgccaagggccgcatgcgcggctatctcgacaagctgcctgtctacgtgattaccgcgagctatcccgcgctgccgggcctggcgcgcgcgctggccgatacgctcagtcacggccgcccacatatcggataa

SEQ ID NO: 50041 - protein, 343 aa, Ralstonia eutropha JMP134
MSNAMAASAVPDDTAYPRLLADVGGTNVRFALETAPMQIGAVTALKVADHPSLEAAMRHYRDALSASGAKLPRHAAIGLANPVTGDHVRLTNHDWAFSIEATRQALGLQTLVAINDFTSLALGLPYLGANDLVQIRSGQAVATAPRALIGPGTGLGVSGLVPAPGGGAVALAGEGGHIELMPVTDDEWIAWRATHASLGRVSAERLLSGMGLSQIHAALSAETGTRVDVPLTPEQVTTGAFARHDPLCERTMAVFFGLLGSVAADIALVMGALGGVYLGGGILPRFVPALQASAFNARFVAKGRMRGYLDKLPVYVITASYPALPGLARALADTLSHGRPHIG

SEQ ID NO: 50042 - DNA, 975 bp, Rhodospirillum rubrum
  CDS (1)..(975)
atggctgagccgttcattcccggattgatcgccgatatcggcggcaccaacgcccgcttcgccctgaccacccccgagggcggctggcgcgacgaacgggtttaccgctgcgccgcctttcccggcccggccgaggcggcggcccattatctggccgaggtgctgaccgcctttgaaccgcgccccgatcgcggggcgatctgcgtcgcctgtccggtcaacggcgatcatctggctttgaccaaccatggggcgtggtcgttctcgatcagcgcggtcgccgaccgcttgggtttggcgcctttccatgcggtcaatgacttcatcgccaacgccctggccatcccccgccttggcccctccgggctgatcgagatcggcggcggcgccggacttaccggggcgccgatcgccgcaatcggcccgggcaccggtctgggggtggcgatcctcatccccggtcgcggcggcaaccgcaccagccccctggccaccgagggcggccatgtcaccctgcccgccgtgaccgaccgcgaggcggtgatcatcagcgccctgcgcgccattcacggccacgcctcggccgagcgggcgatttccggccccggtctggtttggctgagcgaggcgatccgcgccgccgatggcttggagccggttgccgaaaccccgccctcggtgatggaaaagggcttggcgcgcagctgcccggtttgcgccgaagccgtcgacaccttttacgcgctgctgggcacggtggcgggcaatctggtgctgagcaccggcgcccagggcggcgtttacctgatgggaggtatcctgccccgacacccagaggccttgcgaacctcggccttcctggcgcgcttccacgaaaagggccgcttccgcgattaccttgatgtcgtccccattcgcttggtcacccacccctatccggccttcatcggtctggccgggctggtcagcgattag

SEQ ID NO: 50043 - protein, 324 aa, Rhodospirillum rubrum
MAEPFIPGLIADIGGTNARFALTTPEGGWRDERVYRCAAFPGPAEAAAHYLAEVLTAFEPRPDRGAICVACPVNGDHLALTNHGAWSFSISAVADRLGLAPFHAVNDFIANALAIPRLGPSGLIEIGGGAGLTGAPIAAIGPGTGLGVAILIPGRGGNRTSPLATEGGHVTLPAVTDREAVIISALRAIHGHASAERAISGPGLVWLSEAIRAADGLEPVAETPPSVMEKGLARSCPVCAEAVDTFYALLGTVAGNLVLSTGAQGGVYLMGGILPRHPEALRTSAFLARFHEKGRFRDYLDVVPIRLVTHPYPAFIGLAGLVSD

SEQ ID NO: 50044 - DNA, 969 bp, Novosphingobium aromaticivorans DSM 12444
  CDS (1)..(969)
atgcaggtagttgccgtcgatattggcggaacccacgcccgcttcgcgattgccgaagtcgcggaaggccgcgtggtctcgcttggcgaggccgttacgctcaagacggcggagcatggctcgttccagcttgcctgggaggatttcgagcgcgttcgtggagagccattgcccaaggccgcggctattgccgtcgccgggcctgtcggcggcgagatcatcaagttcacgaacaatccgtggatcatccgcccggcgttgatcccggagaagctgggggcggagcaatatgtcgtcgtcaacgacttcgccgccgtggcccatgctgtcgcgcaggcggaccagagccactttctacacctgagcggcccggacgaaccgctgcccgccagcggcgtgaccagcgtggtcggaccagggacagggctcggcgtggcgcagttgtggcgtgacgggaacaactaccgggtccagcccaccgaaggcgggcacatcgacttcgcgccgctagattcgatcgaggacgcgatccttgccggtctgcgcaagcgccaccgccgcgtttcggcggaacgcgtcgtggccgggccgggcatcgtcgatatctacgaggcgcttgctctgatcgaaggacgaccgtttacaccccggtctgaccgcgagttgtgggaactcgggacttccggagcggacagccttgccgccgctgcagtagacaggttctgcctctcgctcggcagcgtggcaggcgatcttgccctggctcacggcgccaacggcgtcgtcatggccggcgggcttggcctgcggatcaaggacacgctggttcggtctggcttctcggacaggttcagggcaaaagggcggttcgaggccctcatggcggccattccggtcaagctgatcacgcatccgcagcccggcctgttcggtgcggcagcggcctttgcgcaagcgcatacgtcgtga

SEQ ID NO: 50045 - protein, 322 aa, Novosphingobium aromaticivorans DSM 12444
MQVVAVDIGGTHARFAIAEVAEGRVVSLGEAVTLKTAEHGSFQLAWEDFERVRGEPLPKAAAIAVAGPVGGEIIKFTNNPWIIRPALIPEKLGAEQYVVVNDFAAVAHAVAQADQSHFLHLSGPDEPLPASGVTSVVGPGTGLGVAQLWRDGNNYRVQPTEGGHIDFAPLDSIEDAILAGLRKRHRRVSAERVVAGPGIVDIYEALALIEGRPFTPRSDRELWELGTSGADSLAAAAVDRFCLSLGSVAGDLALAHGANGVVMAGGLGLRIKDTLVRSGFSDRFRAKGRFEALMAAIPVKLITHPQPGLFGAAAAFAQAHTS

SEQ ID NO: 50046 - DNA, 960 bp, Microbulbifer degradans 2-40
  CDS (1)..(960)
atgtatccctatatcgttgcagacattggcggcactaacgcgcgttttgctttagtaacaggcaaaaaaggtaatgcgtttaatttagagcagattcaaatattaaacggcagtgaattcccgcgtttgcaggatgcaatgcagcattacattgatacccttggtggtgaaaaaccaaaggctgcttgtgtggctattgccggccccattgatggcgataatgcgcgcatgaccaatttaaattgggagtttagccaagcggcggtgaaggcagagtttgggtttgataaatacgatacccttaacgactttggcgcattggctgtggcaaccagcagcttgcaagccgataacttaatagaaattaaagccggcacaatggacccaaaaggcaacaaggccattttgggccctggcactggtttaggagtggcaggtttggcgtgtgcaggcgatagttggttgcctattcctagtgaaggtggccacgtaaatgttgcgccagcaacgcagttagagtgcgaagttattcgcgcagctatggccgaacacgggcatgtatctgcagaaacgtttatatccggcccaggccttgtgcgtttgtatcgtgcattggctaccgttcgcggtgaaacgccaaaaaactacgagccaaaagatattaccgcaggtgcgctagatggcactgacgacttgtgcaaagaaacgttggatttattttgcagctttatcggttcgctatcaggtaatttggcactaacttacggcgcaaaaggcggggtgtatttagcgggtggtgtgttgccgcgcttcattgattattttaaatctagtgattttgttaagcgcttttctgaaaagggtgtaatgagccactatgtggaaaatattcccgttaatttaattagctacgagtacaccgcatttgttggtgcggctgcctggttggatcaactttaa

SEQ ID NO: 50047 - protein, 319 aa, Microbulbifer degradans 2-40
MYPYIVADIGGTNARFALVTGKKGNAFNLEQIQILNGSEFPRLQDAMQHYIDTLGGEKPKAACVAIAGPIDGDNARMTNLNWEFSQAAVKAEFGFDKYDTLNDFGALAVATSSLQADNLIEIKAGTMDPKGNKAILGPGTGLGVAGLACAGDSWLPIPSEGGHVNVAPATQLECEVIRAAMAEHGHVSAETFISGPGLVRLYRALATVRGETPKNYEPKDITAGALDGTDDLCKETLDLFCSFIGSLSGNLALTYGAKGGVYLAGGVLPRFIDYFKSSDFVKRFSEKGVMSHYVENIPVNLISYEYTAFVGAAAWLDQL

SEQ ID NO: 50048 - DNA, 1056 bp, Trichodesmium erythraeum IMS101
  CDS (1)..(1056)
atgacattgttagttgcaggtgacattggtggtacgaaaactatactacaattggtagaggtaaaccgagaagaatcaaaagcttccgtggaactacgtaaactttatgaaaatcgttacttgagtaacgattttcccgatttagtacctatagtaaaaaagttccttgaagaagctagtgaaaaattaggagaaaaacaaaaacctgaaaaagcttgttttgccattgccggtccagttgtcaacaacatagttaaattgactaatttgccttggataatagatgccaaacttatggaaaatgagttaggtatatctcaaattagtttgattaatgattttgaagcagtaggatatggaattttaggtttaaatactaaggatcttgaaactttacaaccaggtgaacctaaaagtgatactccaatagctgtaattggtgctggtacaggattaggacaatgttttttgattcgagcagcaggggttattaaagtatatcctacagaaggaggtcatacagattttaaggcacgctcacagttagaatttgacctattaaaatatttgaagaaattacataatataaagcgagtctctgtagaaagagtagtttcgggaatgggaattgtcgcaatttatcaatttttacgcgatagcctatttgctacagaatctccagaaataggagatcaaattagacagtgggaaaaagaagtaggttcaaatcaaattactgtagacccaggagcagtgatcggtaaagctgctttagaaaaaagtgaccccttgtgcgagcaaaccttgaagatgtttatagaagcttatggggcagaagcgggaaatttggcactgaaacttttaccctatagtggtttatacatagcagggggtattgctgctaaaattatcccacttataaattcaggtagttttatggaagcttttaaggataaagggcgaatgaaacccttattagaaaaaatacctgttcatgttattttaaatcctcacgtgggattaattggtgcagcaattcgtgcttctaatttatag

SEQ ID NO: 50049 - protein, 351 aa, Trichodesmium erythraeum IMS101
MTLLVAGDIGGTKTILQLVEVNREESKASVELRKLYENRYLSNDFPDLVPIVKKFLEEASEKLGEKQKPEKACFAIAGPVVNNIVKLTNLPWIIDAKLMENELGISQISLINDFEAVGYGILGLNTKDLETLQPGEPKSDTPIAVIGAGTGLGQCFLIRAAGVIKVYPTEGGHTDFKARSQLEFDLLKYLKKLHNIKRVSVERVVSGMGIVAIYQFLRDSLFATESPEIGDQIRQWEKEVGSNQITVDPGAVIGKAALEKSDPLCEQTLKMFIEAYGAEAGNLALKLLPYSGLYIAGGIAAKIIPLINSGSFMEAFKDKGRMKPLLEKIPVHVILNPHVGLIGAAIRASNL

SEQ ID NO: 50050 - DNA, 999 bp, Thiobacillus denitrificans ATCC 25259
  CDS (1)..(999)
atggagtggatcgcaggcgacatcggaggaacgaagagctggctcgtgtggatcgggccgcctggcgacggcctgcacccgcgcttcgagcgcgtctacccgagcgccgacttcgtctcggccgaagccctgctgcggcagtttctcgccgactcggggatacagggacggcccgacggcctgatcctggccgtcgccggcccgtcgcaggccgagcacgtcaagctcaccaacctcgactggtggatcgacgcggccgagctccagctcgcgctcggcattccccaggtccacatcgtcaacgatttcgaggctgccgccgcgggactcgcgaccctggtgccggccgactacgtcgagatcaacccggggcagcccgacccgctcggcgtgcgcgcgatcacgggcgccgggaccgggctcggcctggccttcctcgtccatgacccggcagggcgggaaacgagctacccgaccgaaggcggccacgtcgactttgcgcccgccaacgccatgcaggatcggctgctgaagcgactgcgcaagcaatacggtcacgtctcctgggagcgcgtcgtctccgggtcggcgatgtccgagctctatgcattctgctgcgtcgaacttggcaccacgccgtgctcggcgtcgtgcgacggcgcctgcctcgtcgctgcggcggcggcggacgacatcgcggccgaggctgcgctcgatctctttgtcgacctctacggcgcctgggtcggcaacgtcgccttgctctaccgtccgcgcggcgggctctacatcgccggcggcgtcagcgcgcacctgcagaagcgcatcgcggcgccgcgcttcatggccgcggcgctcgacaaggggcgcatgcgtcgcgtcgtcgaaagcacaccgatatttctgatcacgagcccgcggctcggcgtgcagggcgcgctggccctgcgcgaagccgcggcgcacagccggcgcgaccgccggacccatgaacgataa

SEQ ID NO: 50051 - protein, 332 aa, Thiobacillus denitrificans ATCC 25259
MEWIAGDIGGTKSWLVWIGPPGDGLHPRFERVYPSADFVSAEALLRQFLADSGIQGRPDGLILAVAGPSQAEHVKLTNLDWWIDAAELQLALGIPQVHIVNDFEAAAAGLATLVPADYVEINPGQPDPLGVRAITGAGTGLGLAFLVHDPAGRETSYPTEGGHVDFAPANAMQDRLLKRLRKQYGHVSWERVVSGSAMSELYAFCCVELGTTPCSASCDGACLVAAAAADDIAAEAALDLFVDLYGAWVGNVALLYRPRGGLYIAGGVSAHLQKRIAAPRFMAAALDKGRMRRVVESTPIFLITSPRLGVQGALALREAAAHSRRDRRTHER

SEQ ID NO: 50052 - DNA, 981 bp, Chloroflexus aurantiacus
  CDS (1)..(981)
atgtatctggccggtgacatcggcggcacaaagacaattctggccctctttgatcaggcgaccgggccacatcatccggtttttgaacagacatttgccagtgcgcgttatcccgatttagagacgatgatcgctgagtttcgcgaacaacatccggttcccattgagggcgcagcgtttggcgtcgccgggccggtggtcagcggacgggccagtatcacgaatctgagctggacaattgacgctgccagattgagtacagtgttaaacggcgcaccggtacgcctgttaaacgatctggaagcgattgcccaatcggttccgattctcgaacctgctgatctggagacacttactgcggggcaagccattgctggtggcgcaattggggtcatcgcccctggtaccggtctgggtgaggcatttctcacctgggacggggtgcgctatcgcccgcacccctctgaaggcggtcacacgacattcgcgccccgcaatcaggttgaaaaagatctgctcgattacctgcatcaacggtacaatcacgtcagctacgaacgtgtctgctcgggcattggcataccgaatttgtacgcttttgtacgtgatcgactgctccaacgcgaaacgccggcggtcgccgagcaactggccgctgccagtgatcccacaccggtcattgtccaggccgggatggcaaccgaacagatgtgcctggtatgccgtaccacccttgaactgttcgttgacattctggcagccgaagccggcaatctggcgttaaaggtactggcgaccggcggcgtatacattggcggtggtttaccaccacggatgctgccattgatcaagcgtgaacgattcctacaggtcttccgtgataaaggacgtttcagtgaattgctgagccaggtgccgattcacgtcattctcgaaccgaaagccggtctcctcggcgcggcagcagcagcaatgagttga

SEQ ID NO: 50053 - protein, 326 aa, Chloroflexus aurantiacus
MYLAGDIGGTKTILALFDQATGPHHPVFEQTFASARYPDLETMIAEFREQHPVPIEGAAFGVAGPVVSGRASITNLSWTIDAARLSTVLNGAPVRLLNDLEAIAQSVPILEPADLETLTAGQAIAGGAIGVIAPGTGLGEAFLTWDGVRYRPHPSEGGHTTFAPRNQVEKDLLDYLHQRYNHVSYERVCSGIGIPNLYAFVRDRLLQRETPAVAEQLAAASDPTPVIVQAGMATEQMCLVCRTTLELFVDILAAEAGNLALKVLATGGVYIGGGLPPRMLPLIKRERFLQVFRDKGRFSELLSQVPIHVILEPKAGLLGAAAAAMS

SEQ ID NO: 50054 - DNA, 972 bp, Erythrobacter litoralis HTCC2594
  CDS (1)..(972): transl_table=11
atggacctcgtcgccgtcgatatcgggggaacccacgcccgcttcgccattgccactgtcgcggaggacggcgcgatcacgctcggcgaaccggagacgctccacaccgaagatcacgccagcttccagaccgcgtgggaggattttcgcgatcgcatgggcggcagcctgcccgacgcgatcagcatggccgtcgccgggccggtcaagaccgacatcatccgcttcaccaacaatccctggatcatccgtccgccgctgattgccgaaaagctcggttgcgggcgctacaccatcgtcaacgatttcgaagccgtggcgcatgctgcggcccgcgcaccagcggaacagtttatccatctcgcagggccggagcaggacctgcccgctaaaggcaccatcagcgtgcttggccctggcaccggactaggcgtcgctcatttctggcgcgacggagacggcggctaccgcgtgcaggcgaccgagggcgggcatggcgatttcgccccgctcgattccatcgaggatgcgatcctcgcccgcctgcgcaagcggcacatgcgcgtgtcggacgaacgcgtagtttcgggaccggccatcgtcgacatctaccacacgctcgctgccatggagggccgcgcggtgcaggagctcgacgatgtcgagatctggacccgcggtaccagcggcgacgacagcctcgccgccgccgctgtcgaccgcttctgtctcgctctcggcagtgtcgcgggcgatatcgcgttgatccaaggcgcgagcggcgtcgtgatagcaggtggcctcggctatcgcatccgtgagacactgaccgcttccggtttcgaggaccgctttcgcgccaagggacgctttgccggcctgatggcgacgctgccggtcaagctgatcgtccatccccaacccggcctgttcggcgcggccgcagcctttgcaagggaacatctatcgtga

SEQ ID NO: 50055 - protein, 323 aa, Erythrobacter litoralis HTCC2594
MDLVAVDIGGTHARFAIATVAEDGAITLGEPETLHTEDHASFQTAWEDFRDRMGGSLPDAISMAVAGPVKTDIIRFTNNPWIIRPPLIAEKLGCGRYTIVNDFEAVAHAAARAPAEQFIHLAGPEQDLPAKGTISVLGPGTGLGVAHFWRDGDGGYRVQATEGGHGDFAPLDSIEDAILARLRKRHMRVSDERVVSGPAIVDIYHTLAAMEGRAVQELDDVEIWTRGTSGDDSLAAAAVDRFCLALGSVAGDIALIQGASGVVIAGGLGYRIRETLTASGFEDRFRAKGRFAGLMATLPVKLIVHPQPGLFGAAAAFAREHLS

SEQ ID NO: 50056 - DNA, 969 bp, Azotobacter vinelandii AvOP
  CDS (1)..(969): transl_table=11
atgactctgacaatggtcggtgatatcgggggtaccaacgcgcgtttcgccttgtggcgcgatgagcggatcgaatcggtgcggacgctgcccgcggccgacttcgccacgccggaactggcgatcgagcattacctgtcctccctcggactgtcgtcgggcgatctctccagcctgtgcctgggttgcgccgggccggtgtccggcgaggatttccgcttcaccaacaaccattggaccctgaaccgcagcgccttccgtcgggcgctgggactggacaacctcctgctgatcaacgacttcaccgccatggcgctgggcatgacgcgtctgcgcgaggacggacgcatccagatctgtcccggcgcgtcggagcccggcaacccgtctctggtgatagggccgggcaccggcctgggcgtcagcaccctggtgcccgacggcggcgaccgttggcgggtgctgccgggcgagggcgggcatgtcgatctgccggtcggcagcctgcgcgaggcggcgctgtggcagcaactgttcgccgacctgggccatgtacgcgccgaggatgtgctcagcggcagcggtctggtgcgactctaccgggcggtctgcaccctggacggccatgcgccgcacctcggcactcccgcggagatcagcacggccgccctggccggcgatccggtcgcggtggaggtcctgagcctgttctgcatctggctcggccgggtcgccggcaacggcgtgctgaccacgggggcgcgtggcggtgtgtatatcgtcggtggggtgattccgcgcttcgccgccttcttccagtccagcggcttcgccagcagcctgtgcagcaagggttgcatgagccattacctcaacggcgtgccggtctggctggtgaccgccgaatatcccggcctggagggtgccggcgtggccctgcagcaggcgctggagcccgccgccgcctga

SEQ ID NO: 50057 - protein, 322 aa, Azotobacter vinelandii AvOP
MTLTMVGDIGGTNARFALWRDERIESVRTLPAADFATPELAIEHYLSSLGLSSGDLSSLCLGCAGPVSGEDFRFTNNHWTLNRSAFRRALGLDNLLLINDFTAMALGMTRLREDGRIQICPGASEPGNPSLVIGPGTGLGVSTLVPDGGDRWRVLPGEGGHVDLPVGSLREAALWQQLFADLGHVRAEDVLSGSGLVRLYRAVCTLDGHAPHLGTPAEISTAALAGDPVAVEVLSLFCIWLGRVAGNGVLTTGARGGVYIVGGVIPRFAAFFQSSGFASSLCSKGCMSHYLNGVPVWLVTAEYPGLEGAGVALQQALEPAAA

SEQ ID NO: 50058 - DNA, 1110 bp, Azotobacter vinelandii AvOP
  CDS (1)..(1110): transl_table=11
atgggcggcgcgggagagcgtcgcggccccggaggatgccggcatcggttgcggccgcgagctgttcgctttcatgcgcgcggccttcagttcggcggaagagggcgcctgcgtgttcaccgagcggctcggagcgctcgaatgaagctggccctgatcgccgacatcggcggaacccacgtacgtttcgccctctggcgggacggccggccgcaggcgctgcgagtgctggccacgggcgactatcccggccccgaggaggcgatccgcgcctacctcgccgcgctggaattaccgctggcggcgctggagacggcctgcctggcctgtgccggtcccgtgcatggcgatcggttcagcctgaccaacaatcactggcggttcggccgcctggcgctcacccatgcgctgggtctgcgccagttgctggtgatcaacgacttcgccgccatggccctcggcatgacccgcctggccgagcacgagcggctgaccatccggccggggcaggctgccgtcggcagcccccggctggtgctggggccgggcaccgggctcggtgtcagcgccctgctgccggatggtccgggaaactggcgggtgctgccgggcgagggcgggcatgtcgatctgccgctcggcaattcgcgcgaggtggcgttgtggcagttgctgcagcgcgatctcggccacgtttccgcggagagcgtgctctgcggcagcggcctgctgcggctgtaccgcgtcagttgcaggctcgacggacagcagccgcgactcgactcggccgctgcggtgagcgccgcggcattggccggcgaggccggcgcgatggcggtgctggagcagttctgctgctggctgggacgggtcgccggcaaccatgcgctgaccctgggggcgcgcggcggcgtttatctggccggtggcatcctgccgcatttcgccgctttcctgcgcgacagcggcttctcccgctgcttcgtcgacaagggggtgatgagcggctatctgcaggacatcccggtatggctggcggtggccgagcagcccggcctgctgggcgccgggctggcgctggacgcctgggcgaagcgccagcccgcctga

SEQ ID NO: 50059 - protein, 369 aa, Azotobacter vinelandii AvOP
MGGAGERRGPGGCRHRLRPRAVRFHARGLQFGGRGRLRVHRAARSARMKLALIADIGGTHVRFALWRDGRPQALRVLATGDYPGPEEAIRAYLAALELPLAALETACLACAGPVHGDRFSLTNNHWRFGRLALTHALGLRQLLVINDFAAMALGMTRLAEHERLTIRPGQAAVGSPRLVLGPGTGLGVSALLPDGPGNWRVLPGEGGHVDLPLGNSREVALWQLLQRDLGHVSAESVLCGSGLLRLYRVSCRLDGQQPRLDSAAAVSAAALAGEAGAMAVLEQFCCWLGRVAGNHALTLGARGGVYLAGGILPHFAAFLRDSGFSRCFVDKGVMSGYLQDIPVWLAVAEQPGLLGAGLALDAWAKRQPA

SEQ ID NO: 50060 - DNA, 1929 bp, Burkholderia vietnamiensis G4
  CDS (1)..(1929): transl_table=11
atgtctactggtgcgcaaagtaaggccgtcgtcgcgggtcagcatgccgacggcccgcgcctgctcgcggatgtcggcggcaccaacgcgcgtttcgcgctggaaaccggcccgggtgagatcacgcagatccgcgtctatccgggcgccgattatccgacgctcaccgacgcgatccgcaagtatctgaaggacgtgaagatcgcccgcgtgaaccacgcggcgatcgcgatcgcgaacccggtcgacggcgaccaggtcacgatgaccaaccacgactggagcttctcgatcgaggcgacgcgccgcgcgctcggcttcgacacgctgctcgtcgtcaacgacttcaccgcgctcgcgatggcgctgcccggcctcaccgatgcgcagcgcgtgcagatcggcggcggcacgcggcgccagaacagcgtgatcgggctgctcggcccgggcaccgggctcggcgtgtcgggcctgatcccggcggacgaccgctggatcgcgctcggcagcgaaggcggccacgcttcgttcgcgccgcaggacgagcgcgaggatctcgtgctgcagtacgcgcgcaagaagtttccgcacgtgtcgttcgagcgggtgtgcgcgggccccggcatcgagatcatctatcgcgcgctcgccgcgcgcgacaagaagcgcgtcgccgcgagcgtcgacacggccgacatcgtcgagcgcgcgcacgcgggcgaagcactcgcgctcgagacggtcgaatgcttctgcggcattctcggctcgttcgcgggcagcgtcgcgctcacgctcggcgcgctcggcggcgtctacatcggcggcggcgtcgcgctcaagctcggcgagctgttcacgcgctcgtcgttccgcgcgcgcttcgaggcgaagggccgcttcgcgcactatctgcagaacatcccgacctacctgatcaccgccgaatatccggcgttcctcggcgtgtcggcgatcctcgcggagcagttgtcgaaccgctcgggcggtgcgtcgtcggcggtgttcgagcggattcgccagatgcgcgacgcgctgacgccggccgagcgccgcgtcgccgatctcgcgctgaaccatccgcgctcgatcatcaacgacccgatcgtcgatatcgcgcgcaaggccgacgtgagccagccgacggtgatccgcttctgccgctcgctcggctgccaggggctgtcggacttcaagctgaagctcgcgaccggcctcaccggcacgattccgatgagccacagccaggtgcatctcggcgacacggccaccgacttcggcgcgaaggtgctcgacaacacggtgtcggcgatcctgcagctgcgcgaacacctgaacttcgagcacgtcgagaacgcgatcgagatcctgaacggcgcgcgccgcatcgagttctacgggctcggcaactcgaacatcgtcgcgcaggacgcgcactacaagttcttccgcttcgggattccgacgatcgcctacggcgacctgtacatgcaggccgcgtcggccgcgctgctcggcaagggggacgtgatcgtcgcggtgtcgaaatcggggcgcgcgcccgagctgctgcgcgtgctcgacgtcgcgatgcaggcgggcgcgaaggtgatcgcgattacgtcgagcaacacgccgctcgcgaagcgcgcaaccgtggcgctcgaaaccgaccacatcgagatgcgcgagtcgcagttgtcgatgatctcgcggatcctgcatctggtgatgatcgacatcctcgcggtcggcgtcgcgatccgccgcgcgtcgaccgccggcgaactgccggaagccgtcgcgcaggcgcgtgcgcgcgcgagcgacgacgaaacggccgacgtgctcgactggctgagccacggcgcgtcgccggcggcgaaggacgtcgcgcgcgactga

SEQ ID NO: 50061 - protein, 642 aa, Burkholderia vietnamiensis G4
MSTGAQSKAVVAGQHADGPRLLADVGGTNARFALETGPGEITQIRVYPGADYPTLTDAIRKYLKDVKIARVNHAAIAIANPVDGDQVTMTNHDWSFSIEATRRALGFDTLLVVNDFTALAMALPGLTDAQRVQIGGGTRRQNSVIGLLGPGTGLGVSGLIPADDRWIALGSEGGHASFAPQDEREDLVLQYARKKFPHVSFERVCAGPGIEIIYRALAARDKKRVAASVDTADIVERAHAGEALALETVECFCGILGSFAGSVALTLGALGGVYIGGGVALKLGELFTRSSFRARFEAKGRFAHYLQNIPTYLITAEYPAFLGVSAILAEQLSNRSGGASSAVFERIRQMRDALTPAERRVADLALNHPRSIINDPIVDIARKADVSQPTVIRFCRSLGCQGLSDFKLKLATGLTGTIPMSHSQVHLGDTATDFGAKVLDNTVSAILQLREHLNFEHVENAIEILNGARRIEFYGLGNSNIVAQDAHYKFFRFGIPTIAYGDLYMQAASAALLGKGDVIVAVSKSGRAPELLRVLDVAMQAGAKVIAITSSNTPLAKRATVALETDHIEMRESQLSMISRILHLVMIDILAVGVAIRRASTAGELPEAVAQARARASDDETADVLDWLSHGASPAAKDVARD

SEQ ID NO: 50062 - DNA, 1929 bp, Burkholderia cenocepacia AU 1054
  CDS (1)..(1929): transl_table=11
atgtctactggtgcgcaaagtaaggcggtcgtcgcgggtcagcatgccgacggcccgcgcctgctcgcggacgtcggcggcaccaacgcgcgcttcgcgctggaaaccggccccggcgagatcacgcagatccgcgtgtatcccggcgccgactatccgacgatcaccgacgcgatccgcaagtatctgaaggatgtgaagatcagccgcgtgaaccacgcggcgatcgcgatcgcgaacccggtcgacggcgaccaggtcacgatgaccaaccacgactggagtttctcgatcgaggcgacgcgccgcgcgctcggcttcgacacgctgctggtcgtcaacgacttcaccgcgctcgcgatggcgctgccgggcctgaccgatgcccagcgcgtgcaggtcggcggcggcgcacgtcgccagaacagcgtgatcggcctgctcgggcccggtaccgggctcggcgtgtcggggctgattccggccgatgaccgctggatcgcgctcggcagcgaaggcggccacgcatcgttcgcgccgcaggacgagcgcgaggacctggtactgcagtacgcgcgcaagaagtttccgcacgtgtcgttcgaacgcgtgtgcgcgggccccggcatggagatcatctatcgcgcgctcgcggcgcgcgacaagaagcgcgtcgccgcgaccgtcgacacggtcgagatcgtcgagcgcgcgcatgcgggcgacgcgctcgcgctcgagacggtcgaatgcttctgcgggattctcggcgcgttcgcgggcagcgtcgcgctaacgctcggcgcgctaggcggcgtgtacatcggcggtggcgtcgcgctgaagctgggcgagctgttcacgcgctcgtcgttccgcgcgcgcttcgaggcgaagggccgcttcacgcactacctcgaaaacatcccgacctacctgatcaccgccgaatatccggcgttcctcggcgtatcggcgatcctcgcggagcagttgtcgaaccgttcgggcggcgcgtcgtcggccgtgttcgagcgaatccgccagatgcgcgacgcactgacgccggccgagcgccgcgtcgccgatctcgcgctgaaccatccgcgctcgatcatcaacgatccgatcgtcgacatcgcgcgcaaggccgacgtgagccagccgaccgtgatccgcttctgccgctcgctcggctgccaggggctgtcggacttcaagctgaagctcgccaccggcctcaccggcacgatcccgatgagccacagccaggtgcatctcggcgatacggccaccgacttcggcgcgaaggtgctcgacaacacggtgtccgcgatcctgcagctgcgcgagcacctgaatttcgagcacgtcgagaacgcgatcgagatcctgaacggcgcgcgccgcatcgagttctacgggctcggcaactcgaacatcgtcgcgcaggacgcgcactacaagttcttccgcttcggcattccgacgatcgcgtacggcgacctgtacatgcaggccgcgtcggccgcgctgctcggcaagggcgacgtgatcgtcgcggtgtcgaagtcgggccgcgcgcccgagctgctgcgcgtgctcgacgtcgcgatgcaggccggcgcgaaggtgatcgcgatcacgtcgagcaacacgccgctcgcgaagcgcgcgaccgtcgcgctcgaaaccgaccacatcgagatgcgcgagtcgcagttgtcgatgatctcgcgaattctgcatctgctgatgatcgacatcctcgcggtcggcgtcgcgatccgtcgcgcgtcgacgaacggcgaactgcccgaagccgtcgcgcaggcgaaagcgcgcgccagcgacgacgaaacggccgacgtgctcgactggctgagccacggcgcgtcgccggcggcgaaggacgtcgcgcgggactag

SEQ ID NO: 50063 - protein, 642 aa, Burkholderia cenocepacia AU 1054
MSTGAQSKAVVAGQHADGPRLLADVGGTNARFALETGPGEITQIRVYPGADYPTITDAIRKYLKDVKISRVNHAAIAIANPVDGDQVTMTNHDWSFSIEATRRALGFDTLLVVNDFTALAMALPGLTDAQRVQVGGGARRQNSVIGLLGPGTGLGVSGLIPADDRWIALGSEGGHASFAPQDEREDLVLQYARKKFPHVSFERVCAGPGMEIIYRALAARDKKRVAATVDTVEIVERAHAGDALALETVECFCGILGAFAGSVALTLGALGGVYIGGGVALKLGELFTRSSFRARFEAKGRFTHYLENIPTYLITAEYPAFLGVSAILAEQLSNRSGGASSAVFERIRQMRDALTPAERRVADLALNHPRSIINDPIVDIARKADVSQPTVIRFCRSLGCQGLSDFKLKLATGLTGTIPMSHSQVHLGDTATDFGAKVLDNTVSAILQLREHLNFEHVENAIEILNGARRIEFYGLGNSNIVAQDAHYKFFRFGIPTIAYGDLYMQAASAALLGKGDVIVAVSKSGRAPELLRVLDVAMQAGAKVIAITSSNTPLAKRATVALETDHIEMRESQLSMISRILHLLMIDILAVGVAIRRASTNGELPEAVAQAKARASDDETADVLDWLSHGASPAAKDVARD

SEQ ID NO: 50064 - DNA, 1863 bp, Burkholderia pseudomallei 1655
  CDS (1)..(1863)
ttggccgacgtcggcggcacgaacgcgcgcttcgcgctcgagacgggcccgggagaaatcacgcagatccgcgtgtacccgggcgccgagtatccgacgctcaccgacgcgatccgcaagtacctgaaggacgcgaagatcggccgcgtgaatcacgcggcgatcgcgatcgcgaaccccgtcgacggcgatcaggtccggatgacgaatcacaactggagcttctcgatcgaggcgacgcgccgcgcgctcggcttcgatacgctgctcgtcgtcaacgatttcaccgcgctcgcgatggcgctgcccggcctgaccgatgcgcagcgcgtacagatcggcggcggcgcgcgccggcagaacagcgtgatcggcctgatggggccgggcacggggctcggcgtgtcggggctcattcccgccgacgaccgctggatcgcgctcggcagcgaaggcggccacgcgacgttcgcgccgatggacgagcgcgaggatctcgtgctgcaatacgcgcgccgcaagtatcctcacgtgtcgttcgagcgcgtgtgcgcgggcccgggcatggagatcatctatcgcgcgctcgccgcgcgcgacaagaagcgcatcgccgcgaacgtcgacacggccgacatcgtcgagcgcgcgcacgcgggcgatgcgctcgcgctcgaggcggtcgagtgcttctgcgcgattctcggcacgttcgccggcaacctcgcggtcacgctcggcgcgttgggcggcatctatatcggcggcggcgtcgtgccgaagctcggcgagctgttcatgcgctcgccgtttcgcgcgcgcttcgaggcgaagggccgcttcgaggcgtatctcgcgaacatcccgacctacctgatcaccgcggaatacccggcgtttctcggcgtatcggcgatcctcgccgagcaactgtcgaaccgcacgggcggcgcgtcgtcggccgtgttcgagcgcatccgccagatgcgcgacgcgttgacgcccgccgagcggcgcgtcgccgatctcgcgctcaaccatccgcgctcgatcatcaacgatccgatcgtcgacatcgcgcgcaaggccgacgtgagccagcccaccgtgatccgcttctgccgctcgctcggctgccaggggctgtcggacttcaagctgaagctcgcgacgggcctcaccggcacgatcccgatgagccacagccaggtgcatctgggcgacaccgcgaccgatttcggcgcgaaggtgctcgacaacacggtatcggcgatccttcagttgcgcgagcatctgaacttcgagcacgtcgaacaggcgatcgacatcctgaacaacgcgcggcgcatcgagttctacggcctgggcaattcgaacatcgtcgcgcaggacgcgcactacaagttcttccgcttcgggattccgacgatcgcgtacggcgacctgtacatgcaggcggcgtcggccgcgctcctcggcaagggcgacgtgatcgtcgcggtgtcgaagtcggggcgcgcgccggagctgttgcgcgtgctcgacgtcgcgatgcaggcgggcgcgaaggtgatcgcgatcacgtcgagcaacacgccgctcgccaagcgcgcgacggtcgcgctcgagaccgatcacatcgagatgcgcgagtcgcagttgtcgatgatctcgcggatcctgcatctcgtgatgatcgacatcctcgcggtcggcgtcgcgatccgccgcgccgcgccgaacgcggagctcgcggaggcgatggcgcgcgcgaaggcgcgcgcgggcgcgagcgcgggcgacgaggccgccgacgtgctcgactggctgagccacggcgcggcgcccgcggcgaaggactga

SEQ ID NO: 50065 - protein, 620 aa, Burkholderia pseudomallei 1655
MADVGGTNARFALETGPGEITQIRVYPGAEYPTLTDAIRKYLKDAKIGRVNHAAIAIANPVDGDQVRMTNHNWSFSIEATRRALGFDTLLVVNDFTALAMALPGLTDAQRVQIGGGARRQNSVIGLMGPGTGLGVSGLIPADDRWIALGSEGGHATFAPMDEREDLVLQYARRKYPHVSFERVCAGPGMEIIYRALAARDKKRIAANVDTADIVERAHAGDALALEAVECFCAILGTFAGNLAVTLGALGGIYIGGGVVPKLGELFMRSPFRARFEAKGRFEAYLANIPTYLITAEYPAFLGVSAILAEQLSNRTGGASSAVFERIRQMRDALTPAERRVADLALNHPRSIINDPIVDIARKADVSQPTVIRFCRSLGCQGLSDFKLKLATGLTGTIPMSHSQVHLGDTATDFGAKVLDNTVSAILQLREHLNFEHVEQAIDILNNARRIEFYGLGNSNIVAQDAHYKFFRFGIPTIAYGDLYMQAASAALLGKGDVIVAVSKSGRAPELLRVLDVAMQAGAKVIAITSSNTPLAKRATVALETDHIEMRESQLSMISRILHLVMIDILAVGVAIRRAAPNAELAEAMARAKARAGASAGDEAADVLDWLSHGAAPAAKD

SEQ ID NO: 50066 - DNA, 960 bp, Chromohalobacter salexigens DSM 3043
  CDS (1)..(960): transl_table=11
atgacccgaccggcactgatcggcgatatcggcggcaccaatgcgcgcttcgccctggtgacgccgggggcgttcgaccttcatgacatcagaaccctgccctgcgcgcattatccttcgctgtccgacgcgattcgcgcctacctcaaggaggtgggcgccgagatgccgacggaagcctgcctcgccttcgcctgccccgtgcacgacgacgaggtccgcatgaccaacaatgcctggcgcttctccaaacgccaggtcgccgaggaattcggcttcaccctgttcaaggtcatcaacgacttcaccgcccaggccctgggcgtgccccacgtggcggacgacgaactcgtcgcgctcggggacggcgaggccgcgccggggtgcacgcgcttgatcttcggccccggcacgggccttggcatggcggggctctttcccggtcagcatgactggattccgctgcctaccgaaggcggccatatctccttcgcccccaccgatcaacacgaacgtgacctgctggcctattttcaggcacgctacgggcgcgtctcggtggagcgcattctctgcggccaggggcttctggacctgtaccgcgcgcatgctcaactggccaagcaggtcgcgcgctacaacaccccggcggaggtcaccggcgcggcccgggccggcgatcccctggcacgcaacgccctcgagcgattcctcaagattctcggcgacgtcagtggcgacgctgccctgatgctcggcgcgcgcggcggggtctatctgtgcggtggcattctgccgcgactgctcgactggctgccgcacagccacttccgcgatgctttcgccgacaaagggcgcatgcacgcgtacactgcccacattcccgtgtgggtggtcacggcaccctggaatgggctgctgggcgcctgcgaagcattacacaacgaggaggtgacatga

SEQ ID NO: 50067 - protein, 319 aa, Chromohalobacter salexigens DSM 3043
MTRPALIGDIGGTNARFALVTPGAFDLHDIRTLPCAHYPSLSDAIRAYLKEVGAEMPTEACLAFACPVHDDEVRMTNNAWRFSKRQVAEEFGFTLFKVINDFTAQALGVPHVADDELVALGDGEAAPGCTRLIFGPGTGLGMAGLFPGQHDWIPLPTEGGHISFAPTDQHERDLLAYFQARYGRVSVERILCGQGLLDLYRAHAQLAKQVARYNTPAEVTGAARAGDPLARNALERFLKILGDVSGDAALMLGARGGVYLCGGILPRLLDWLPHSHFRDAFADKGRMHAYTAHIPVWVVTAPWNGLLGACEALHNEEVT

SEQ ID NO: 50068 - DNA, 1047 bp, Crocosphaera watsonii WH 8501
  CDS (1)..(1047): transl_table=11
atgtctatattactcgctggcgatattggcggaactaaaactattttacgtttagttagttccgagaattctaaaaatagtgaaagtttacctcaacaaaccaccttatatgaaaactcctatcccagtcaagactacgatgatctcgttcccattgttcaagaattttatcaagaagctaagcaggaattaaaagaagaaatttctgtaaaaaatgcttgttttggtatcgctggtcccgtagttaataatacctcaaaattaacaaatttaaactggccagaattgacaggcgatcgcctagagaaaaaactatctctagaaagagttaatctaatcaatgattttgctgctattggttacggtattctagggttaaaaccagatgatttacataccttacaaggagcagaagcaaaacccaatactcctataggtgtgttgggtgcagggactggtttaggggaatgctttttaactccttcagaaagtggtaattatagtgtcttctctactgagggatcccatggagactttgccccacgaagcgaattagaatttgaattattaacctatattcgagataaatatagtttatccagagtttccatagaaaggatcgtgtctggaatgggaattagtgcaatttatcaatttttacgccataagtatcctgaaaaagaatccgataaattaaagaaaatttttcaaatttgggaaaatgaaaaaaatattgatctctctgctgaagtatctaaagcagctttagaaaatagggatagtttatgtcaacaaacaatggaaatatttatttcagcttacggcgcagaagcaggtaatttagctttaaaattgttaccttataatggtttatacatagcaggaggaattgcagctaaaatactaccattaatgcaaacaggaacctttatggaatcttttcaagctaaaggacgtatgagttcactattaactgaaatccccgttaatattatcttaaatcctaaagttggtttaattggggctgctttaagggctgcaaaataa

SEQ ID NO: 50069 - protein, 348 aa, Crocosphaera watsonii WH 8501
MSILLAGDIGGTKTILRLVSSENSKNSESLPQQTTLYENSYPSQDYDDLVPIVQEFYQEAKQELKEEISVKNACFGIAGPVVNNTSKLTNLNWPELTGDRLEKKLSLERVNLINDFAAIGYGILGLKPDDLHTLQGAEAKPNTPIGVLGAGTGLGECFLTPSESGNYSVFSTEGSHGDFAPRSELEFELLTYIRDKYSLSRVSIERIVSGMGISAIYQFLRHKYPEKESDKLKKIFQIWENEKNIDLSAEVSKAALENRDSLCQQTMEIFISAYGAEAGNLALKLLPYNGLYIAGGIAAKILPLMQTGTFMESFQAKGRMSSLLTEIPVNIILNPKVGLIGAALRAAK

SEQ ID NO: 50070 - DNA, 1017 bp, Desulfuromonas acetoxidans DSM 684
  CDS (1)..(1017): transl_table=11
gtgagtcgccggtttgtcgagttgttgattggaatgacaatgatcttgttggcaggtgatattggggggaccacatctcgttttcaatggttggacagtgagactccagagtctcagtccacgttgttctactatccgagcaaacgcttttcctcatttacggcactcttgaccaccctgttgtctgacagtggcatcactcaagtggatgtggcctgttttgggctgcccggtccagtgcagggctgccaggttgctttgaccaatctgccgtggaccattgatgcttgtgagctacaggagcaattgcctctgaaagagatttccctggtcaatgattttcaggcggctgcgctgggcattgatgcgttacgcgaagagaaaattctttgcctgcatcccggcgagtttgatccggcaggaaaccggctggtggttggtgccggaaccggtttgggcgtggcgccggtttatcagcttgaaggccatttttacccgcaatcttccgaaggggggcatatcgcctttgctccggttactgacgaacaatcgcggctcatggattggctgcatcgggaacggagccatatctcttatgaagacttgttgtccggcgaaggtttggggcgattgtaccgcttccattttcagcaacgcaacaatcgtcagccgacgcttttctccgccgcaatgattcacgaactggccgagcagggcgatgaagtcgccatcgccgctttacgcatgtttgtcaatatttacggtcagtttattggtgatgtggccctgatttggccggcgcgggccgggatctatatcgctggcggcattgctggaaagattatccgctggatgacccctgaggattttacctggtatttcctggccaaagaatcgatgaaccgtgtggttgaaaaaatgcctgtttatctggtcaaagatgagttgctcggtctcaaaggggcgatgcgatctgcccgacggttggccgggctggagagtgaaggagaggtatga

SEQ ID NO: 50071 - protein, 338 aa, Desulfuromonas acetoxidans DSM 684
MSRRFVELLIGMTMILLAGDIGGTTSRFQWLDSETPESQSTLFYYPSKRFSSFTALLTTLLSDSGITQVDVACFGLPGPVQGCQVALTNLPWTIDACELQEQLPLKEISLVNDFQAAALGIDALREEKILCLHPGEFDPAGNRLVVGAGTGLGVAPVYQLEGHFYPQSSEGGHIAFAPVTDEQSRLMDWLHRERSHISYEDLLSGEGLGRLYRFHFQQRNNRQPTLFSAAMIHELAEQGDEVAIAALRMFVNIYGQFIGDVALIWPARAGIYIAGGIAGKIIRWMTPEDFTWYFLAKESMNRVVEKMPVYLVKDELLGLKGAMRSARRLAGLESEGEV

SEQ ID NO: 50072 - DNA, 948 bp, Jannaschia sp. CCS1
  CDS (1)..(948): transl_table=11
atggttcccgcagctctttcgctggtggccgatatcggtggcaccaacacccgtgtggccctggcccatggggccgaggtccaggtcgatagcgtgcggcgctaccgcaatgccgagtttgatggaataggctctgtcatcgcccggtatctgggcgacagtagccagaatcatacctttattacaggggtttgcgtcgcaatggcggggcctgtccatgacggggtcggcaccctgaccaatctggactggcgcatcgacaaggcagttctggcagaggcgttgagtgccgagcgcgtcgccgtgttgaacgatttgcaggcccagggccacgcgattggccacatcgcggccaccgatctggcggaggttttgccgcagccggaggtggcggcaacggcggcgaaactggtcatcggcctgggcaccgggttcaacgcctgcccggtgtttgacaccgccgccggccgcttcgtgccgccgtcggaagccgggcatgtgagcctgcccacatctattgccgagctgcacccgatgctgagcaagctgtcggattcccgcggatatccgtcggtggaagaggtgctgtcggggcgcggtgtcagccagttgcacgcggccctccacggggaagtcattgatcccgctgatattttatctcgtatcggcgatggtgaggcacaggcctgcgataccggcgcgctgtttgtgaaggtgttgggggacgttgcgggcaatctggtgctgtcgcatctgcccttcggcggcgtgttccttgtgggcggcgtgacgcgggcctttgcgccctatctggaccagttcggatttgtggaggcgttccggtccaagggccggttttcgaccttcatggagcagtttggcgtgtcggtcgtcagcgacgattatgccgcgctgacgggctgcgcgagccatctgtcgcggggctga

SEQ ID NO: 50073 - protein, 315 aa, Jannaschia sp. CCS1
MVPAALSLVADIGGTNTRVALAHGAEVQVDSVRRYRNAEFDGIGSVIARYLGDSSQNHTFITGVCVAMAGPVHDGVGTLTNLDWRIDKAVLAEALSAERVAVLNDLQAQGHAIGHIAATDLAEVLPQPEVAATAAKLVIGLGTGFNACPVFDTAAGRFVPPSEAGHVSLPTSIAELHPMLSKLSDSRGYPSVEEVLSGRGVSQLHAALHGEVIDPADILSRIGDGEAQACDTGALFVKVLGDVAGNLVLSHLPFGGVFLVGGVTRAFAPYLDQFGFVEAFRSKGRFSTFMEQFGVSVVSDDYAALTGCASHLSRG

SEQ ID NO: 50074 - DNA, 1086 bp, Desulfitobacterium hafniense DCB-2
  CDS (1)..(1086): transl_table=11
ttgccttatgcaggcattgaaaaaggccaactatacttggctggagacattggcggaaccaaaactctcctaggactttattccctggaaggcactgagcttgtcttagtcagggaaaggaatttccccagtaaagactggcaggacttaacagcgcttatacaaggatttttagatgaaatagccctaacgcctgaagacataaccggaggctgcctcagcctggccgggcccatcactcaagacaaatgttttctcaccaatttgaatcgggtgattgattgccctgacttgcggtcctccctgccattgcgcaggcccctgcttttggtcaacgaccttgaggctatggggcagggccttatggatttaagaggggaagatttaatttgtctcaacccttccgcagagagtccttcctcttcccttgcctcgtctcctgccctttccctcgccaggccctcacttaaccgggcactgatcgcccccggtacaggcttgggtcaggccatgatcctggctgacgggcgggtttgcgccacagaaggcgcccatggggactatgccccccgcaccgagcaggaagtacggttgtggcgctttctggcccaacgatacggtcatgtcagctatgagagagtcctctccggtcccgggctggcagatctctatcgttttctgtactgggaggctctttccccctctctccctggcccggcctctgactctatccctgctcctgattctagccttactcctgccgagatcacaaaaaaagccctcgacggaatctgtacactctgtacagaaacattggagctctttgtgaaaattctgggggcggaagcaggcaatctcgctttaaggactttggcctatggaggaatctatctgggcgggggcatcccccctaaaatcctgcccaagcttcaggaagatggcttcatggaggcctttctcgctaaaggccgtttgagagagcttttatcccagatccctatctatgtgatccttaatgaaaggactcctttgctgggagccgcccgtttggcggtggcagccgggtatccttttacatgctcttaa

SEQ ID NO: 50075 - protein, 361 aa, Desulfitobacterium hafniense DCB-2
MPYAGIEKGQLYLAGDIGGTKTLLGLYSLEGTELVLVRERNFPSKDWQDLTALIQGFLDEIALTPEDITGGCLSLAGPITQDKCFLTNLNRVIDCPDLRSSLPLRRPLLLVNDLEAMGQGLMDLRGEDLICLNPSAESPSSSLASSPALSLARPSLNRALIAPGTGLGQAMILADGRVCATEGAHGDYAPRTEQEVRLWRFLAQRYGHVSYERVLSGPGLADLYRFLYWEALSPSLPGPASDSIPAPDSSLTPAEITKKALDGICTLCTETLELFVKILGAEAGNLALRTLAYGGIYLGGGIPPKILPKLQEDGFMEAFLAKGRLRELLSQIPIYVILNERTPLLGAARLAVAAGYPFTCS

SEQ ID NO: 50076 - DNA, 972 bp, Sphingopyxis alaskensis RB2256
  CDS (1)..(972): transl_table=11
atgcgcgaacagatcgtcacggtcgatattggcggcacgcacgcccgttttgctatcgccgagatcgagggtgggcgcgtccgttcgctgggcgaagcgacgacgctgcatacaaaggatcatgcgagcttccagacagcgtggcaggatttcgaaggccggcaaggcggcaccctgccacgcgcggtcgcgatcgcgatcgccggcccgacgcgcggcgaaatcatccgcttcaccaacaatccgtggattatccgtcccgcgctgatcggcgaaaagctgaatgtcgaccgccatatactcgtcaatgatttcgaggcggtgggccatgccgtcgcgcaggccgacgagagctatttcgggcggctgaccggccccgacgagccgctgccggccaccggcacgatcagcgtcatcggacccggcaccgggcttggcgtcgcgcatatctggcgcgatgagagcggctatcgcgtgcaggcgaccgagggcgggcatatcgacttcgcaccgctcgacagcatcgaggacgcgatcctcgcgcggctacgcaagcggcaccgccgcgtatcggtcgagcgcgtcgtgtctggccccggcatcgtagacatttacgaaacgctcgccgcactcgaaggacgcgcggtgacaccgctcgacgacaaggcgatctgggccgctgcgctgagcggcggggacagtcttgccgcggcggctgccgatcgcttctgcctctcgctcggcagcgtcgcgggtgatctcgcgctggcgcagggggcgagcggggtggttatcgcgggcggtctgggtctgcgcattcgcgatagcctggtgcgatcgggctttccggaacgctttatcgaaaaggggcggttcgaggggttcatggcggcgctgccggtaaagctcatcacgcatccgcagccggggctgttcggcgctgcggctgcctttgctcgccagcatggctga

SEQ ID NO: 50077 - protein, 323 aa, Sphingopyxis alaskensis RB2256
MREQIVTVDIGGTHARFAIAEIEGGRVRSLGEATTLHTKDHASFQTAWQDFEGRQGGTLPRAVAIAIAGPTRGEIIRFTNNPWIIRPALIGEKLNVDRHILVNDFEAVGHAVAQADESYFGRLTGPDEPLPATGTISVIGPGTGLGVAHIWRDESGYRVQATEGGHIDFAPLDSIEDAILARLRKRHRRVSVERVVSGPGIVDIYETLAALEGRAVTPLDDKAIWAAALSGGDSLAAAAADRFCLSLGSVAGDLALAQGASGVVIAGGLGLRIRDSLVRSGFPERFIEKGRFEGFMAALPVKLITHPQPGLFGAAAAFARQHG

SEQ ID NO: 50078 - DNA, 1011 bp, Ralstonia metallidurans CH34
  CDS (1)..(1011): transl_table=11
atgacggatcgcgcgatgtcctatccccggatcctggccgacgtgggcggcaccaacgtgcgctttgccatggagacggcgccgatgcggatcggcgagatcaccgcatacaaggtggccgagcacgcctcgctcgaagccgcgatgcggctctacatgctgacgcgtagcggcgcggcccggccgcgccatgcggccatcggcctggccaatccggtcactggtgaccaggtcaagctgaccaaccacaactgggcgttctccgtcgaggccatgcgccgcgcgctcgatctcgacacgctggtggccatcaacgacttcacctcgctggcgctggcgctgccgtatctgcccgacgccagccttgtgcaggtacgcgacggcacggcggtggccacggcgccccgggccttgatcgggccgggaaccggccttggcgtatccggcctgattcccgcgccgggtggcgcggtggcgctggcgggcgagggcggacacatcgagatcatgccggtcaccgacgacgagtggatcgcctggcgcgccgcccacgatcagtttgggcgcgtgtcggcggagcggctgctgtcgggtatgggtctctcgcatattcatgccgcgctgtccgcagaaatgggtacgcctctggaggtgccgctggcaccggcgcaggtgacggacggcgcgatgcgcgcgggcgacccggtatgccgccgcgctttcgacgcgttctgcgggatgctcggctcggttgccgccgatgtcgcgctggtgctcggcgcacgtggtggcgtctatctcggcggtggtatcgttccacgctttgtcgatgccctacgggcgtcgacgttcgcggagcgctttgtcgccaagggccgcatgggcagtttccttgccgatgtgccggtgtacgtgatcacggccgagtatccggcgctgccgggcctggctcgcgcactggcggatcggcttgaagccgacgcgcgccgcgccgagacctctcaatcctga

SEQ ID NO: 50079 - protein, 336 aa, Ralstonia metallidurans CH34
MTDRAMSYPRILADVGGTNVRFAMETAPMRIGEITAYKVAEHASLEAAMRLYMLTRSGAARPRHAAIGLANPVTGDQVKLTNHNWAFSVEAMRRALDLDTLVAINDFTSLALALPYLPDASLVQVRDGTAVATAPRALIGPGTGLGVSGLIPAPGGAVALAGEGGHIEIMPVTDDEWIAWRAAHDQFGRVSAERLLSGMGLSHIHAALSAEMGTPLEVPLAPAQVTDGAMRAGDPVCRRAFDAFCGMLGSVAADVALVLGARGGVYLGGGIVPRFVDALRASTFAERFVAKGRMGSFLADVPVYVITAEYPALPGLARALADRLEADARRAETSQS

SEQ ID NO: 50080 - DNA, 1029 bp, Mesorhizobium sp. BNC1
  CDS (1)..(1029): transl_table=11
atggcgtattccaccgaccatgacgtggtgctcgatttcccgattttgatcggtgacatcggcggcaccaatgcgcgcttcgccattgtcgtggactcctatgccgagccgcgggaatttcccgtcgtacagacggccgatttcgcaacgatagaggacgccatccagacggcgatccttgaccagacgcatctcattccgcgctccgccgtcctggcggttgcgggacccgtgaacggagacgaaatcgatctcaccaattcaaattgggtggtccggccgcgcgagatgatggcccatctgggtttcagcgatatcgtcgtactcaacgatttcgaggcgcaggcgctggctgtcgtggcgcttggggaagagcatctggaaaagattggcggcaacgtcgccgaaaccgtcgggagccgcgtcgtcctggggccggggaccggcctcggcgtggctggcctggtgcacgcgcgccgaacctggatccccgttccgggcgagggcggccatatggatcttggaccaaggacagcgcgcgacgagcagatcttcccgcatctggagcggatcgaggggagggtttccggcgaacaggtgctttgcgggcgcggtctcgtcaacctctaccgtgcgatcgcaaaggcggatgccaaggaggctgctttctcctcgcccgctgagattacgacggccgggctggcgcaggccgatgagatcgcggttgagaccctgaacctcttcgtgacctatctcggcagggtcgcgggtgatctcggtcttgtgttcatgagccggggcggagtgttcctgacaggaggcatcgcccagaagatcgtgccggcgctgaagaacagcctgttccgcgccgcctttgaagacaaggcgccgcacaatgaactgatggcgtccatgccggtttatgtcatcacccatccgctggccgcgctgcacgggcttgcggcctatgcccgaacgccagcgcgcttcggcgtcgaaacggcgggccggcgctggcgcttgcgctga

SEQ ID NO: 50081 - protein, 342 aa, Mesorhizobium sp. BNC1
MAYSTDHDVVLDFPILIGDIGGTNARFAIVVDSYAEPREFPVVQTADFATIEDAIQTAILDQTHLIPRSAVLAVAGPVNGDEIDLTNSNWVVRPREMMAHLGFSDIVVLNDFEAQALAVVALGEEHLEKIGGNVAETVGSRVVLGPGTGLGVAGLVHARRTWIPVPGEGGHMDLGPRTARDEQIFPHLERIEGRVSGEQVLCGRGLVNLYRAIAKADAKEAAFSSPAEITTAGLAQADEIAVETLNLFVTYLGRVAGDLGLVFMSRGGVFLTGGIAQKIVPALKNSLFRAAFEDKAPHNELMASMPVYVITHPLAALHGLAAYARTPARFGVETAGRRWRLR

SEQ ID NO: 50082 - DNA, 963 bp, Silicibacter sp. TM1040
  CDS (1)..(963): transl_table=11
atgtggaatctgatcgctgacgtcggcggaacaaacatgcggctggcggccgtgaatgcggagggggagatcctcgagcaagcccggtatgacagcaagggcacgcagaaccttgaagaggcctgtgcagattttgcagcccatcgcggcagcgcgcctggccgtgccgtcattgcggcggcaggtgtggtgcggggcggctccgttcagttgaccaacgccaaccagagtttttccgaacgcgggattgccgtagccctgcaaaccgagcgggtcaaagttctgaatgactttgaagccgctgcctggtcactggcttcggtgagtgcgggggatgtgaccgtgctgcaggggcaggcggtgtttcccaaggaaccctgtctgatcatcggcccgggcaccgggcttggcgtgggggccctgatttgggccaatggcgaaccctgcgttgtccccggcgaaggggggcatgttgccatcggcccgcgcacggccgatgaggtcgcgatctttgaggcgttgcgcgaggaatggcccgagatcggcatggggccggggcttgcggtagaggccgaaggcatcctctcgggcacagggttgccttacttttaccgcgcggttgcgcgcagcatggagctgaccgcgccgctcacgactggggcggagatttttcagtccgcgcaggcccggctcgacaccgcagcggtgcgtgcggtgtcgctctttgcgcagtatctcgccggagtcgcgggggatctcggtctcgtcttcgcggccaaagggggcgtgttcgtcaccgggggcgttgccgccgcaaacccgtggatctttgatgcggcctttgtggaggcgttcaacgcgggtgggcgccacaccgcgtggcgcgaagagctgccgctgcatctctatcatcagcccaatttcggcctgatcggcgcgcgcaattatctgcgcgcccgctga

SEQ ID NO: 50083 - protein, 320 aa, Silicibacter sp. TM1040
MWNLIADVGGTNMRLAAVNAEGEILEQARYDSKGTQNLEEACADFAAHRGSAPGRAVIAAAGVVRGGSVQLTNANQSFSERGIAVALQTERVKVLNDFEAAAWSLASVSAGDVTVLQGQAVFPKEPCLIIGPGTGLGVGALIWANGEPCVVPGEGGHVAIGPRTADEVAIFEALREEWPEIGMGPGLAVEAEGILSGTGLPYFYRAVARSMELTAPLTTGAEIFQSAQARLDTAAVRAVSLFAQYLAGVAGDLGLVFAAKGGVFVTGGVAAANPWIFDAAFVEAFNAGGRHTAWREELPLHLYHQPNFGLIGARNYLRAR

SEQ ID NO: 50084 - DNA, 951 bp, Nitrobacter hamburgensis X14
  CDS (1)..(951): transl_table=11
atgaccgccttgcgggtaatcggcgacatcggcgggacctacgcccgattcgctgtcgcagaacgcggaaagtacagtgagcttcagcatctgagcgtgagcaaatacgctgccttgaaggacgcactcggcgagtatttggctgcgctgcctcgcgacctgcgacccaccagaggagcgcttgcagttgccggtcctgtgtccggagatgaggtgaaactgaccaacctcaactggtctttctcaataaccgcactcaaggccgacttgggtatgagctcactcgtcgttgtcaacgatttcgccgctaccgcaatgtcggttccttatctcccggaagccgactgctatccgataggaccgcctcaatcgaagacgagcggcccggtcggcgtcatcggacccggtactggtctcggggttagcgcgctggttccggacgccggcagatggatcttgctacctggcgaaggcggacattcgacgttgccgccggctacgcaagcggaaagtctcatcgttgaagtacttcgaacccattggccgcatgtctcggcggagcgcgcactctcgggcgcgggcctggtgaatctctatcaggcactctgttcaatagaaggcaaacgtcctgatccgttatcgccggcagatgtgaccgatcgggcaatgcggggaagcgatccgacctgcgtgaaagcattcgaggttttctgttcaatgctggggacagtggccggcgatctagcgctcaccataggcgcaacgggtggcatctacatcgcaggtgggattctgctccgcttcaaggaggcatttgcctcctctccgtttcgggaccgtttcgaagacaagggtcggttccaagactatcttcgcagaattccgactctccttattctagaggaatcgcccgcgcttctaggtcttgccaatcttccacttgagccgtga

SEQ ID NO: 50085 - protein, 316 aa, Nitrobacter hamburgensis X14
MTALRVIGDIGGTYARFAVAERGKYSELQHLSVSKYAALKDALGEYLAALPRDLRPTRGALAVAGPVSGDEVKLTNLNWSFSITALKADLGMSSLVVVNDFAATAMSVPYLPEADCYPIGPPQSKTSGPVGVIGPGTGLGVSALVPDAGRWILLPGEGGHSTLPPATQAESLIVEVLRTHWPHVSAERALSGAGLVNLYQALCSIEGKRPDPLSPADVTDRAMRGSDPTCVKAFEVFCSMLGTVAGDLALTIGATGGIYIAGGILLRFKEAFASSPFRDRFEDKGRFQDYLRRIPTLLILEESPALLGLANLPLEP

SEQ ID NO: 50086 - DNA, 1065 bp, Paracoccus denitrificans PD1222
  CDS (1)..(1065): transl_table=11
gtgatcgacggaaaaacccgcgccgacccgccggggttcccgaaaagttctggcagggatgcgaatgtgagcgctagcaggatcgtgccggatggcttagaagggcccgaacgaggctacgcggcaaaggggggggaaggcatggcgatcctgttggcggatgtgggcggcaccaatgcgcggatggcgctggcgcgggacggcgcgcttgcgtccgggaccatcacccggtttcgcggcgacgaccatgccagcttcgacgaggtggtgacgaagttcctggcccagcagggcagcccgcggatcgacgcggtctgcgtcgccgtcgccggcccggtctggggtgacgaggcgcggctgaccaatcgcgactggaccttttccgaggcgcggctttgcgcgctgtccggcgccccgcgcgcccggctgatcaacgacctgaccgccctgggctatgccacgcccgcgctggacggcgaggcggcgggtttcctgcgcgcggcgcccgagggtgcgttgtcgaacggccagcggctggtggtgaatgccggcaccggcttcaacgtctgcgcggtcaaggtgctgccggacggcgggatcgcctgcctcgaggccgaggaaggccatacccgcctgccgctttcggtggccgatccgctggccgaggcactgggcgatgccggccgtgcgattgattcggtcgaggagctgttcgccggccgcggccttgcccggctgcacgcgctgcgcatgggcacgccgcagggccgggccgaaaccgtggttgccgccgccgccgaaggcgatggcgcggccgaggaaacgctggcgctttatgcccggctgttcgggctcctctgccgcgaacttgccttgcgattcatgccgatggacgggatgttcctggccggcagtgtcgcccgctcctgtaccgatcggttcgaaattttcgagcgcgccttcctctccgacccgctgatggcgcggattccgcaggcggtcccggtcggcgtgatccgcgacgacatggccgcgctgcatggctgtctggccgcaatccgctga

SEQ ID NO: 50087 - protein, 354 aa, Paracoccus denitrificans PD1222
MIDGKTRADPPGFPKSSGRDANVSASRIVPDGLEGPERGYAAKGGEGMAILLADVGGTNARMALARDGALASGTITRFRGDDHASFDEVVTKFLAQQGSPRIDAVCVAVAGPVWGDEARLTNRDWTFSEARLCALSGAPRARLINDLTALGYATPALDGEAAGFLRAAPEGALSNGQRLVVNAGTGFNVCAVKVLPDGGIACLEAEEGHTRLPLSVADPLAEALGDAGRAIDSVEELFAGRGLARLHALRMGTPQGRAETVVAAAAEGDGAAEETLALYARLFGLLCRELALRFMPMDGMFLAGSVARSCTDRFEIFERAFLSDPLMARIPQAVPVGVIRDDMAALHGCLAAIR

SEQ ID NO: 50088 - DNA, 957 bp, Pseudomonas fluorescens
  CDS (1)..(957): transl_table=11
gtgaaactggccctggtcggtgatatcggtggcaccaacgcgcgcttcgcgttgtggaaagaccaacaactggaggcgatcgaagtccacgccaccgcggactacagctgcccggaagacgccatcaaggcctacctgcgggaccaggggctggccctgggtgccataggttcggtgtgcctgtcggtggccggcccggtcagcggcgatgagtttcgcttcaccaacaaccactggcgcctgagccgccaggctttctgccaggctttgcaggtggaccaactgctgttggtcaatgacttctcggccatggccctgggcatgacccgcctgcagccggatgaatttcgcgtggtctgcgaaggcgttgccgagcccttgcgcccggccgtggtgatcggcccgggcacgggcctcggggtgggcaccctgctgaacttcggcgacggtcgttacatggccttgccgggagagggcgggcatgtcgacctgcccttgagcagtgcgcgggaaacccagctctggcagcacattcacgacgagatcggccatgtcagcgccgagaccgccctcagcggtggcggcctgccccgggtgtatcgggcgatctgtgcggtggacggccatgagccgcggctcgagactccggaggccatcaccgcggccggcctggccggcgacccgatcgcccgggaagtgctggagcagttcagctgctggctgggccgggtggcgggcaacaacgtgctgaccaccggggggcgtggcggggtgtacatcgtcggtggggtgattccgcgctttgccgatttcttcatccacagcggctttgccaagagctttgccgacaagggttgcatgagcgattacttcaagggcatcccagtgtggctggtgaccgcgccctattccgggctcaccggtgccggcgtggccctggagcaggcccagggctga

SEQ ID NO: 50089 - protein, 318 aa, Pseudomonas fluorescens
MKLALVGDIGGTNARFALWKDQQLEAIEVHATADYSCPEDAIKAYLRDQGLALGAIGSVCLSVAGPVSGDEFRFTNNHWRLSRQAFCQALQVDQLLLVNDFSAMALGMTRLQPDEFRVVCEGVAEPLRPAVVIGPGTGLGVGTLLNFGDGRYMALPGEGGHVDLPLSSARETQLWQHIHDEIGHVSAETALSGGGLPRVYRAICAVDGHEPRLETPEAITAAGLAGDPIAREVLEQFSCWLGRVAGNNVLTTGGRGGVYIVGGVIPRFADFFIHSGFAKSFADKGCMSDYFKGIPVWLVTAPYSGLTGAGVALEQAQG

SEQ ID NO: 50090 - DNA, 1032 bp, Giardia lamblia ATCC 50803
  CDS (1)..(1032)
atgccatattcgctttctggtgacctgggcggcactaagtgctttcttgccattcacgacctcgatgtcctgaagaccgatcctcgtgccgctcctctccttgagcacgagctcctttgcaaagactatcaatctacgggagacctcatcaacgatttcctcaagcgctgggatagggagacgcccatcgttggctgcctcggcgtagctggtcccgtaaccaatggacgagtgtgcattacaaacttagactggaacgagagcgaagaggagctgcagaacacgacaggcgtgggcaaaatgaagcttatcaacgactttgcggccatcggctacgggcttctggctatccgtcctgacgactatctcgactttgacgcaagaaacggctccgtgagtacccctactgtcgttccggacaactcgaccgggatcgtctcctacgcaggtgctgggacaggctttggcgttggatttgtcgctgatggagtcgcatacgcagctgagggcgggcacacgacgttttctcccatggaagccgaagaccatgcacttgcgcaattcatcaaggaaaagtacaacacggatcatgtcagtttcgagcgcgttgtctctggtcttggtcttcgcaatatgcacgacttcttctggaagaatttgagtggtctggcgagtcctgtgctccgagaacacgtgctctccagagaccacgacatcgacatgggcttccttgccaaatgtgcggagacaggggataagtatgcactcaagattttcaagaaattcttttactattacggcttctaccttggcaacatctgtgtcctcttcaggcccaaggattacttcattgccggtgggattctggccaaggatctcaaccttgtttgcggaccctgccgtgaggatttctgtcgtgggctgtacacaaaggggcgaatgtcccacctgccaaatggagtgtcgttccatgttgtgacaaaccagaagctcggcattgttggagctgcttatttctgtactaagatgtag

SEQ ID NO: 50091 - protein, 343 aa, Giardia lamblia ATCC 50803
MPYSLSGDLGGTKCFLAIHDLDVLKTDPRAAPLLEHELLCKDYQSTGDLINDFLKRWDRETPIVGCLGVAGPVTNGRVCITNLDWNESEEELQNTTGVGKMKLINDFAAIGYGLLAIRPDDYLDFDARNGSVSTPTVVPDNSTGIVSYAGAGTGFGVGFVADGVAYAAEGGHTTFSPMEAEDHALAQFIKEKYNTDHVSFERVVSGLGLRNMHDFFWKNLSGLASPVLREHVLSRDHDIDMGFLAKCAETGDKYALKIFKKFFYYYGFYLGNICVLFRPKDYFIAGGILAKDLNLVCGPCREDFCRGLYTKGRMSHLPNGVSFHVVTNQKLGIVGAAYFCTKM

SEQ ID NO: 50092 - DNA, 1035 bp, Agrobacterium tumefaciens
  CDS (1)..(1035): transl_table=11
atggaacaggcaatgccgaagacgtccgataccgaatatctgtcctttccgatccttcttggcgacatcggcggcaccaatgcccgcttttccatcctgatcgattcctttgctgaaccggtgcacctcaccacggtgaagacggcggaatatcctggtatcgatgacgcgatccagcaggcggttctggacaagacctctcttcagccggtctcgaccattcttgcaattgccggcccgatcgaaggcgacgagattccgttgaccaactgccactgggtcgtcaagccgaaggacatgctggccaagctcggcctgaaggacgtcatcgtcatcaacgactttgaggcgcaggctctggcgattgcggctcttgacgacgacaaccgggagcctatcggctccggtaaaaaggacatgctggcgtcgcgcgtcgttcttggaccgggcacggggcttggcgtcgccgggctggtctatgcccgccatatgtggtttccggtgcctggcgaaggcgggcatatcgatatcggcccgagaagcgcgcgcgactatgtggttttcccccatatcgaaaccatcgagggccgcgtcgccggcgaacagatcctgtgcggacgcgggctggtcaatctttatcgggccatctgcaaagccgacggcatcgagcctgtcttttccgatccggccgacatcacctcgcaggggctttcgggccagaacgcgcaggcaaaagaaacgctgtcgctgttcagcacctatctcggccgcgtggcgggcgaccttgcgctgatcttcatggccaagggcggcgtttatctggccggcggtatttcgcagaagatcatccctgcgctgaagagcccggaattccgggcggcgttcgaagacaaggcgccgcacagcgctctgatgcggaccattccgacattcgtcgtcacccatcctcaggcggccctttccggcctcgccacctatgcgagaacgcctgccgatttcggtcttgcgctggacgggcggcgctggagggcttga

SEQ ID NO: 50093 - protein, 344 aa, Agrobacterium tumefaciens
MEQAMPKTSDTEYLSFPILLGDIGGTNARFSILIDSFAEPVHLTTVKTAEYPGIDDAIQQAVLDKTSLQPVSTILAIAGPIEGDEIPLTNCHWVVKPKDMLAKLGLKDVIVINDFEAQALAIAALDDDNREPIGSGKKDMLASRVVLGPGTGLGVAGLVYARHMWFPVPGEGGHIDIGPRSARDYVVFPHIETIEGRVAGEQILCGRGLVNLYRAICKADGIEPVFSDPADITSQGLSGQNAQAKETLSLFSTYLGRVAGDLALIFMAKGGVYLAGGISQKIIPALKSPEFRAAFEDKAPHSALMRTIPTFVVTHPQAALSGLATYARTPADFGLALDGRRWRA

SEQ ID NO: 50094 - DNA, 1029 bp, Anabaena sp
  CDS (1)..(1029): transl_table=11
atgaccttattgttagcaggagatatcggcgggacgaaaacgattttgcgattggtagaaatatcaaattcgtcggaactgcacaatatttatgaggaaagttaccagagtggggattttccagatttagtgccgatggtgcagcaattcttagtcaaggctaatatacctagtcaccccgaaaaggcttgctttgcgatcgctggccctgtggtgaataatactgccaaactgaccaatttagtctggtttttggacactgaacggctagcacaagaattaagtattcccttcatttccttaattaatgattttgctgctgttggctatgggatttttgggttaaataaacaagacttgctgaccttacaagctggtaaacatcaaccagaagcacctattgctattattggtgctggcactggattaggacaaggatttttaattaaacagggaaaccagtatcaagttttcccctcggaaggtggacacgccgactttgccccccgcaacgagttagagtttcagttgttgaaatatctgctggataaacatgatatccagcgcgtttctgtggaaagggtggtttctggacaggggattgtcgccatttatcaatttttacgcgatcgcaaactcgctacagaatcgccagaaattgctcaagttgtccgcacttgggaacaacaagcaggacaggctgaaaaaaccgttgatcctggtgcggctattggtaaagccgcagtccaaggaagcgatcgcctttcggaacaagccctacaattatttatcgatgcttacggtgcagaagcgggaaatcttgccctcaaactcctaccatacggcggcttgtacattgcgggtgggattgcgcctaaaatcctacctttgattgaaaatagcaattttttgcttaatttcagccaaaaaggcagaatgcgtcctctgctagcagaaataccggtgcatattattctcaatcaacaagtgggactcataggtgctgctttgtgtgctgctaggttataa

SEQ ID NO: 50095 - protein, 342 aa, Anabaena sp
MTLLLAGDIGGTKTILRLVEISNSSELHNIYEESYQSGDFPDLVPMVQQFLVKANIPSHPEKACFAIAGPVVNNTAKLTNLVWFLDTERLAQELSIPFISLINDFAAVGYGIFGLNKQDLLTLQAGKHQPEAPIAIIGAGTGLGQGFLIKQGNQYQVFPSEGGHADFAPRNELEFQLLKYLLDKHDIQRVSVERVVSGQGIVAIYQFLRDRKLATESPEIAQVVRTWEQQAGQAEKTVDPGAAIGKAAVQGSDRLSEQALQLFIDAYGAEAGNLALKLLPYGGLYIAGGIAPKILPLIENSNFLLNFSQKGRMRPLLAEIPVHIILNQQVGLIGAALCAARL

SEQ ID NO: 50096 - DNA, 1032 bp, Brucella abortus
  CDS (1)..(1032): transl_table=11
atgcaagcgattatcgacgccgaacagagtttcaagtttccggttctcgtcggcgatatcggcggcaccaatgcccgtttttctatcctcgtggattcaaacgcggagccgaaggagtttcccgtgctccagacggcggattatgccacaatagacgaagcgatccagcacgccattctggatcagacggccatccagccgcgctctgtcattctggccgtggcaggcccggtggacggcgacgagatcgacctcaccaattgcgactgggtcgtgcgtcctaaaaagatgatcgctgatctgggctttgaagacgtgaccgtcctcaatgatttcgaggcgcaggcccttgccgtggtttcgctggaaggccaccatatggaacagatcggcggcaaaccggaggaggctgttgccacccgcgtcgtgctcggccccggcacgggccttggcgtggcaggtctgtttcgcacacgtcatgcatgggttccggttcccggtgaaggcggtcatatcgatatcggtccacgcaccgaacgcgactaccagattttcccgcatatcgaacgcatcgaagggcgtgtcaccggcgagcaaattcttagcgggcggggcctgcgcaacctctatctgggcatctgcgccgccgacaagatcacgcccacccttgagacgccagtagacattacatccgccggactggacggcagcaatccacaagccgcagaaacgcttgacctcttcgccacctatctggggcggcttgcgggcgaccttgcgctcattttcatggcgcatggcggcgtttatctttcgggtggcatcccggtgcgcatcctttccgccctcaaggccggttcgttccgcgcaaccttcgaggacaaggccccgcacaaggccatcatgcgcgacataccggtccgcgttatcacatatcaactggcggccttaaccgggctttccgctttcgcccgcaccccctcgcgctttgaagtttcgaccgagggccgccgctggcgcatgcgccgctag

SEQ ID NO: 50097 - protein, 343 aa, Brucella abortus
MQAIIDAEQSFKFPVLVGDIGGTNARFSILVDSNAEPKEFPVLQTADYATIDEAIQHAILDQTAIQPRSVILAVAGPVDGDEIDLTNCDWVVRPKKMIADLGFEDVTVLNDFEAQALAVVSLEGHHMEQIGGKPEEAVATRVVLGPGTGLGVAGLFRTRHAWVPVPGEGGHIDIGPRTERDYQIFPHIERIEGRVTGEQILSGRGLRNLYLGICAADKITPTLETPVDITSAGLDGSNPQAAETLDLFATYLGRLAGDLALIFMAHGGVYLSGGIPVRILSALKAGSFRATFEDKAPHKAIMRDIPVRVITYQLAALTGLSAFARTPSRFEVSTEGRRWRMRR

SEQ ID NO: 50098 - DNA, 1032 bp, Brucella melitensis
  CDS (1)..(1032)
atgcaagcgattatcgacgccgaacagagtttcaagtttccggttctcgtcggcgatatcggcggcaccaatgcccgtttttctatcctcgtggattcaaacgcggagccgaaggagtttcccgtgctccagacggcggattatgccacaatagacgaagcgatccagcacgccattctggatcagacggccatccagccgcgctctgtcattctggccgtggcaggcccggtggacggcgacgagatcgacctcaccaattgcgactgggtcgtgcgtcctaaaaagatgatcgctgatctgggctttgaagacgtgaccgtcctcaatgatttcgaggcgcaggcccttgccgtggtttcgctggaaggccaccatatggaacagatcggcggcaaaccggaggaggctgttgccacccgcgtcgtgctcggccccggcacgggccttggcgtggcaggtctggtttgcacacgtcatgcatgggttccggttcccggtgaaggcggtcatatcgatatcggtccacgcaccgaacgcgactaccagattttcccgcatatcgaacgcatcgaagggcgtgtcaccggcgagcaaattcttagcgggcggggcctgcgcaacctctatctgggcatctgcgcggccgacaagatcacgcccacccttgagacgccagtagacattacatccgccggactggacggcagcaatccacaagccgcagaaacgcttgacctcttcgccacctatctggggcggcttgcgggcgaccttgcgctcattttcatggcgcatggcggcgtttatctttcgggtggcatcccggtgcgcatcctttccgccctcaaggccggttcgttccgcgcagccttcgaggacaaggccccgaacaaggccatcatgcgcgacataccggtccgcgttatcacatatcaactggcggccttaaccgggctttccgctttcgcccgcaccccctcgcgctttgaagtttcgaccgagggccgccgctggcgcatgcgccgctag

SEQ ID NO: 50099 - protein, 343 aa, Brucella melitensis
MQAIIDAEQSFKFPVLVGDIGGTNARFSILVDSNAEPKEFPVLQTADYATIDEAIQHAILDQTAIQPRSVILAVAGPVDGDEIDLTNCDWVVRPKKMIADLGFEDVTVLNDFEAQALAVVSLEGHHMEQIGGKPEEAVATRVVLGPGTGLGVAGLVCTRHAWVPVPGEGGHIDIGPRTERDYQIFPHIERIEGRVTGEQILSGRGLRNLYLGICAADKITPTLETPVDITSAGLDGSNPQAAETLDLFATYLGRLAGDLALIFMAHGGVYLSGGIPVRILSALKAGSFRAAFEDKAPNKAIMRDIPVRVITYQLAALTGLSAFARTPSRFEVSTEGRRWRMRR

SEQ ID NO: 50100 - DNA, 1032 bp, Brucella suis
  CDS (1)..(1032)
atgcaagcgattatcgacgccgaacagagtttcaagtttccggttctcgtcggcgatatcggcggcaccaatgcccgtttttctatcctcgtggattcaaacgcagagccgaaggagtttcccgtgctccagacggcggattatgccacaatagacgaagcgatccagcacgccattctggatcagacggccatccagccgcgctctgtcattctggccgtggcaggcccggtggacggcgacgagatcgacctcaccaattgcgactgggtcgtgcgtcctaaaaagatgatcgctgatctgggctttgaagacgtgaccgtcctcaatgatttcgaggcgcaggcccttgccgtggtttcgctggaaggccaccatatggaacagatcggcggcaaaccggaggaggctgttgccacccgcgtcgtgctcggccccggcacgggccttggcgtggcaggtctggttcgcacacgtcatgcatgggttccggttcccggtgaaggcggtcatatcgatatcggtccacgcaccgaacgcgactaccagattttcccgcatatcgaacgcatcgaagggcgtgtcaccggcgagcaaattcttagcgggcggggcctgcgcaacctctatctgggcatctgcgccgccgacaagatcacgcccacccttgagacgccagtagacattacatccgccggactggacggcagcaatccacaagccgcagaaacgcttgacctcttcgccacctatctggggcggcttgcgggcgaccttgcgctcattttcatggcgcatggcggcgtttatctttcgggtggcatcccggtgcgcatcctttccgccctcaaggccggttcgttccgcgcagccttcgaggacaaggccccgcacaaggccatcatgcgcgacataccggtccgcgttatcacatatcaactggcggccttaaccgggctttccgctttcgcccgcaccccctcgcgctttgaagtttcgaccgagggccgccgctggcgcatgcgccgctag

SEQ ID NO: 50101 - protein, 343 aa, Brucella suis
MQAIIDAEQSFKFPVLVGDIGGTNARFSILVDSNAEPKEFPVLQTADYATIDEAIQHAILDQTAIQPRSVILAVAGPVDGDEIDLTNCDWVVRPKKMIADLGFEDVTVLNDFEAQALAVVSLEGHHMEQIGGKPEEAVATRVVLGPGTGLGVAGLVRTRHAWVPVPGEGGHIDIGPRTERDYQIFPHIERIEGRVTGEQILSGRGLRNLYLGICAADKITPTLETPVDITSAGLDGSNPQAAETLDLFATYLGRLAGDLALIFMAHGGVYLSGGIPVRILSALKAGSFRAAFEDKAPHKAIMRDIPVRVITYQLAALTGLSAFARTPSRFEVSTEGRRWRMRR

SEQ ID NO: 50102 - DNA, 996 bp, Caulobacter crescentus
  CDS (1)..(996): transl_table=11
atggacggcaatcacagcggcgggctcggcctcgtcggcgacatcggcggtacgaacgcccgcttcgccctggtcgagttcgacggtcaggacccgcgcctgatcgagccgacggcctataggggcgaggactacggcacggccgaggacgccatcgaggagtatctccgcaaggtcggtgtcaagcatcctgaccaggcggtggtcgctgtggccgggccgatcgaccacggtcaggtccacatgaccaatctggactggcggatctccgaggacggcctgcgccgcgcaggcggttttcggaacgccaagctgatcaacgacttcaccgcccaggcgctggccgcgccgcgcgttggccctaaggacctgcgccagatcggcgaattgccgacgtcgggggagggcgatctggcgatcctgggtccaggcaccggcttcggcgtcgcaggccttgtccgtcgccatggccaggagatcccgctggccaccgagggtggtcacgtcgccttcgcgccggtcgatgacgtcgagatcgaggtgctccgcgccctgacccggcgcctggacggcggtcgggtgtcggtcgagcggatcctgtcgggtcccggcatggaggacctccatgtggatctggcggccgctgaagggcgcggtgtcgaggcgctgaccgccaagcagatcaccgagcgggccgtagagggctgcgccgacagcctggcgacggtgaaccgtttctgcgccatcctgggctcaacggcgggcgacatcgctctgaccttgggcgcacgcggcggtgttttcatcgccggcggcatcgcaccacgcatcatcgacattctggagaagagcccgttccgcgagcgcttcgacagcaaggggcgtctgtccggcttcacccgttcgatcccgacgcacgtgatcctgcatccgcacaccgccctgatcggtgcggcggtggcgctcacgccggagggccgtgcggcggtgtcgtag

SEQ ID NO: 50103 - protein, 331 aa, Caulobacter crescentus
MDGNHSGGLGLVGDIGGTNARFALVEFDGQDPRLIEPTAYRGEDYGTAEDAIEEYLRKVGVKHPDQAVVAVAGPIDHGQVHMTNLDWRISEDGLRRAGGFRNAKLINDFTAQALAAPRVGPKDLRQIGELPTSGEGDLAILGPGTGFGVAGLVRRHGQEIPLATEGGHVAFAPVDDVEIEVLRALTRRLDGGRVSVERILSGPGMEDLHVDLAAAEGRGVEALTAKQITERAVEGCADSLATVNRFCAILGSTAGDIALTLGARGGVFIAGGIAPRIIDILEKSPFRERFDSKGRLSGFTRSIPTHVILHPHTALIGAAVALTPEGRAAVS

SEQ ID NO: 50104 - DNA, 966 bp, Escherichia coli O6
  CDS (1)..(966): transl_table=11
atgacaaagtatgcattagtcggtgatgtgggcggcaccaacgcacgtcttgctctgtgtgatattgccagtggtgaaatctcgcaggctaagacctattcagggcttgattaccccagcctcgaagcggtcattcgcgtttatcttgaagaacataaggtcgaggtgaaagacggctgtattgccatcgcttgcccaattaccggtgactgggtggcaatgaccaaccatacctgggcgttctcaattgccgaaatgaaaaagaatctcggttttagccatctggaaattattaacgattttactgctgtatcgatggcgatcccgatgctgaaaaaagagcatctgattcagtttggtggcgcagaaccggtagaaggtaagcctattgcggtttacggtgccggaacagggcttggggttgcgcatctggtccatgtcgataagcgttgggtaagcttgccaggagaaggcggtcacgttgattttgcgccgaatagtgaagaagagggcattatcctcgaaatattgcgtgcggaaattggtcatgtttcggcggaacgcgtgctttctggccctggactggtgaatttgtatcgcgcaattgttaaagccgacaaccgcctgccagaaaatctcaagccaaaagatattaccgaacgcgcgctggctgacagctgcaccgattgccgccgcgcgttgtcgctgttttgcgtcattatgggccgttttggcggcaatctggcgctcaatctcgggacatttggcggcgtgtttattgcgggtggtatcgtgccgcgcttccttgagttcttcaaagcctctggtttccgcgccgcatttgaagataaagggcgctttaaagaatatgtccatgatattccggtgtatctcatcgtccatgacaatccgggccttctcggttccggtgcacatttacgccagaccttaggtcacattctctaa

SEQ ID NO: 50105 - protein, 321 aa, Escherichia coli O6
MTKYALVGDVGGTNARLALCDIASGEISQAKTYSGLDYPSLEAVIRVYLEEHKVEVKDGCIAIACPITGDWVAMTNHTWAFSIAEMKKNLGFSHLEIINDFTAVSMAIPMLKKEHLIQFGGAEPVEGKPIAVYGAGTGLGVAHLVHVDKRWVSLPGEGGHVDFAPNSEEEGIILEILRAEIGHVSAERVLSGPGLVNLYRAIVKADNRLPENLKPKDITERALADSCTDCRRALSLFCVIMGRFGGNLALNLGTFGGVFIAGGIVPRFLEFFKASGFRAAFEDKGRFKEYVHDIPVYLIVHDNPGLLGSGAHLRQTLGHIL

SEQ ID NO: 50106 - DNA, 966 bp, Erwinia carotovora
  CDS (1)..(966): transl_table=11
atgacgcactttgttttagtgggcgatgtcggcggcaccaatacgcgtttggcgctgtgtgacgccatgacgggcgaattgtcgcaaattgagacgtattccgggctggatttcccttctctggaaggggcgatccgcgattatctcgattcgcggcaggtcacggtgcaggatgcctgtatcgcgattgcctgcccgattaccggtgactgggtagcgatgacgaaccacacctgggcattttccatcgctgaaatgaaagcgagtctgggtttacgccactttgaggttatcaacgattttaccgcagtttccatggcggttccggtgatggggcgtgagagtttgctccagttcggtggtggggaacctgtgccgggtaagcccgttgccgtgtatggcgcaggcacggggctcggtgtcgctcatctggttcatgttgccaaccaatgggtcagcctgccgggtgaaggtgggcatgtggatttcgcggccaatagcgatgaagaagacaacattctgactattttgcgccaatcgttggggcatgtttccgcggagcgcttgctgtctggtcaggggctggtgaatatttaccgcgccatcgtgctatctgacgatcgtacaccggaggcgctggagccgaaggatattaccgaacgtgccgtcaacaatactgacgtggattgtcgtcgcgcgctgtcgctattctgcgtcatcatggggcgcttcggtggtaatttggcgctgaatttaggcacgtttggcggcgtttatattgctggcggcatcgtaccgcgctttctggaattttttaaagcctctggctttcgtgcggcttttgaagataaagggcgatttaaaggctatatgcaggatatccccgtgtatctgattacgcatgaacagccgggattaatgggggcaggggcttatctgcgacaggtgctgggcagcgcgctgtaa

SEQ ID NO: 50107 - protein, 321 aa, Erwinia carotovora
MTHFVLVGDVGGTNTRLALCDAMTGELSQIETYSGLDFPSLEGAIRDYLDSRQVTVQDACIAIACPITGDWVAMTNHTWAFSIAEMKASLGLRHFEVINDFTAVSMAVPVMGRESLLQFGGGEPVPGKPVAVYGAGTGLGVAHLVHVANQWVSLPGEGGHVDFAANSDEEDNILTILRQSLGHVSAERLLSGQGLVNIYRAIVLSDDRTPEALEPKDITERAVNNTDVDCRRALSLFCVIMGRFGGNLALNLGTFGGVYIAGGIVPRFLEFFKASGFRAAFEDKGRFKGYMQDIPVYLITHEQPGLMGAGAYLRQVLGSAL

SEQ ID NO: 50108 - DNA, 1011 bp, Helicobacter pylori J99
  CDS (1)..(1011): transl_table=11
atgccaaaaactgaaacttacccaagactattagccgatattggcggcacaaatgcgcgttttggtttggaagtcgccccacgacagattgaatgcgttgaagtcttgaggtgcgaagattttgagagcttgagtgatgcggtgcgattttacctttctaaatgcaaagaaagccttaaactgcaccctatttatggctcttttgctgtggctacgcccattatgggggattttgtccaaatgacgaacaaccactggactttttctattgaaacgacacggcaatgtttgaatttaaaaaaactgcttgtcatcaatgattttgtcgcgcaagcctatgccattagcgcgatgcaagaaaacgatctagcccaaataggcgggattaagtgtgaaatcaacgctcctaaagcgattttagggccaggaaccgggcttggggtaagcactcttatccaaaacagcgatggctctttgaaagtcttgcccggcgaaggtgggcatgtgagctttgccccttttgatgatttagaaattttagtgtggcaatacgcccgctctaaattcaaccatgtgagcgcggaaaggtttttgagcggtagcggcctggtgttgatttatgaagccctgtctaaacgcaaaggcttagaaaaagtggcgaagttgagcaaggctgaattaaccccacaaatcattagcgaacgcgctttgaatggggattaccctatatgccgattgaccttggacactttttgctccatgcttggcacgctcgctgctgatgtggctctcactttgggggctagagggggggtgtatttgtgtggggggattatcccacgattcattgattattttaaaacttcgccctttagagcgcgttttgaaacgaaagggcgcatgggagcgtttctcgcttccatccctgtgcatgtcgtgatgaaaaaaactcccggacttgatggggcgggcattgcgttagaaaattatttactgcatgatagaatatag

SEQ ID NO: 50109 - protein, 336 aa, Helicobacter pylori J99
MPKTETYPRLLADIGGTNARFGLEVAPRQIECVEVLRCEDFESLSDAVRFYLSKCKESLKLHPIYGSFAVATPIMGDFVQMTNNHWTFSIETTRQCLNLKKLLVINDFVAQAYAISAMQENDLAQIGGIKCEINAPKAILGPGTGLGVSTLIQNSDGSLKVLPGEGGHVSFAPFDDLEILVWQYARSKFNHVSAERFLSGSGLVLIYEALSKRKGLEKVAKLSKAELTPQIISERALNGDYPICRLTLDTFCSMLGTLAADVALTLGARGGVYLCGGIIPRFIDYFKTSPFRARFETKGRMGAFLASIPVHVVMKKTPGLDGAGIALENYLLHDRI

SEQ ID NO: 50110 - DNA, 1011 bp, Helicobacter pylori
  CDS (1)..(1011): transl_table=11
atgccaaaaactgaaacttacccaagactcttagccgatattggcggcacgaacgcgcgctttggcttggaagtcgccccacgacagattgaatgcattgaagtcttgaggtgcgaagattttgagagcttgagcgatgcggtacgattttacctttctaaatgcaaagaaagccttaaactgcaccctatttatggctcttttgctgtggctacgcccattatgggggattttgtccaaatgactaacaaccactggactttttctattgaaacgacgcggcaatgtttgactttaaaaaaattgcttgtcatcaatgattttgtcgcgcaagcctatgccattagcgcgatgcaagaaaacgatctggctcaaataggcgggattaagtgcgaaatcaacgctcctaaggcgattttagggccaggaacggggcttggggtaagcactcttatccaaaacagcgatggctctttaaaagtcttgcccggtgaaggagggcatgtgagctttgccccttttgatgatttagaaattttagtgtggcaatacgcccgttctaaattcaaccatgtgagcgcggaaaggtttttgagtgggagcggtttggtgctgatttatgaagccctgtctaaacgcaaaggtttagaaaaagtggcgaagttaagcaaggctgaattaaccccacaaattattagcgaatgcgctttgaatggggattaccctatatgccgattgaccttggacactttttgctccatgcttggcacgctcgctgctgatgtggctctcactttgggggctagggggggcgtgtatttgtgtggggggattatcccacgattcattgattattttaaaacttcgccctttagagcacgttttgaaacgaaagggcgcatgggagcgtttctcgcttctatccctgtgcatgtcgtgctgaaaaaaactcccggacttgatggggcgggcattgcgttagagaattacttactgcatgataagatatag

SEQ ID NO: 50111 - protein, 336 aa, Helicobacter pylori
MPKTETYPRLLADIGGTNARFGLEVAPRQIECIEVLRCEDFESLSDAVRFYLSKCKESLKLHPIYGSFAVATPIMGDFVQMTNNHWTFSIETTRQCLTLKKLLVINDFVAQAYAISAMQENDLAQIGGIKCEINAPKAILGPGTGLGVSTLIQNSDGSLKVLPGEGGHVSFAPFDDLEILVWQYARSKFNHVSAERFLSGSGLVLIYEALSKRKGLEKVAKLSKAELTPQIISECALNGDYPICRLTLDTFCSMLGTLAADVALTLGARGGVYLCGGIIPRFIDYFKTSPFRARFETKGRMGAFLASIPVHVVLKKTPGLDGAGIALENYLLHDKI

SEQ ID NO: 50112 - DNA, 987 bp, Neisseria meningitidis
  CDS (1)..(987): transl_table=11
atgtcttctacgccgaataaacaagccggatatccccgactggtcgccgatatcggcgggacgaatgcacgctttgcgctggaaaccgcgccgcgcgtcattgaaaaagccgccgtgcttccgtgtaaagactacgatacggttaccgatgcggtgcgtgcctatctgaatcaaagcggtgcaacagccgtacggcacgcggcatttgccatcgccaacccgattttgggcgactgggtgcagatgaccaaccaccattgggcgttttccatcgaaaccacccgtcagactttggggctggacaccctcatccttttgaacgactttaccgcgcaggcattggcggtaacgcagacttcaagcaaagacctgatgcaggtaggcgggcaaaagcctgtcgaatttgcccccaaagccgttatcggccccggtaccggcctgggcgtgagcggattggtgcacagccacgcaggctgggtggctttggcaggcgagggcgggcataccagtttcccgccgtttgacgatatggaagtgctgatttggcagtacgccaaaaacaaatacggccatgtttccgccgaacgctttttgagcggcgcgggcttgagcttggtttacgaggctttggctgcaaaacagaaagccaaacccgccaaactgatgccgtctgaaatcacggaaaaggctttgagcggcgcgtcgcctttgtgccgtcagactttggacatcttctgcgccatgctcggcacggttgcttccaacctcgccctgacgctgggtgcgcgcggcggcgtgtacctgtgtggcggcattattccccgcgtgttggaatatttcaaaacttccccgttccgcagccgtttcgagaacaagggcaggtttgaagcatatcttgccgcgattcccgtgtatgtcgtcttgagcgagtttcccggaatttccggtgcggctgcggctctcgacaaccatttgagaaacgtttaa

SEQ ID NO: 50113 - protein, 328 aa, Neisseria meningitidis
MSSTPNKQAGYPRLVADIGGTNARFALETAPRVIEKAAVLPCKDYDTVTDAVRAYLNQSGATAVRHAAFAIANPILGDWVQMTNHHWAFSIETTRQTLGLDTLILLNDFTAQALAVTQTSSKDLMQVGGQKPVEFAPKAVIGPGTGLGVSGLVHSHAGWVALAGEGGHTSFPPFDDMEVLIWQYAKNKYGHVSAERFLSGAGLSLVYEALAAKQKAKPAKLMPSEITEKALSGASPLCRQTLDIFCAMLGTVASNLALTLGARGGVYLCGGIIPRVLEYFKTSPFRSRFENKGRFEAYLAAIPVYVVLSEFPGISGAAAALDNHLRNV

SEQ ID NO: 50114 - DNA, 966 bp, Photorhabdus luminescens
  CDS (1)..(966): transl_table=11
atgaatctctacggacttgttgctgatattggcggcactaatgccagattagcactttgcaatttggaaaatggggttattgagcggatcgaaacatatagtgcaaaacaacacgccggattagaatctattatcagtcactatttagcagagcaaaaaacagtagtgacttatgcatgtattgctattgcttgcccgataaacggtgattgggtagaaatgaccaatcaccaatgggcattttctattagtgagctgaaacggacacttgggctagaaaaattagatgtgatcaatgacttcacggctgtatctatggctattccaatgctgacagaagaatacaagcttcaattaggaggaggagaagcggttaaagacaaaccgatagcggtttacggggcagggactggcctcggtgtcgctcatttgatcaaggtagacaagcaatgggtaagcttaccgggtgaaggtggtcatgtagattttgccgcgaatagtgaagaacaagatgcaatattggctgttttacggcgtaaatttgggcatgtttcagtagaaagaatcttgtccggtagtggattggtaaacctttatcaggccattgccattttggatcatcgtcagccggaagatttagaaccagaaaccgtgacgcaacgagcattggataaaagttgccaatattgccatcgtgctctgacactattttgtgaaattatggggcgatttggcggaaatttagcgttaaatatggggacttttggtggtgtgtatatcgctggtggtatagtgccgcggtttcttgatttctttaggcaatcgaactttcttcatggatttgaagataaagggcgctttaaaccgttagtacaacagattcctgtttatttgattactcatccacaaccaggattattaggttcaggtacctatttacggcaacagctttcacttattgattaa

SEQ ID NO: 50115 - protein, 321 aa, Photorhabdus luminescens
MNLYGLVADIGGTNARLALCNLENGVIERIETYSAKQHAGLESIISHYLAEQKTVVTYACIAIACPINGDWVEMTNHQWAFSISELKRTLGLEKLDVINDFTAVSMAIPMLTEEYKLQLGGGEAVKDKPIAVYGAGTGLGVAHLIKVDKQWVSLPGEGGHVDFAANSEEQDAILAVLRRKFGHVSVERILSGSGLVNLYQAIAILDHRQPEDLEPETVTQRALDKSCQYCHRALTLFCEIMGRFGGNLALNMGTFGGVYIAGGIVPRFLDFFRQSNFLHGFEDKGRFKPLVQQIPVYLITHPQPGLLGSGTYLRQQLSLID

SEQ ID NO: 50116 - DNA, 996 bp, Pseudomonas aeruginosa
  CDS (1)..(996): transl_table=11
atgaataacgacaacaagagaagcgccggcggcctcggcctggtcggcgatatcggcggcaccaatgcgcgtttcgcgctctggcgcgggcagcgcctggaatccatcgaggtgctcgcctgcgccgactacccgcggcctgaactggccgtgcgcgactacctggcgcggatcggcgaatcggtggcgaacatcgactcggtctgcctggcctgcgccggtccggtcggggcggccgatttccgtttcaccaacaaccactgggtgatcaatcgtgccgcgttccgcgaggagctggggctggatcacctgctgctggtcaacgacttcagcaccatggcctgggccgcctcgcggctaggtgcggacgagctggtgcaggtccgcgccggcagtgcccaggcggatcgcgcccggctgatcatcggtcccggcaccggccttggcgtcggcagcctgctgccgctgggcgggggacgttgggaagtgctgccctgcgagggcgggcacgtcgacctgccggtcacttcgccgcgcgacttcgcgctctggcagggcctgcaggcgcgctacggacatgtctccgccgagcgcgcactgtccggcaacggcctgctcgccctctatgaaatcagctgtgccctggacggggtcgccgtacgcgcgagcagtgcggcggaagtcggtgccctggccatggccggcgacgcccaggcggacgccgtgctggagcacttcttcctgtggctggcgcgggtcgccggcaacgcggtgctcaccgtcggcgcgctcggtggcgtctacattaccggcggcatcgtcccgcgtttcctcgagcgtttcatcgccagcggcttcgccgaggccttcgccagccgtggcaagactagcggcgcttacctgcaggacgtaccggtgtgggtcatgaccgccgaacatccgggcctgctcggcgccggggtcgccctgcagcaggccctggacgccgagggctga

SEQ ID NO: 50117 - protein, 331 aa, Pseudomonas aeruginosa
MNNDNKRSAGGLGLVGDIGGTNARFALWRGQRLESIEVLACADYPRPELAVRDYLARIGESVANIDSVCLACAGPVGAADFRFTNNHWVINRAAFREELGLDHLLLVNDFSTMAWAASRLGADELVQVRAGSAQADRARLIIGPGTGLGVGSLLPLGGGRWEVLPCEGGHVDLPVTSPRDFALWQGLQARYGHVSAERALSGNGLLALYEISCALDGVAVRASSAAEVGALAMAGDAQADAVLEHFFLWLARVAGNAVLTVGALGGVYITGGIVPRFLERFIASGFAEAFASRGKTSGAYLQDVPVWVMTAEHPGLLGAGVALQQALDAEG

SEQ ID NO: 50118 - DNA, 1029 bp, Ralstonia solanacearum
  CDS (1)..(1029)
atgggcagcatggacgatgtgacggcctacccgcgcctggtcggggatgtcggcgggaccaacgcgcgcttcgcgctggagatggcgccgatgcggctggcccatatcggcgtgctggccggcgacgactacccgtcgctggaagcggccatgcgcgcctatctcgccgcgctgccgccggagatcgccgcggcgggcgtgcggcatgcggccatcggcatcgccaatccggtgctgggcgaccagatccgcatgaccaaccgcgactgggcgttttccaccgaggcgatgcgccagtcgctgggcttcgataccttcgtcgtgctcaacgatttcgccgcgctggcgcacgcgctgccctacctgggcgccgacgagctggaacaggtgggcggcagcacctgcgtggccgacgcgccgcgcgcgctgctggggccgggcacgggcctgggcgtggcgtcgctgctgccgacgcaggcagggcgcttcatcgccgtcgcgggcgaggggggccacgtcgcgtttgcgccgatgaacgacgaggaagtcgtcatctggcgcttcgcgcgcgagcgcttcggccatgtctcggccgagcggctgatctcgggcatggggctggagctgatctacgaggcgctcggcgcgtgcttcgacctgtggcagcagggccccgccgtgcgccgcgccgccgacatcaccgccatcgccctgggcgaaatggaagacaccgccggcgatcacgcccgctgccgctacgccgtcgatacgttctgcgccatgctcggcaccgtggcggccaacctggcggtcacgctgggcgcgcggggcggggtctatatcggcggcggcatcgtgccgcggctgggcgccgccttcgccaattcaccgttccggcggcggttcgaagacaagggccgcttctccggctatgtggcggcgatgccggtgtacgtcatccatgcgccgtacccggggctgatcggcctgtgcgcggcgatggatcacgccgtggccagcggccactga

SEQ ID NO: 50119 - protein, 342 aa, Ralstonia solanacearum
MGSMDDVTAYPRLVGDVGGTNARFALEMAPMRLAHIGVLAGDDYPSLEAAMRAYLAALPPEIAAAGVRHAAIGIANPVLGDQIRMTNRDWAFSTEAMRQSLGFDTFVVLNDFAALAHALPYLGADELEQVGGSTCVADAPRALLGPGTGLGVASLLPTQAGRFIAVAGEGGHVAFAPMNDEEVVIWRFARERFGHVSAERLISGMGLELIYEALGACFDLWQQGPAVRRAADITAIALGEMEDTAGDHARCRYAVDTFCAMLGTVAANLAVTLGARGGVYIGGGIVPRLGAAFANSPFRRRFEDKGRFSGYVAAMPVYVIHAPYPGLIGLCAAMDHAVASGH

SEQ ID NO: 50120 - DNA, 1026 bp, Rhizobium loti
  CDS (1)..(1026): transl_table=11
atgccaagcgtaagcgataccgacacgtcgttgcggtttccgatcctgatcggcgacattggcggcaccaatgcgcgcttttcgatcgtgctcgacgccaattccgagccgaccgagccgcagatcgtccagaccgccaatttcaacacgatcgacgaggcgatccaggcggcggtgctcgaccgctcgtcggtccgtcccaattcggcggtgctggcggtggccggtccggtcgacggcgacgagatcgaactcaccaattgcccgtgggtcgtcaagcccaggcagatgtttgccaatctcggcttgagcgacattgtcgtgctcaacgatttcgaggcgcaggcgctggccgtcgtggcgcttggcgaagagcatatggaaaagatcggcggcggcacgccggagcccaatgcaggccgcgtcgtgctcggccccggaaccgggctcggcgtcgccgggctggtctatgccttgcgccactggataccggtgcccggcgaaggcggccatatggacatcggtccgcgcacgccgcgcgatttcgaggtgtttccgcatatcgagaagctcgagggccgcatttccggcgaacagatcctgtgcgggcgcggcctcgtcaacgtctaccgggctgtcgccaaggcggacggcaagccggcgcctttcaccacgccggccgagatcaccggcgcggcgctggccaagaccgatccggtggctgaggaagcgctggagactttcgtcacctgcctcgggcgcaccgccggcgatcttgccctggtgttcatgagccgtggcggcgtcttcttgaccggcgggatcgcccaaaaaatcgtgccggcgctgaaggagggcaatttccgcgccgccttcgaggacaaggcgccgcacagcgcgctgatgcgcaccatgcccgtctatgtcatcacccatccgctggcggcccttctcggccttgccgcctatgccaggaacccgtcgctgttcggcgtccagacggccggccggcgctggcaggcctga

SEQ ID NO: 50121 - protein, 341 aa, Rhizobium loti
MPSVSDTDTSLRFPILIGDIGGTNARFSIVLDANSEPTEPQIVQTANFNTIDEAIQAAVLDRSSVRPNSAVLAVAGPVDGDEIELTNCPWVVKPRQMFANLGLSDIVVLNDFEAQALAVVALGEEHMEKIGGGTPEPNAGRVVLGPGTGLGVAGLVYALRHWIPVPGEGGHMDIGPRTPRDFEVFPHIEKLEGRISGEQILCGRGLVNVYRAVAKADGKPAPFTTPAEITGAALAKTDPVAEEALETFVTCLGRTAGDLALVFMSRGGVFLTGGIAQKIVPALKEGNFRAAFEDKAPHSALMRTMPVYVITHPLAALLGLAAYARNPSLFGVQTAGRRWQA

SEQ ID NO: 50122 - DNA, 1020 bp, Rhizobium meliloti
  CDS (1)..(1020): transl_table=11
atgcccaatgcgagtgaacacagctttccctttccgatcctgatcggcgacatcggcggcaccaatgcccgcttcgcactgctcaccgacgcctacggcgaaccgaagcagttggccccgatcagaacgggcgatttcgccacgatcgaggaggcgatgcagaaaggcatcctcgacaagacctccgtccagccgcgctcggcgatcctcgccgtggccgggccgatcaagggcgacgagataccgctgacgaatgccggctgggtgattcgtccgaaggacatgctggcgggcctcgggctggaggatgtgctggtcatcaacgacttcgaggcccaggcgctcgccatcgccgcgccggccgatcaggatgtcgttcagatcggcggcggagccgtccggcccttccattcgcgcgtcgtgctcggcccgggaaccggtctgggcgtcgccggactggtctatgcgcagcatacctggatacccgtgcccggcgagggcggtcatgtcgatataggtccccggacggagcgcgacttccggatctggcccttcctcgaaccgatcgagggacgcatggccggcgagcagatcctgtgcggccgcggcatcatgaatctctatcgcgctgtctgcgccgccaatggcgaggaagcggttcttgcggatcaggcggcagtgacgacgagcgcgctctccggcgccgatgcggcggcggtcgaaaccgtgtcgctctttgcgacctatctcgggcgcgttgccggcgacatggcgctgatcttcatggcgcgcggcggcgtattccttgccggcggcatttcgcagaagatactgccggcactgacgaagcccgaatttcgcgcggccttcgaggacaaggcgcctcattcggcattgatgcggacgattccgaccttcgccgtcattcaccccatggcggcgctctccggcctcgcggcctttgcccgcacgccgagggacttcggtgttgcaatggagggacgccgttggagaaggtga

SEQ ID NO: 50123 - protein, 339 aa, Rhizobium meliloti
MPNASEHSFPFPILIGDIGGTNARFALLTDAYGEPKQLAPIRTGDFATIEEAMQKGILDKTSVQPRSAILAVAGPIKGDEIPLTNAGWVIRPKDMLAGLGLEDVLVINDFEAQALAIAAPADQDVVQIGGGAVRPFHSRVVLGPGTGLGVAGLVYAQHTWIPVPGEGGHVDIGPRTERDFRIWPFLEPIEGRMAGEQILCGRGIMNLYRAVCAANGEEAVLADQAAVTTSALSGADAAAVETVSLFATYLGRVAGDMALIFMARGGVFLAGGISQKILPALTKPEFRAAFEDKAPHSALMRTIPTFAVIHPMAALSGLAAFARTPRDFGVAMEGRRWRR

SEQ ID NO: 50124 - DNA, 966 bp, Salmonella typhimurium
  CDS (1)..(966): transl_table=11
atgacaaagtatgctttagtaggagatgtaggcggcacgaatgcgcgtcttgccctgtgtgatatcgccagtggagaaatctcgcaggccaaaacgtattccggcctggattatcccagtcttgaggccgtggtgcgcgtttatctcgatgagcatagcgtcagcgtggaagatggttgtatcgccatagcctgcccgattaccggtgactgggtagcgatgactaaccatacctgggctttttctattgcggaaatgaaaaaaaatctcggctttagccatctggaaatcatcaacgatttcaccgccgtgtcgatggcgatcccgatgctgaaaaaagagcatttaattcagttcggcggcggcgaaccggtagacggcaaacctattgcggtgtatggcgcgggaaccggcttgggcgtggcgcatctggtgcatgtggataagcgttggattagccttccgggcgaaggcgggcatgtcgattttgcgcctaatagcgaagaagaagctatgattctggaaatattgcgcgccgaaattggccacgtttccgccgagcgcgtgctgtctggcccggggctggtgaatctttaccgggcgattgttaagtccgacaaccgtctgccggaaaatctgcgcccgaaagatattaccgaacgcgccctggcggatagctgtatcgattgtcgccgcgcgttgtcgctcttttgcgtcatcatggggcgatttggcggcgatctggcgttaaccatggggacatttggcggcgtttatatcgctggcggtattgtcccgcgcttcctggaattttttaaagcgtccggcttccgtggtggctttgaagataaaggccgctttaaagattatgtacacggtattccggtctatctgattgtccatgataatcctggcttgttaggttccggcgcgcatctgcgccagacattaggtcatattctataa

SEQ ID NO: 50125 - protein, 321 aa, Salmonella typhimurium
MTKYALVGDVGGTNARLALCDIASGEISQAKTYSGLDYPSLEAVVRVYLDEHSVSVEDGCIAIACPITGDWVAMTNHTWAFSIAEMKKNLGFSHLEIINDFTAVSMAIPMLKKEHLIQFGGGEPVDGKPIAVYGAGTGLGVAHLVHVDKRWISLPGEGGHVDFAPNSEEEAMILEILRAEIGHVSAERVLSGPGLVNLYRAIVKSDNRLPENLRPKDITERALADSCIDCRRALSLFCVIMGRFGGDLALTMGTFGGVYIAGGIVPRFLEFFKASGFRGGFEDKGRFKDYVHGIPVYLIVHDNPGLLGSGAHLRQTLGHIL

SEQ ID NO: 50126 - DNA, 966 bp, Shigella flexneri
  CDS (1)..(966): transl_table=11
atgacaaagtatgcattagtcggtgatgtgggcggcaccaacgcacgtcttgctctgtgtgatattgccagtggtgaaatctcgcaggctaagacctattcagggcttgattaccccagcctcgaagcggtcattcgcgtttatcttgaagaacataaggtcgaggtgaaagacggctgtattgccatcgcttgcccaattaccggtgactgggtggcaatgaccaaccatacctgggcgttctcaattgccgaaatgaaaaagaatctcggttttagccatctggaaattattaacgattttaccgctgtatcgatggcgatcccgatgctgaaaaaagagcatctgattcagtttggtggcgcagaaccggtcgaaggtaagcctattgcggtttacggtgccggaacggggcttggggttgcgcatctggtccatgtcgataagcgttgggtaagcttgccgggcgaaggcggtcacgttgattttgcgccgaatagtgaagaagaggccattatcctcgaaatattgcgtgcggaaattggtcatgtttcggcggagcgcgtgctttctggccctgggctggtgaatttgtatcgcgcaattgtgaaagctgacaaccgcctgccagaaaatctcaagccaaaagatattaccgaacgcgcgctggctgacagctgcaccgattgccgccgcgcattgtcgctgttttgcgtcattatgggccgttttggcggcaatctggcgctcaatctcgggacatttggcggcgtgtttattgcgggcggtatcgtgccgcgcttccttgagttcttcaaagcctccggtttccgtgccgcatttgaagataaagggcgctttaaagaatatgtccatgatattccggtgtatctcatcgtccatgactatccgggtcttctcggttccggtgcacatttacgccagaccttaggtcacattctgtaa

SEQ ID NO: 50127 - protein, 321 aa, Shigella flexneri
MTKYALVGDVGGTNARLALCDIASGEISQAKTYSGLDYPSLEAVIRVYLEEHKVEVKDGCIAIACPITGDWVAMTNHTWAFSIAEMKKNLGFSHLEIINDFTAVSMAIPMLKKEHLIQFGGAEPVEGKPIAVYGAGTGLGVAHLVHVDKRWVSLPGEGGHVDFAPNSEEEAIILEILRAEIGHVSAERVLSGPGLVNLYRAIVKADNRLPENLKPKDITERALADSCTDCRRALSLFCVIMGRFGGNLALNLGTFGGVFIAGGIVPRFLEFFKASGFRAAFEDKGRFKEYVHDIPVYLIVHDYPGLLGSGAHLRQTLGHIL

SEQ ID NO: 50128 - DNA, 1068 bp, Synechocystis sp
  CDS (1)..(1068): transl_table=11
atgggggccatgggcgtaaattttttggcaggggatatcggcggcactaaaacgattctggccctggtgacgataaacgagagtagcccagggttggcccggccggtgactctgtttgaacagacctacagcagtccagcttttcccgatctggtgcccatggtgcaacaattccgtcaagaagcagcctttgtgttgggtaacccaatctccgttgctaaggcctgtttcgccattgccggccctgtgatcgataacacctgtcgcctcactaatttagattggcatctcagcggcgatcgcctggcccaggaattggccattgcccaggttgacctcatcaatgattttgccgctgtgggttacggcattttagggctagggtcagaggatttaaccgtactccaggccgctcccgtggatccgtcaggggcgatcgccatattgggagcaggcaccggcttgggacaatgctacgtaattccccagggccaaggaagatatcgagtttttgcctccgaaggagcccacggtgactttgccccccgatcgcctttggaatggcagttattggagtatctcaaaaagaagtattccctagggcggatttccattgaacgggtggtatccggcatgggcatcgccatgatttacgaatttttgcggcaccaatacccagaacgggaatcagcccaattcagcaaactctaccaaacctggaatcgagaaaaggaccaagaaaccaaaaccgtcgatctggccgccgccgtatcccaagccgccctggaaggcacagatgtattggctgaccaagccatggaactttttctcggggcctatggagcagaggcaggaaatcttgctttgaagctactacccagaggtggtttgtacgttgccggtggtattgcccccaaaattatccctttactggaaaagggcagttttatgcaaggctttagcgacaaaggcaggatgcaaagcttaatggggacaattcccgtacaggtggtactcaacgccaaagttggcctaattggcgcggcggtttgtgcggcccagtcttag

SEQ ID NO: 50129 - protein, 355 aa, Synechocystis sp
MGAMGVNFLAGDIGGTKTILALVTINESSPGLARPVTLFEQTYSSPAFPDLVPMVQQFRQEAAFVLGNPISVAKACFAIAGPVIDNTCRLTNLDWHLSGDRLAQELAIAQVDLINDFAAVGYGILGLGSEDLTVLQAAPVDPSGAIAILGAGTGLGQCYVIPQGQGRYRVFASEGAHGDFAPRSPLEWQLLEYLKKKYSLGRISIERVVSGMGIAMIYEFLRHQYPERESAQFSKLYQTWNREKDQETKTVDLAAAVSQAALEGTDVLADQAMELFLGAYGAEAGNLALKLLPRGGLYVAGGIAPKIIPLLEKGSFMQGFSDKGRMQSLMGTIPVQVVLNAKVGLIGAAVCAAQS

SEQ ID NO: 50130 - DNA, 1008 bp, Xanthomonas axonopodis
  CDS (1)..(1008): transl_table=11
atgaccgctccttccaagccggtgctggttgccgatatcggcggtaccaatgcgcgcttcgcgctggccgatgtcgacgcctcggtgccgttgctggatgacacctcgcgcgaatttgcggtggtggatttcggttcgctgggcgaagcggcgcgctattacctggaccagatcggcgtgcaggccacccagggcgtgttcgccgtggcgggccgcgtggacggcgacgaggcacgcatcaccaaccatccctgggtgatctcgcgctcgcgcaccgccaccatgctgggtttcagtaccttgcatctgatcaacgactttgccgcgcaggcgatggcgatcagcctgctgcgtccacaggacgtggtgcaggtaggcggcgccagctggcgtccggcaccgatcgatcaagcgcgcaactatggcgtgatcggcccgggcaccggcctgggcgtgggcggcctgatcatccgcaacgggcgctgctttccgctggaaaccgaaggcggccatgtcagcttcccgcccggcacgccggaagaaatccgcatcctggaaatcctgtccgagcagttcggccgggtctccaacgagcggctgatctgcggtccgggcctggtcaatatccatcgcgcgttgagcgagatcgcgggggtcgatccgggcccgctgcaacccaaggacatcaccgcacgcgcggctgcgggcgacccgcggtcctcgcgcaccatcgatctgttctgcgccatcttcggtgcgatcgccggcgacatggtgctgatgcagggcgcctgggacggcgtgttcctcaccggcgggctggtgcccaaggtgctggattcgctgcagcattccggctttcgccagcgcttcgaacacaagggccgtttctccgcgatcatgtcgaaggtgccatcgctggcggtcatgcacccgcatgccggcctgctgggcgccgccgcctacgcggtggatgcacaacgtcagcaccccggggagcagcgatga

SEQ ID NO: 50131 - protein, 335 aa, Xanthomonas axonopodis
MTAPSKPVLVADIGGTNARFALADVDASVPLLDDTSREFAVVDFGSLGEAARYYLDQIGVQATQGVFAVAGRVDGDEARITNHPWVISRSRTATMLGFSTLHLINDFAAQAMAISLLRPQDVVQVGGASWRPAPIDQARNYGVIGPGTGLGVGGLIIRNGRCFPLETEGGHVSFPPGTPEEIRILEILSEQFGRVSNERLICGPGLVNIHRALSEIAGVDPGPLQPKDITARAAAGDPRSSRTIDLFCAIFGAIAGDMVLMQGAWDGVFLTGGLVPKVLDSLQHSGFRQRFEHKGRFSAIMSKVPSLAVMHPHAGLLGAAAYAVDAQRQHPGEQR

SEQ ID NO: 50132 - DNA, 1008 bp, Xanthomonas campestris
  CDS (1)..(1008): transl_table=11
atgactgctccttccaagccggtgctggttgccgacatcggtggcaccaacgcgcgcttcgcgctggccgacatcgatgcctcggtaccgctgctggacgacacctgccgtgagttcgcggtggtcgagttcggctcgctgggcgaggccgcgcgctattacctggaccagattggcgtgcaggccaccaagggcgtgttcgcggtggccggccgtgtggatggcgacgaagcccgcatcaccaaccatccgtgggtgatctcgcgctcgcgcaccgccaccatgctgggcttcagcacgctgcacctgatcaacgacttcgccgcgcaagcgatggcgatcagcctgctgcgcccgcaggacgtggtgcaggtgggcggcgccagctggcgcccggcaccgatcgagctgccgcgcaactacggcgtcatcggcccgggcaccgggctgggcgtgggtggcctgatcatccgcaacggccgctgttttccgctggaaaccgaaggcggccatgtcagcttcccgcccggcacgccggaagagattcgcgtgctggagatcctgtccgagcagttcggccgggtctccaacgagcgcctgatctgcggcccgggcctggtcaacatccaccgcgcgctgagcgagattgccggcatcgaccccggcccgctggagcccaaggacatcaccgcacgtgccgccgctggcgacccgcgtgcctcgcgcaccattgatctgttctgcgccatcttcggcgcgatcgccggtgacatggtgctgatgcagggtgcctgggacggcgtcttcctcaccggcgggctggtgcccaaggtgctggattcgctgcagcattccggcttccgccagcgcttcgaacacaagggccgtttctccgcaatcatgtcgcgggtgccctcgctggcggtgatgcatccgcatgccggcctcctgggtgcagcggcgtatgcggtggacgccgaacgcgcattgccgggagagcagcgatga

SEQ ID NO: 50133 - protein, 335 aa, Xanthomonas campestris
MTAPSKPVLVADIGGTNARFALADIDASVPLLDDTCREFAVVEFGSLGEAARYYLDQIGVQATKGVFAVAGRVDGDEARITNHPWVISRSRTATMLGFSTLHLINDFAAQAMAISLLRPQDVVQVGGASWRPAPIELPRNYGVIGPGTGLGVGGLIIRNGRCFPLETEGGHVSFPPGTPEEIRVLEILSEQFGRVSNERLICGPGLVNIHRALSEIAGIDPGPLEPKDITARAAAGDPRASRTIDLFCAIFGAIAGDMVLMQGAWDGVFLTGGLVPKVLDSLQHSGFRQRFEHKGRFSAIMSRVPSLAVMHPHAGLLGAAAYAVDAERALPGEQR

SEQ ID NO: 50134 - DNA, 1014 bp, Xylella fastidiosa
  CDS (1)..(1014): transl_table=11
atgaacgcaccacaggctcccgtactggtcgcagacattggagggactaacgcccgctttgcgctggccaaccccaccctaacctcagcaccactgctgaacgacagcctgcgcgaattcgccgtcatcgaattcccctcactgagcgaagctgcacagcactacctgcatcacatcggcatacataccaccaaaggcgtctttgcgatcgccggacacgtagacggcgatgaagcacgtattaccaatcatccctgggtcatcacacgcacgcgcactgcaacaatgctcggcttcgacaccctgcacctcatcaacgattttgttgcccaagcgatggccatcagcgtgttaggccctcaagatgtcatccaaatcggcagtgccaaatgggagcaagtcccgctatcagcagccacccgcaactacggcatcattggccccggcaccggcctaggcgtcggcggcctggtgattcgcaacggccgctgttatccgctagaaaccgagggcggccatgtcagcttcccgccaagcaccccagaagaaatccggatcctggaaatcctgtcacaacaattcggacgtgtctccaacgaacggctgatctccggtccagggctagtcaacattcaccgcgcactgagcgaaatcgacggaatcgacccaggcccactgcgccctcaagacatcaccatgcgcgccgctgacggcgacatacgcgccacacgcaccatcaatctgttctgcaacatcttcggcgccatcaccggcgacctggtactcatccaaggggcttgggatggcgtctttctgacaggcggcctcgttcccaaactattgaactcaatacagcattccggtttccgccaaaaatttgaacataagggtcgattttcggccatcatggcccgtatcccctctttagcagtgatccatccacaccctggcctactcggcgcagccgcatacgcacgagacaccgagccagtcccgcaggacatcaaggcatga

SEQ ID NO: 50135 - protein, 337 aa, Xylella fastidiosa
MNAPQAPVLVADIGGTNARFALANPTLTSAPLLNDSLREFAVIEFPSLSEAAQHYLHHIGIHTTKGVFAIAGHVDGDEARITNHPWVITRTRTATMLGFDTLHLINDFVAQAMAISVLGPQDVIQIGSAKWEQVPLSAATRNYGIIGPGTGLGVGGLVIRNGRCYPLETEGGHVSFPPSTPEEIRILEILSQQFGRVSNERLISGPGLVNIHRALSEIDGIDPGPLRPQDITMRAADGDIRATRTINLFCNIFGAITGDLVLIQGAWDGVFLTGGLVPKLLNSIQHSGFRQKFEHKGRFSAIMARIPSLAVIHPHPGLLGAAAYARDTEPVPQDIKA

SEQ ID NO: 50136 - DNA, 1014 bp, Xylella fastidiosa
  CDS (1)..(1014): transl_table=11
atgaacgcaccacaggctcccgtactggtcgcagacattggagggactaacgcccgctttgcgctcgccaaccccaccctaacctcagcaccactgctgaacgacagcatgcgcgaattcgccgtcatcgaattcccctcactgggcgaagctgcacagcactacctgcatcacatcggcatacataccaccaaaggcgtctttgcgatcgccggacacgtagacggcgatgaagcacgtattaccaatcatccctgggtcatcacacgcacgcgcactgcaacaatgctcggcttcgacaccctgcacctcatcaacgattttgttgcccaagcgatggccatcagcgtgttaggccctcaagatgtcatccaaatcggcagtgccaaatgggagcaattcccgctatcagcagccactcgcaactacggcatcattggccccggcaccggcctaggcgtcggcggcctgatgattcgcaacggccgctgctatccgctagaaaccgagggcggccatgtcagcttcccgccaagcaccccagaagaaatccggatcctggaaatcctgtcacaacaattcggacgtgtctccaacgaacggctgatctccggtccagggatagtcaacattcaccgcgcactgagcgaaatcgacggaatcgacccaggtccactgcgccctcaagacatcaccatgcgcgccgctgacggcgacatacgcgccacacgcaccatcaatctgttctgcaacatcttcggcaccatcaccggcgacctggtactcatccaaggggcttgggatggcgtctttctgacaggcggcctcgttcccaaactattgaactcaatacagcattccggtttccgccaaagatttgaacataagggtcgattttcggccatcatggcccgtatcccctctttggcagtgatccatccacaccctggcctactcggcgcagccgcatacgcacgagacaccgagcaagtcccgcaggaaatcaaggcatga

SEQ ID NO: 50137 - protein, 337 aa, Xylella fastidiosa
MNAPQAPVLVADIGGTNARFALANPTLTSAPLLNDSMREFAVIEFPSLGEAAQHYLHHIGIHTTKGVFAIAGHVDGDEARITNHPWVITRTRTATMLGFDTLHLINDFVAQAMAISVLGPQDVIQIGSAKWEQFPLSAATRNYGIIGPGTGLGVGGLMIRNGRCYPLETEGGHVSFPPSTPEEIRILEILSQQFGRVSNERLISGPGIVNIHRALSEIDGIDPGPLRPQDITMRAADGDIRATRTINLFCNIFGTITGDLVLIQGAWDGVFLTGGLVPKLLNSIQHSGFRQRFEHKGRFSAIMARIPSLAVIHPHPGLLGAAAYARDTEQVPQEIKA

SEQ ID NO: 50138 - DNA, 975 bp, Zymomonas mobilis
  CDS (1)..(975): transl_table=11
atggaaattgttgcgattgacatcggtggaacgcatgcgcgtttctctattgcggaagtaagcaatggtcgggttctttctcttggagaagaaacgacttttaaaacggcagaacatgctagcttacagttagcttgggaacgtttcggtgaaaaactgggtcgtcctctgccacgtgccgcagctattgcatgggctggcccggttcatggtgaagttttaaaacttaccaataacccttgggtattaagaccagctactctgaatgaaaagctggacatcgatacgcatgttctgatcaatgacttcggtgcggttgcccacgcggttgcgcatatggattcttcttatctggatcatatttgtggtcctgatgaagcgcttcctagcgatggtgttatcactattcttggtccgggaacgggcttgggtgttgcccatctgttgcggactgaaggccgttatttcgtcatcgaaactgaaggcggtcatatcgactttgctccgcttgacagacttgaagacaaaattctggcacgtttacgtgaacgtttccgccgcgtttctatcgaacgcattatttctggcccgggtcttggtaatatctacgaagcactggctgccattgaaggcgttccgttcagcttgctggatgatattaaattatggcagatggctttggaaggtaaagacaaccttgctgaagccgctttggatcgcttctgcttgagccttggcgctatcgctggtgatcttgctttggcacagggtgcaaccagtgttgttattggcggtggtgtcggtcttcgtatcgcttcccatttgccggaatctggcttccgtcagcgctttgtttcaaaaggacgctttgaacgcgtcatgtccaagattccggttaagttgattacttatccgcagcctggactgctgggtgcggcagctgcctatgccaacaaatattctgaagttgaataa

SEQ ID NO: 50139 - protein, 324 aa, Zymomonas mobilis
MEIVAIDIGGTHARFSIAEVSNGRVLSLGEETTFKTAEHASLQLAWERFGEKLGRPLPRAAAIAWAGPVHGEVLKLTNNPWVLRPATLNEKLDIDTHVLINDFGAVAHAVAHMDSSYLDHICGPDEALPSDGVITILGPGTGLGVAHLLRTEGRYFVIETEGGHIDFAPLDRLEDKILARLRERFRRVSIERIISGPGLGNIYEALAAIEGVPFSLLDDIKLWQMALEGKDNLAEAALDRFCLSLGAIAGDLALAQGATSVVIGGGVGLRIASHLPESGFRQRFVSKGRFERVMSKIPVKLITYPQPGLLGAAAAYANKYSEVE

SEQ ID NO: 50140 - DNA, 1005 bp, Xylella fastidiosa
  CDS (1)..(1005)
atgattccgaaccctacccgagatgcacccaatatcccgtcctttgttgccgccgatgtcggcggcactcacgtgcgcgtcagcgtggttgcagccgcgcccacgtgtgccagtccaccgcaactgttggatgtgcgcacttaccgctgcgctgactatcccagcctcagcacaattctgaacgacttcctcggtacaagatcagcagtacgtgattgcgtcatcgccagtgccggttttcagcgcagcgatggtactgttatcactaccaacctaccgtggccgctatcaccacaccggctacgcgcagatctcgatctggcagaggtctctctggtcaacgactttgaggcgctggcctacgccacagaggatatggaggctgcgcaattgctgcacctcactggtccagccaaagcgcaggatgggccacgcctgttgcttggtccgggaaccggcctgggtgcagcactctggattcccaataacggacgccccattgtcctccctacggaagccggtcaagcagcattgccgagtacaactgaacttgaaatgcaactggtacgacacatgctgaacaaccgcacacatgtgccgattgagcatgctttatctgggccaggaatactcaatgtgtaccgcgccttgtgtgcgctacagtccgtcctcccccagcacgcaagcccagatgcgatcagtcacgctgcggcagcaggaacagacatgctgtcatcacagactctagaggtattctgcgacttcctcggcagcatcgttggtgatttggtcatgatgtacggtgcacaggggggtgtctatctggccggaggaatcctgccacagctgcgtgagccgctgctacgcagtcactttgtcgaacgcttcctcaataaaggccccatgggcgaggcattacagcacgtcccggtgcggctgatcgaacatgggcaactcggcatcgtaggtgcggcacgctggtacttaaataaaaaagcaacttaa

SEQ ID NO: 50141 - protein, 334 aa, Xylella fastidiosa
MIPNPTRDAPNIPSFVAADVGGTHVRVSVVAAAPTCASPPQLLDVRTYRCADYPSLSTILNDFLGTRSAVRDCVIASAGFQRSDGTVITTNLPWPLSPHRLRADLDLAEVSLVNDFEALAYATEDMEAAQLLHLTGPAKAQDGPRLLLGPGTGLGAALWIPNNGRPIVLPTEAGQAALPSTTELEMQLVRHMLNNRTHVPIEHALSGPGILNVYRALCALQSVLPQHASPDAISHAAAAGTDMLSSQTLEVFCDFLGSIVGDLVMMYGAQGGVYLAGGILPQLREPLLRSHFVERFLNKGPMGEALQHVPVRLIEHGQLGIVGAARWYLNKKAT

SEQ ID NO: 50142 - DNA, 948 bp, Caulobacter crescentus
  CDS (1)..(948): transl_table=11
gtgaatggtcgcgatctggccctggcgctggtcagtccgggcgacgcgccgcgcggacatcgcgatctagcctgcgcgtcgctcaaagcgcttgaagagcacctgatcgacgccgtgtccgagcattcggctgacggcctgatcggagccgctgtctgcggcgccggccccgaaatcgacggcgcgatcgcgctgacggccggcgacttcacgctgacccaggcctggttgcgcgcggtgctgaagacgccgcgcgtctcgctgttgaacgacttcgccgcctgcgccctgggcgcgccccgcctggccccgtcggccatgcgcctgatccacgagggcaagcccggccgcaacgcccagatcgccgtgatcggtcccaatctcggtctcggcgtcgccgccctgacgccccaccgaaccgacgggtggacgcccgtagtcagcgagggtgggcatatcgacttcacccccggcgagccccgcgaagtcccggtgttcgaggcgctgcaagcccggcacggccgggtctcggcggagcatttcctgtcacagcagggcctcgccgatatctatgcggccctgggcggcgggctggacgatagcgacgaggtcatcctcgcccgggtccgggacggcgacgagacggcgcgggaagccctgtcgatcttcagcgccctcttgggggccttcgcgggagacgccgccctcagcttcgcggcccggggaggcgtctatatcaacagccccctgatggaacgcatcgatggcctgctcgatcaggccgccttcagccggcgctttgaggacaagggccggatgagcgcctatctcaaggacatcccggtctatctcgccgtcgggcggtgcacgctgctgggcttgtccgcgctcttcaccgccagcgacctgcgatacgaagccgccgaggtgaaggtcctcgactgctga

SEQ ID NO: 50143 - protein, 315 aa, Caulobacter crescentus
MNGRDLALALVSPGDAPRGHRDLACASLKALEEHLIDAVSEHSADGLIGAAVCGAGPEIDGAIALTAGDFTLTQAWLRAVLKTPRVSLLNDFAACALGAPRLAPSAMRLIHEGKPGRNAQIAVIGPNLGLGVAALTPHRTDGWTPVVSEGGHIDFTPGEPREVPVFEALQARHGRVSAEHFLSQQGLADIYAALGGGLDDSDEVILARVRDGDETAREALSIFSALLGAFAGDAALSFAARGGVYINSPLMERIDGLLDQAAFSRRFEDKGRMSAYLKDIPVYLAVGRCTLLGLSALFTASDLRYEAAEVKVLDC

SEQ ID NO: 50144 - DNA, 1005 bp, Xylella fastidiosa
  CDS (1)..(1005): transl_table=11
atgattccgacccctacccgagatgcacccaatatcccgtcctttcttgccgccgatgtcggcggcactcacgtgcgcgtcagcgtggttgcagccgcgcccacgtgtgctagtccaccgcaactgttcgatgtgcgcacttaccgctgcgctgactatcccagcctcagcacaattctgaacgacttcctcggtacaagatcagcagtacgtgattgcgtcatcgccagtgccggttttcagcgcagcgatggtactgttatcactaccaacctaccgtggccgctatcaccacaccggctacgcgcagatctcaatctggcagaggtctgtctggtcaacgactttgaggcgctggcctacgcgacggaggatatggagcctgcgcaattgctgcacctcactggtccagccaaagcgcaggatggaccacgcctgttgctcggtccgggaaccggcctgggtgcagcactctggattcccaataacggacgccccattgtcctccccacagaagccggtcaagcagcattgccgagtacaactgaacttgaaatgcaactggtacgacacatgctgaacaaccgcacacatgtgccgattgagcatgccttatctgggccaggaatactcaatgtgtaccgcgccttgtgtgcgctacagtccgtcctcccccagcacgcgagcccagatgcgatcagtcacgctgcggcagcaggaacagacatgctgtcatcacagactctagaggtgttctgcgacttcctcggcagcatcgttggtgatttggtcatgatgtacggtgcacaggggggtgtctatctggccggaggaatcctgccgcagctgcgtgagccgctgctacgcagtcactttgtcgaacgcttcctcaataaaggccccatgggtgaggcattacagcacgtcccggtgcggctgatcgaacatgggcaactcggtatcgtaggtgcggcacgctggtacttaaataagaaagcaacttaa

SEQ ID NO: 50145 - protein, 334 aa, Xylella fastidiosa
MIPTPTRDAPNIPSFLAADVGGTHVRVSVVAAAPTCASPPQLFDVRTYRCADYPSLSTILNDFLGTRSAVRDCVIASAGFQRSDGTVITTNLPWPLSPHRLRADLNLAEVCLVNDFEALAYATEDMEPAQLLHLTGPAKAQDGPRLLLGPGTGLGAALWIPNNGRPIVLPTEAGQAALPSTTELEMQLVRHMLNNRTHVPIEHALSGPGILNVYRALCALQSVLPQHASPDAISHAAAAGTDMLSSQTLEVFCDFLGSIVGDLVMMYGAQGGVYLAGGILPQLREPLLRSHFVERFLNKGPMGEALQHVPVRLIEHGQLGIVGAARWYLNKKAT

SEQ ID NO: 50146 - DNA, 25 bp, Artificial sequence
  Primer sequence
atgacaaagtatgcattagtcggtg

SEQ ID NO: 50147 - DNA, 24 bp, Artificial sequence
  Primer sequence
ttacagaatgtgacctaaggtctg

SEQ ID NO: 50148 - protein, 377 aa, Artificial sequence
  Consensus
  Variant (2)..(2): Xaa in position 2 is any amino acid
  Variant (6)..(54): Xaa in position 6 to 54 is any amino acid
  Variant (55)..(79): Xaa in position 55 to 79 is any or no amino acid
  Variant (81)..(81): Xaa in position 81 is any amino acid
  Variant (83)..(90): Xaa in position 83 to 90 is any amino acid
  Variant (93)..(94): Xaa in position 93 to 94 is any amino acid
  Variant (95)..(95): Xaa in position 95 is any or no amino acid
  Variant (97)..(106): Xaa in position 97 to 106 is any amino acid
  Variant (108)..(113): Xaa in position 108 to 113 is any amino acid
  Variant (114)..(118): Xaa in position 114 to 118 is any or no amino acid
  Variant (122)..(122): Xaa in position 122 is any amino acid
  Variant (124)..(152): Xaa in position 124 to 152 is any amino acid
  Variant (153)..(168): Xaa in position 153 to 168 is any or no amino acid
  Variant (170)..(170): Xaa in position 170 is any amino acid
  Variant (176)..(187): Xaa in position 176 to 187 is any amino acid
  Variant (188)..(193): Xaa in position 188 to 193 is any or no amino acid
  Variant (198)..(223): Xaa in position 198 to 223 is any amino acid
  Variant (225)..(226): Xaa in position 225 to 226 is any amino acid
  Variant (227)..(235): Xaa in position 227 to 235 is any or no amino acid
  Variant (238)..(238): Xaa in position 238 is any amino acid
  Variant (240)..(270): Xaa in position 240 to 270 is any amino acid
  Variant (271)..(301): Xaa in position 271 to 301 is any or no amino acid
  Variant (303)..(306): Xaa in position 303 to 306 is any amino acid
  Variant (308)..(310): Xaa in position 308 to 310 is any amino acid
  Variant (312)..(314): Xaa in position 312 to 314 is any amino acid
  Variant (316)..(320): Xaa in position 316 to 320 is any amino acid
  Variant (323)..(326): Xaa in position 323 to 326 is any amino acid
  Variant (329)..(340): Xaa in position 329 to 340 is any amino acid
  Variant (341)..(344): Xaa in position 341 to 344 is any or no amino acid
  Variant (346)..(348): Xaa in position 346 to 348 is any amino acid
  Variant (350)..(351): Xaa in position 350 to 351 is any amino acid
  Variant (354)..(360): Xaa in position 354 to 360 is any amino acid
  Variant (361)..(363): Xaa in position 361 to 363 is any or no amino acid
  Variant (365)..(376): Xaa in position 365 to 376 is any amino acid
DXGGTXXXXXXXXXXXXXXXXXXXXXXXXXXXXXXXXXXXXXXXXXXXXXXXXXXXXXXXXXXXXXXXXXXXXXXXXXXAXPXXXXXXXXTNXXXWXXXXXXXXXXLXXXXXXXXXXXNDFXAXXXXXXXXXXXXXXXXXXXXXXXXXXXXXXXXXXXXXXXXXXXXXGXGTGLGXXXXXXXXXXXXXXXXXXEGGHXXXXXXXXXXXXXXXXXXXXXXXXXXEXXXXXXXXXXXSGXGXXXXXXXXXXXXXXXXXXXXXXXXXXXXXXXXXXXXXXXXXXXXXXXXXXXXXXXXXXXXXXFXXXXGXXXGXXXLXXXXXGGXXXXGGXXXXXXXXXXXXXXXXFXXXFXXKGXXXXXXXXXXPXXXXXXXXXXXXG

SEQ ID NO: 50149 - protein, 11 aa, Artificial sequence
  Consensus
  Variant (2)..(2): Xaa in position 2 is Ile or Val
  Variant (6)..(7): Xaa in position 6 to 7 is any amino acid
  Variant (8)..(9): Xaa in position 8 to 9 is any or no amino acid
  Variant (11)..(11): Xaa in position 11 is Phe, Leu, Met or Val
DXGGTXXXXRX

SEQ ID NO: 50150 - protein, 49 aa, Artificial sequence
  Consensus
  Variant (2)..(13): Xaa in position 2 to 13 is any amino acid
  Variant (14)..(16): Xaa in position 14 to 16 is any or no amino acid
  Variant (19)..(20): Xaa in position 19 to 20 is any amino acid
  Variant (22)..(22): Xaa in position 22 is any amino acid
  Variant (23)..(23): Xaa in position 23 is Phe, Ile, Leu or Val
  Variant (24)..(38): Xaa in position 24 to 38 is any amino acid
  Variant (39)..(39): Xaa in position 39 is Ile, Leu or Val
  Variant (40)..(40): Xaa in position 40 is Ile, Leu, Met or Val
  Variant (43)..(43): Xaa in position 43 is Phe, Leu or Val
  Variant (44)..(44): Xaa in position 44 is any amino acid
  Variant (45)..(45): Xaa in position 45 is Ala, Cys, Gly, Thr or Val
  Variant (46)..(48): Xaa in position 46 to 48 is any amino acid
  Variant (49)..(49): Xaa in position 49 is Ala, Gly or Ser
AXXXXXXXXXXXXXXXTNXXWXXXXXXXXXXXXXXXXXXXNDXXXXXXX

SEQ ID NO: 50151 - protein, 63 aa, Artificial sequence
  Consensus
  Variant (2)..(2): Xaa in position 2 is Ala or Pro
  Variant (8)..(23): Xaa in position 8 to 23 is any amino acid
  Variant (24)..(25): Xaa in position 24 to 25 is any or no amino acid
  Variant (27)..(27): Xaa in position 27 is Ala or Gly
  Variant (29)..(30): Xaa in position 29 to 30 is any amino acid
  Variant (31)..(31): Xaa in position 31 is Ala, Asp, Glu, Gly, Asn, Ser or Thr
  Variant (32)..(38): Xaa in position 32 to 38 is any amino acid
  Variant (39)..(39): Xaa in position 39 is Asp, Glu, Gln or Thr
  Variant (40)..(41): Xaa in position 40 to 41 is any amino acid
  Variant (42)..(42): Xaa in position 42 is Ala, Ile, Leu or Val
  Variant (43)..(55): Xaa in position 43 to 55 is any amino acid
  Variant (56)..(56): Xaa in position 56 is Glu, Gly or Ser
  Variant (57)..(60): Xaa in position 57 to 60 is any amino acid
  Variant (61)..(61): Xaa in position 61 is Gly, Ile or Val
  Variant (62)..(62): Xaa in position 62 is any amino acid
  Variant (63)..(63): Xaa in position 63 is Ala or Gly
GXGTGLGXXXXXXXXXXXXXXXXXXEXGXXXXXXXXXXXXXXXXXXXXXXXXXXXXXXXXXXX

SEQ ID NO: 50152 - protein, 74 aa, Artificial sequence
  Consensus
  Variant (2)..(5): Xaa in position 2 to 5 is any amino acid
  Variant (6)..(6): Xaa in position 6 is Ala or Gly
  Variant (7)..(8): Xaa in position 7 to 8 is any amino acid
  Variant (9)..(9): Xaa in position 9 is Ala, Cys, Gly, Ser, Thr or Val
  Variant (10)..(10): Xaa in position 10 is any amino acid
  Variant (11)..(11): Xaa in position 11 is Asp, Asn or Ser
  Variant (12)..(13): Xaa in position 12 to 13 is any amino acid
  Variant (14)..(14): Xaa in position 14 is Leu, Met or Val
  Variant (15)..(19): Xaa in position 15 to 19 is any amino acid
  Variant (20)..(20): Xaa in position 20 is Asp, Gly, Asn or Ser
  Variant (22)..(24): Xaa in position 22 to 24 is any amino acid
  Variant (25)..(25): Xaa in position 25 is any or no amino acid
  Variant (28)..(40): Xaa in position 28 to 40 is any amino acid
  Variant (41)..(41): Xaa in position 41 is any or no amino acid
  Variant (43)..(59): Xaa in position 43 to 59 is any amino acid
  Variant (60)..(60): Xaa in position 60 is any or no amino acid
  Variant (62)..(70): Xaa in position 62 to 70 is any amino acid
  Variant (71)..(71): Xaa in position 71 is Ala, Gly, Pro or Ser
  Variant (72)..(72): Xaa in position 72 is Phe, Ile, Leu or Val
  Variant (73)..(73): Xaa in position 73 is any amino acid
FXXXXXXXXXXXXXXXXXXXGXXXXGGXXXXXXXXXXXXXXFXXXXXXXXXXXXXXXXXXPXXXXXXXXXXXXG

SEQ ID NO: 50153 - DNA, 417 bp, Escherichia coli K12
  CDS (1)..(417): transl_table=11
atgatgactaaaacccaaataaataaattaataaaaatgatgaatgatttagactatccatttgaagcaccgctcaaggaatcatttattgaaagtataatccaaatagaatttaattctaattcaactaattgcctggagaagttatgtaatgaagttagtattctttttaagaatcaacctgattatcttacttttttaagagcaatggatggattcgaagttaatggattacgattatttagcctctcgattccagaaccttcagttaaaaacctttttgccgtaaatgaattttatagaaataatgatgatttcataaaccctgatctacaagaacggttagtgatcggggattatagcatttcaatatttacttatgacattaaaggtgatgctgccaacttactgatttag

SEQ ID NO: 50154 - protein, 138 aa, Escherichia coli K12
MMTKTQINKLIKMMNDLDYPFEAPLKESFIESIIQIEFNSNSTNCLEKLCNEVSILFKNQPDYLTFLRAMDGFEVNGLRLFSLSIPEPSVKNLFAVNEFYRNNDDFINPDLQERLVIGDYSISIFTYDIKGDAANLLI

SEQ ID NO: 50155 - DNA, 495 bp, Escherichia coli CFT073
  CDS (1)..(495): transl_table=11
atgatgactaaaacccaaataagtaaattaaaaaaaatgatgaatgatttagactatccatttgaagcaccgctcaaggaatcatttattgaaagtataatccaaataaaatttaattctaactcaactaattgcctggagaagttatgtaatgaagttagtattctctttaataatcaacctgattatcttacttttttaagagcaatggatggattcgaagttaatggattacgattatttagcctctcgattccagaaccttcagttaaaaacctttttgccgtaaatgaattttatagagataatgatgatttcataaatcctgacttacaagaacggttagtgatcggggatgatagcatttcaatatttacttatgacattaaaagtaacttttttgaaattagagataatattggcacagaaaatatattcagttcgtttagtgatttctcttcattcttaaacgaaatcatggacagttgttcataa

SEQ ID NO: 50156 - protein, 164 aa, Escherichia coli CFT073
MMTKTQISKLKKMMNDLDYPFEAPLKESFIESIIQIKFNSNSTNCLEKLCNEVSILFNNQPDYLTFLRAMDGFEVNGLRLFSLSIPEPSVKNLFAVNEFYRDNDDFINPDLQERLVIGDDSISIFTYDIKSNFFEIRDNIGTENIFSSFSDFSSFLNEIMDSCS

SEQ ID NO: 50157 - DNA, 507 bp, Serratia marcescens
  CDS (1)..(507): transl_table=11
atgaaagatttaactcaactactcagcagcttaaagaggttgatggttgcagatcactaccctttagccagcccggtagccccggaagtcttgaaagacttaatctgcaatccgcctccagtggagtgggcagatcacaaaaagagcgcctatatagatatacagaaactcattaaaaccaggcttgattatgcccaagtgtttaatgctatggatggttttgagtacaacggacttacgttttataaccttgttcaggcagagaacgaaaatctattgtggtcaaatatttacatacgcaactttgaagcacgagacaatgaaatctacgttgacccaaatctcactgataaggtgttaatcggagaagatggcatgtcacttttcgcttatagttttgcagacgactgctttcagataagagacaaagcatctactgattatgttattgaatctcatacagagtttgatagatttttgtcttcactgattcaaaccgtcagttga

SEQ ID NO: 50158 - protein, 168 aa, Serratia marcescens
MKDLTQLLSSLKRLMVADHYPLASPVAPEVLKDLICNPPPVEWADHKKSAYIDIQKLIKTRLDYAQVFNAMDGFEYNGLTFYNLVQAENENLLWSNIYIRNFEARDNEIYVDPNLTDKVLIGEDGMSLFAYSFADDCFQIRDKASTDYVIESHTEFDRFLSSLIQTVS

SEQ ID NO: 50159 - DNA, 28 bp, Artificial sequence
  Primer sequence
atgatgactaaaacccaaataaataaat

SEQ ID NO: 50160 - DNA, 26 bp, Artificial sequence
  Primer sequence
ttaaatcagtaagttggcagcatcac

SEQ ID NO: 50161 - protein, 121 aa, Artificial sequence
  Consensus
  Variant (2)..(4): Xaa in position 2 to 4 is any amino acid
  Variant (6)..(9): Xaa in position 6 to 9 is any amino acid
  Variant (12)..(14): Xaa in position 12 to 14 is any amino acid
  Variant (16)..(24): Xaa in position 16 to 24 is any amino acid
  Variant (26)..(46): Xaa in position 26 to 46 is any amino acid
  Variant (48)..(52): Xaa in position 48 to 52 is any amino acid
  Variant (55)..(59): Xaa in position 55 to 59 is any amino acid
  Variant (66)..(66): Xaa in position 66 is any amino acid
  Variant (70)..(73): Xaa in position 70 to 73 is any amino acid
  Variant (75)..(77): Xaa in position 75 to 77 is any amino acid
  Variant (79)..(82): Xaa in position 79 to 82 is any amino acid
  Variant (83)..(85): Xaa in position 83 to 85 is any or no amino acid
  Variant (87)..(90): Xaa in position 87 to 90 is any amino acid
  Variant (92)..(94): Xaa in position 92 to 94 is any amino acid
  Variant (96)..(96): Xaa in position 96 is any amino acid
  Variant (98)..(102): Xaa in position 98 to 102 is any amino acid
  Variant (104)..(104): Xaa in position 104 is any amino acid
  Variant (106)..(110): Xaa in position 106 to 110 is any amino acid
  Variant (113)..(116): Xaa in position 113 to 116 is any amino acid
  Variant (118)..(118): Xaa in position 118 is any amino acid
  Variant (120)..(120): Xaa in position 120 is any amino acid
LXXXMXXXXYPXXXPXXXXXXXXXIXXXXXXXXXXXXXXXXXXXXXLXXXXXDYXXXXXAMDGFEXNGLXXXXLXXXEXXXXXXXNXXXXNXXXRXNXXXXXPXLXXXXXIGXXXXSXFXY

SEQ ID NO: 50162 - protein, 25 aa, Artificial sequence
  Consensus
  Variant (2)..(3): Xaa in position 2 to 3 is any or no amino acid
  Variant (5)..(5): Xaa in position 5 is Met or Val
  Variant (6)..(6): Xaa in position 6 is Ala or Asn
  Variant (8)..(8): Xaa in position 8 is any amino acid
  Variant (9)..(9): Xaa in position 9 is any or no amino acid
  Variant (12)..(12): Xaa in position 12 is Phe or Leu
  Variant (13)..(13): Xaa in position 13 is Ala or Glu
  Variant (14)..(14): Xaa in position 14 is Ala or Ser
  Variant (16)..(16): Xaa in position 16 is Leu or Val
  Variant (17)..(17): Xaa in position 17 is any amino acid
  Variant (18)..(18): Xaa in position 18 is Glu or Pro
  Variant (19)..(19): Xaa in position 19 is Glu or Ser
  Variant (20)..(20): Xaa in position 20 is Phe or Val
  Variant (21)..(21): Xaa in position 21 is Ile or Leu
  Variant (22)..(22): Xaa in position 22 is Glu or Lys
  Variant (23)..(23): Xaa in position 23 is Asp or Ser
  Variant (24)..(24): Xaa in position 24 is Ile or Leu
KXXMXXDXXYPXXXPXXXXXXXXXI

SEQ ID NO: 50163 - protein, 33 aa, Artificial sequence
  Consensus
  Variant (2)..(2): Xaa in position 2 is Phe or Ile
  Variant (3)..(3): Xaa in position 3 is any amino acid
  Variant (4)..(4): Xaa in position 4 is Asn or Thr
  Variant (5)..(5): Xaa in position 5 is Gln or Arg
  Variant (6)..(6): Xaa in position 6 is Leu or Pro
  Variant (9)..(10): Xaa in position 9 to 10 is any amino acid
  Variant (11)..(11): Xaa in position 11 is any or no amino acid
  Variant (13)..(13): Xaa in position 13 is any amino acid
  Variant (14)..(14): Xaa in position 14 is any or no amino acid
  Variant (21)..(21): Xaa in position 21 is any amino acid
  Variant (25)..(25): Xaa in position 25 is any amino acid
  Variant (26)..(26): Xaa in position 26 is any or no amino acid
  Variant (28)..(30): Xaa in position 28 to 30 is any amino acid
  Variant (31)..(31): Xaa in position 31 is Ile or Val
  Variant (32)..(32): Xaa in position 32 is Pro or Gln
  Variant (33)..(33): Xaa in position 33 is Ala or Glu
LXXXXXDYXXXFXXAMDGFEXNGLXXFXXXXXX

SEQ ID NO: 50164 - protein, 37 aa, Artificial sequence
  Consensus
  Variant (2)..(6): Xaa in position 2 to 6 is any amino acid
  Variant (7)..(7): Xaa in position 7 is any or no amino acid
  Variant (9)..(9): Xaa in position 9 is any amino acid
  Variant (10)..(10): Xaa in position 10 is any or no amino acid
  Variant (12)..(12): Xaa in position 12 is Asp or Asn
  Variant (14)..(14): Xaa in position 14 is Asp or Glu
  Variant (15)..(15): Xaa in position 15 is any amino acid
  Variant (16)..(16): Xaa in position 16 is Phe or Tyr
  Variant (17)..(17): Xaa in position 17 is Ile or Val
  Variant (18)..(18): Xaa in position 18 is Asp or Asn
  Variant (20)..(20): Xaa in position 20 is Asp or Asn
  Variant (22)..(22): Xaa in position 22 is Gln or Thr
  Variant (23)..(23): Xaa in position 23 is Asp or Glu
  Variant (24)..(24): Xaa in position 24 is Lys or Arg
  Variant (25)..(26): Xaa in position 25 to 26 is Leu or Val
  Variant (29)..(29): Xaa in position 29 is Asp or Glu
  Variant (30)..(30): Xaa in position 30 is any amino acid
  Variant (31)..(31): Xaa in position 31 is Gly or Ser
  Variant (32)..(32): Xaa in position 32 is Ile or Met
  Variant (34)..(34): Xaa in position 34 is Ile or Leu
  Variant (36)..(36): Xaa in position 36 is Ala or Thr
NXXXXXXFXXRXNXXXXXPXLXXXXXIGXXXXSXFXY

SEQ ID NO: 50165 - DNA, 609 bp, Escherichia coli; identical to SEQ ID NO: 48336
  CDS (1)..(609)

SEQ ID NO: 50166 - protein, 202 aa, Escherichia coli; identical to SEQ ID NO: 48337

SEQ ID NO: 50167 - DNA, 552 bp, Vibrio cholerae O1 biovar eltor str. N16961; identical to SEQ ID NO: 48338
  CDS (1)..(552): transl_table=11

SEQ ID NO: 50168 - protein, 183 aa, Vibrio cholerae O1 biovar eltor str. N16961; identical to SEQ ID NO: 48339

SEQ ID NO: 50169 - DNA, 513 bp, Pasteurella multocida subsp. multocida str. Pm70; identical to SEQ ID NO: 48340
  CDS (1)..(513): transl_table=11

SEQ ID NO: 50170 - protein, 170 aa, Pasteurella multocida subsp. multocida str. Pm70; identical to SEQ ID NO: 48341

SEQ ID NO: 50171 - DNA, 537 bp, Pseudomonas aeruginosa PAO1; identical to SEQ ID NO: 48342
  CDS (1)..(537): transl_table=11

SEQ ID NO: 50172 - protein, 178 aa, Pseudomonas aeruginosa PAO1; identical to SEQ ID NO: 48343

SEQ ID NO: 50173 - DNA, 498 bp, Escherichia coli O157:H7; identical to SEQ ID NO: 48344
  CDS (1)..(498): transl_table=11

SEQ ID NO: 50174 - protein, 165 aa, Escherichia coli O157:H7; identical to SEQ ID NO: 48345

SEQ ID NO: 50175 - DNA, 525 bp, Yersinia pestis CO92; identical to SEQ ID NO: 48346
  CDS (1)..(525): transl_table=11

SEQ ID NO: 50176 - protein, 174 aa, Yersinia pestis CO92; identical to SEQ ID NO: 48347

SEQ ID NO: 50177 - DNA, 498 bp, Salmonella typhimurium LT2; identical to SEQ ID NO: 48348
  CDS (1)..(498): transl_table=11

SEQ ID NO: 50178 - protein, 165 aa, Salmonella typhimurium LT2; identical to SEQ ID NO: 48349

SEQ ID NO: 50179 - DNA, 531 bp, Ralstonia solanacearum GMI1000; identical to SEQ ID NO: 48350
  CDS (1)..(531): transl_table=11

SEQ ID NO: 50180 - protein, 176 aa, Ralstonia solanacearum GMI1000; identical to SEQ ID NO: 48351

SEQ ID NO: 50181 - DNA, 567 bp, Yersinia pestis KIM; identical to SEQ ID NO: 48352
  CDS (1)..(567): transl_table=11

SEQ ID NO: 50182 - protein, 188 aa, Yersinia pestis KIM; identical to SEQ ID NO: 48353

SEQ ID NO: 50183 - DNA, 498 bp, Shigella flexneri 2a str. 301; identical to SEQ ID NO: 48354
  CDS (1)..(498): transl_table=11

SEQ ID NO: 50184 - protein, 165 aa, Shigella flexneri 2a str. 301; identical to SEQ ID NO: 48355

SEQ ID NO: 50185 - DNA, 570 bp, Shewanella oneidensis MR-1; identical to SEQ ID NO: 48356
  CDS (1)..(570): transl_table=11

SEQ ID NO: 50186 - protein, 189 aa, Shewanella oneidensis MR-1; identical to SEQ ID NO: 48357

SEQ ID NO: 50187 - DNA, 558 bp, Pseudomonas putida KT2440; identical to SEQ ID NO: 48358
  CDS (1)..(558): transl_table=11

SEQ ID NO: 50188 - protein, 185 aa, Pseudomonas putida KT2440; identical to SEQ ID NO: 48359

SEQ ID NO: 50189 - DNA, 498 bp, Escherichia coli CFT073; identical to SEQ ID NO: 48360
  CDS (1)..(498): transl_table=11

SEQ ID NO: 50190 - protein, 165 aa, Escherichia coli CFT073; identical to SEQ ID NO: 48361

SEQ ID NO: 50191 - DNA, 540 bp, Vibrio vulnificus CMCP6; identical to SEQ ID NO: 48362
  CDS (1)..(540): transl_table=11

SEQ ID NO: 50192 - protein, 179 aa, Vibrio vulnificus CMCP6; identical to SEQ ID NO: 48363

SEQ ID NO: 50193 - DNA, 561 bp, Pseudomonas syringae pv. tomato str. DC3000; identical to SEQ ID NO: 48364
  CDS (1)..(561): transl_table=11

SEQ ID NO: 50194 - protein, 186 aa, Pseudomonas syringae pv. tomato str. DC3000; identical to SEQ ID NO: 48365

SEQ ID NO: 50195 - DNA, 552 bp, Vibrio parahaemolyticus RIMD 2210633; identical to SEQ ID NO: 48366
  CDS (1)..(552): transl_table=11

SEQ ID NO: 50196 - protein, 183 aa, Vibrio parahaemolyticus RIMD 2210633; identical to SEQ ID NO: 48367

SEQ ID NO: 50197 - DNA, 498 bp, Salmonella enterica subsp. enterica serovar Typhi Ty2; identical to SEQ ID NO: 48368
  CDS (1)..(498): transl_table=11

SEQ ID NO: 50198 - protein, 165 aa, Salmonella enterica subsp. enterica serovar Typhi Ty2; identical to SEQ ID NO: 48369

SEQ ID NO: 50199 - DNA, 558 bp, Coxiella burnetii RSA 493; identical to SEQ ID NO: 48370
  CDS (1)..(558): transl_table=11

SEQ ID NO: 50200 - protein, 185 aa, Coxiella burnetii RSA 493; identical to SEQ ID NO: 48371

SEQ ID NO: 50201 - DNA, 537 bp, Nitrosomonas europaea ATCC 19718; identical to SEQ ID NO: 48372
  CDS (1)..(537): transl_table=11

SEQ ID NO: 50202 - protein, 178 aa, Nitrosomonas europaea ATCC 19718; identical to SEQ ID NO: 48373

SEQ ID NO: 50203 - DNA, 573 bp, Bordetella bronchiseptica RB50; identical to SEQ ID NO: 48374
  CDS (1)..(573): transl_table=11

SEQ ID NO: 50204 - protein, 190 aa, Bordetella bronchiseptica RB50; identical to SEQ ID NO: 48375

SEQ ID NO: 50205 - DNA, 519 bp, Photorhabdus luminescens subsp. laumondii TTO1; identical to SEQ ID NO: 48376
  CDS (1)..(519): transl_table=11

SEQ ID NO: 50206 - protein, 172 aa, Photorhabdus luminescens subsp. laumondii TTO1; identical to SEQ ID NO: 48377

SEQ ID NO: 50207 - DNA, 552 bp, Vibrio vulnificus YJ016; identical to SEQ ID NO: 48378
  CDS (1)..(552): transl_table=11

SEQ ID NO: 50208 - protein, 183 aa, Vibrio vulnificus YJ016; identical to SEQ ID NO: 48379

SEQ ID NO: 50209 - DNA, 519 bp, Bartonella quintana str. Toulouse; identical to SEQ ID NO: 48380
  CDS (1)..(519): transl_table=11

SEQ ID NO: 50210 - protein, 172 aa, Bartonella quintana str. Toulouse; identical to SEQ ID NO: 48381

SEQ ID NO: 50211 - DNA, 516 bp, Bartonella henselae str. Houston-1; identical to SEQ ID NO: 48382
  CDS (1)..(516): transl_table=11

SEQ ID NO: 50212 - protein, 171 aa, Bartonella henselae str. Houston-1; identical to SEQ ID NO: 48383

SEQ ID NO: 50213 - DNA, 504 bp, Acinetobacter sp. ADP1; identical to SEQ ID NO: 48384
  CDS (1)..(504): transl_table=11

SEQ ID NO: 50214 - protein, 167 aa, Acinetobacter sp. ADP1; identical to SEQ ID NO: 48385

SEQ ID NO: 50215 - DNA, 534 bp, Erwinia carotovora subsp. atroseptica SCRI1043; identical to SEQ ID NO: 48386
  CDS (1)..(534): transl_table=11

SEQ ID NO: 50216 - protein, 177 aa, Erwinia carotovora subsp. atroseptica SCRI1043; identical to SEQ ID NO: 48387

SEQ ID NO: 50217 - DNA, 594 bp, Burkholderia mallei ATCC 23344; identical to SEQ ID NO: 48388
  CDS (1)..(594): transl_table=11

SEQ ID NO: 50218 - protein, 197 aa, Burkholderia mallei ATCC 23344; identical to SEQ ID NO: 48389

SEQ ID NO: 50219 - DNA, 489 bp, Methylococcus capsulatus str. Bath; identical to SEQ ID NO: 48390
  CDS (1)..(489): transl_table=11

SEQ ID NO: 50220 - protein, 162 aa, Methylococcus capsulatus str. Bath; identical to SEQ ID NO: 48391

SEQ ID NO: 50221 - DNA, 543 bp, Photobacterium profundum SS9; identical to SEQ ID NO: 48392
  CDS (1)..(543): transl_table=11

SEQ ID NO: 50222 - protein, 180 aa, Photobacterium profundum SS9; identical to SEQ ID NO: 48393

SEQ ID NO: 50223 - DNA, 582 bp, Idiomarina loihiensis L2TR; identical to SEQ ID NO: 48394
  CDS (1)..(582): transl_table=11

SEQ ID NO: 50224 - protein, 193 aa, Idiomarina loihiensis L2TR; identical to SEQ ID NO: 48395

SEQ ID NO: 50225 - DNA, 558 bp, Azoarcus sp. EbN1; identical to SEQ ID NO: 48396
  CDS (1)..(558): transl_table=11

SEQ ID NO: 50226 - protein, 185 aa, Azoarcus sp. EbN1; identical to SEQ ID NO: 48397

SEQ ID NO: 50227 - DNA, 543 bp, Vibrio fischeri ES114; identical to SEQ ID NO: 48398
  CDS (1)..(543): transl_table=11

SEQ ID NO: 50228 - protein, 180 aa, Vibrio fischeri ES114; identical to SEQ ID NO: 48399

SEQ ID NO: 50229 - DNA, 498 bp, Salmonella enterica subsp. enterica serovar Choleraesuis str; identical to SEQ ID NO: 48400
  CDS (1)..(498): transl_table=11

SEQ ID NO: 50230 - protein, 165 aa, Salmonella enterica subsp. enterica serovar Choleraesuis str; identical to SEQ ID NO: 48401

SEQ ID NO: 50231 - DNA, 561 bp, Pseudomonas syringae pv. syringae B728a; identical to SEQ ID NO: 48402
  CDS (1)..(561): transl_table=11

SEQ ID NO: 50232 - protein, 186 aa, Pseudomonas syringae pv. syringae B728a; identical to SEQ ID NO: 48403

SEQ ID NO: 50233 - DNA, 504 bp, Haemophilus somnus 129PT; identical to SEQ ID NO: 48404
  CDS (1)..(504)

SEQ ID NO: 50234 - protein, 167 aa, Haemophilus somnus 129PT; identical to SEQ ID NO: 48405

SEQ ID NO: 50235 - DNA, 507 bp, Pseudomonas syringae pv. syringae B728a; identical to SEQ ID NO: 48406
  CDS (1)..(507)

SEQ ID NO: 50236 - protein, 168 aa, Pseudomonas syringae pv. syringae B728a; identical to SEQ ID NO: 48407

SEQ ID NO: 50237 - DNA, 483 bp, Actinobacillus pleuropneumoniae serovar 1 str. 4074; identical to SEQ ID NO: 48408
  CDS (1)..(483)

SEQ ID NO: 50238 - protein, 160 aa, Actinobacillus pleuropneumoniae serovar 1 str. 4074; identical to SEQ ID NO: 48409

SEQ ID NO: 50239 - DNA, 537 bp, Pseudomonas aeruginosa UCBPP-PA14; identical to SEQ ID NO: 48410
  CDS (1)..(537)

SEQ ID NO: 50240 - protein, 178 aa, Pseudomonas aeruginosa UCBPP-PA14; identical to SEQ ID NO: 48411

SEQ ID NO: 50241 - DNA, 507 bp, Psychrobacter sp. 273-4; identical to SEQ ID NO: 48412
  CDS (1)..(507)

SEQ ID NO: 50242 - protein, 168 aa, Psychrobacter sp. 273-4; identical to SEQ ID NO: 48413

SEQ ID NO: 50243 - DNA, 597 bp, Burkholderia cepacia R18194; identical to SEQ ID NO: 48414
  CDS (1)..(597)

SEQ ID NO: 50244 - protein, 198 aa, Burkholderia cepacia R18194; identical to SEQ ID NO: 48415

SEQ ID NO: 50245 - DNA, 552 bp, Pseudomonas fluorescens PfO-1; identical to SEQ ID NO: 48416
  CDS (1)..(552)

SEQ ID NO: 50246 - protein, 183 aa, Pseudomonas fluorescens PfO-1; identical to SEQ ID NO: 48417

SEQ ID NO: 50247 - DNA, 558 bp, Pseudomonas fluorescens PfO-1; identical to SEQ ID NO: 48418
  CDS (1)..(558)

SEQ ID NO: 50248 - protein, 185 aa, Pseudomonas fluorescens PfO-1; identical to SEQ ID NO: 48419

SEQ ID NO: 50249 - DNA, 684 bp, Burkholderia fungorum LB400; identical to SEQ ID NO: 48420
  CDS (1)..(684)

SEQ ID NO: 50250 - protein, 227 aa, Burkholderia fungorum LB400; identical to SEQ ID NO: 48421

SEQ ID NO: 50251 - DNA, 564 bp, Thiobacillus denitrificans ATCC 25259; identical to SEQ ID NO: 48422
  CDS (1)..(564)

SEQ ID NO: 50252 - protein, 187 aa, Thiobacillus denitrificans ATCC 25259; identical to SEQ ID NO: 48423

SEQ ID NO: 50253 - DNA, 531 bp, Dechloromonas aromatica RCB; identical to SEQ ID NO: 48424
  CDS (1)..(531)

SEQ ID NO: 50254 - protein, 176 aa, Dechloromonas aromatica RCB; identical to SEQ ID NO: 48425

SEQ ID NO: 50255 - DNA, 552 bp, Azotobacter vinelandii AvOP; identical to SEQ ID NO: 48426
  CDS (1)..(552): transl_table=11

SEQ ID NO: 50256 - protein, 183 aa, Azotobacter vinelandii AvOP; identical to SEQ ID NO: 48427

SEQ ID NO: 50257 - DNA, 597 bp, Burkholderia vietnamiensis G4; identical to SEQ ID NO: 48428
  CDS (1)..(597): transl_table=11

SEQ ID NO: 50258 - protein, 198 aa, Burkholderia vietnamiensis G4; identical to SEQ ID NO: 48429

SEQ ID NO: 50259 - DNA, 603 bp, Burkholderia mallei 10229; identical to SEQ ID NO: 48430
  CDS (1)..(603)

SEQ ID NO: 50260 - protein, 200 aa, Burkholderia mallei 10229; identical to SEQ ID NO: 48431

SEQ ID NO: 50261 - DNA, 597 bp, Burkholderia cenocepacia AU 1054; identical to SEQ ID NO: 48432
  CDS (1)..(597): transl_table=11

SEQ ID NO: 50262 - protein, 198 aa, Burkholderia cenocepacia AU 1054; identical to SEQ ID NO: 48433

SEQ ID NO: 50263 - DNA, 603 bp, Burkholderia pseudomallei 1655; identical to SEQ ID NO: 48434
  CDS (1)..(603)

SEQ ID NO: 50264 - protein, 200 aa, Burkholderia pseudomallei 1655; identical to SEQ ID NO: 48435

SEQ ID NO: 50265 - DNA, 552 bp, Chromohalobacter salexigens DSM 3043; identical to SEQ ID NO: 48436
  CDS (1)..(552): transl_table=11

SEQ ID NO: 50266 - protein, 183 aa, Chromohalobacter salexigens DSM 3043; identical to SEQ ID NO: 48437

SEQ ID NO: 50267 - DNA, 537 bp, Methylobacillus flagellatus KT; identical to SEQ ID NO: 48438
  CDS (1)..(537): transl_table=11

SEQ ID NO: 50268 - protein, 178 aa, Methylobacillus flagellatus KT; identical to SEQ ID NO: 48439

SEQ ID NO: 50269 - DNA, 564 bp, Shewanella baltica OS155; identical to SEQ ID NO: 48440
  CDS (1)..(564): transl_table=11

SEQ ID NO: 50270 - protein, 187 aa, Shewanella baltica OS155; identical to SEQ ID NO: 48441

SEQ ID NO: 50271 - DNA, 564 bp, Shewanella amazonensis SB2B; identical to SEQ ID NO: 48442
  CDS (1)..(564): transl_table=11

SEQ ID NO: 50272 - protein, 187 aa, Shewanella amazonensis SB2B; identical to SEQ ID NO: 48443

SEQ ID NO: 50273 - DNA, 615 bp, Shewanella frigidimarina NCIMB 400; identical to SEQ ID NO: 48444
  CDS (1)..(615): transl_table=11

SEQ ID NO: 50274 - protein, 204 aa, Shewanella frigidimarina NCIMB 400; identical to SEQ ID NO: 48445

SEQ ID NO: 50275 - DNA, 564 bp, Pseudomonas fluorescens; identical to SEQ ID NO: 48446
  CDS (1)..(564): transl_table=11

SEQ ID NO: 50276 - protein, 187 aa, Pseudomonas fluorescens; identical to SEQ ID NO: 48447

SEQ ID NO: 50277 - DNA, 609 bp, Xanthomonas albilineans; identical to SEQ ID NO: 48448
  CDS (1)..(609): transl_table=11

SEQ ID NO: 50278 - protein, 202 aa, Xanthomonas albilineans; identical to SEQ ID NO: 48449

SEQ ID NO: 50279 - DNA, 549 bp, Pseudomonas putida; identical to SEQ ID NO: 48450
  CDS (1)..(549): transl_table=11

SEQ ID NO: 50280 - protein, 182 aa, Pseudomonas putida; identical to SEQ ID NO: 48451

SEQ ID NO: 50281 - DNA, 549 bp, Pseudomonas sp; identical to SEQ ID NO: 48452
  CDS (1)..(549): transl_table=11

SEQ ID NO: 50282 - protein, 182 aa, Pseudomonas sp; identical to SEQ ID NO: 48453

SEQ ID NO: 50283 - DNA, 23 bp, Artificial sequence
  Primer sequence
atgcgattgttgcgtttttgttg

SEQ ID NO: 50284 - DNA, 22 bp, Artificial sequence
  Primer sequence
ttagtacaacggtgacgccggt

SEQ ID NO: 50285 - protein, 177 aa, Artificial sequence; identical to SEQ ID NO: 48456
  Consensus
  Variant (3)..(6): Xaa in position 3 to 6 is any amino acid
  Variant (10)..(19): Xaa in position 10 to 19 is any amino acid
  Variant (20)..(21): Xaa in position 20 to 21 is any or no amino acid
  Variant (23)..(41): Xaa in position 23 to 41 is any amino acid
  Variant (42)..(54): Xaa in position 42 to 54 is any or no amino acid
  Variant (59)..(59): Xaa in position 59 is any amino acid
  Variant (61)..(66): Xaa in position 61 to 66 is any amino acid
  Variant (67)..(67): Xaa in position 67 is any or no amino acid
  Variant (70)..(70): Xaa in position 70 is any amino acid
  Variant (72)..(72): Xaa in position 72 is any amino acid
  Variant (75)..(84): Xaa in position 75 to 84 is any amino acid
  Variant (85)..(101): Xaa in position 85 to 101 is any or no amino acid
  Variant (103)..(103): Xaa in position 103 is any amino acid
  Variant (104)..(104): Xaa in position 104 is any or no amino acid
  Variant (107)..(109): Xaa in position 107 to 109 is any amino acid
  Variant (112)..(113): Xaa in position 112 to 113 is any amino acid
  Variant (116)..(121): Xaa in position 116 to 121 is any amino acid
  Variant (123)..(124): Xaa in position 123 to 124 is any amino acid
  Variant (126)..(131): Xaa in position 126 to 131 is any amino acid
  Variant (132)..(154): Xaa in position 132 to 154 is any or no amino acid
  Variant (156)..(156): Xaa in position 156 is any amino acid
  Variant (161)..(168): Xaa in position 161 to 168 is any amino acid
  Variant (172)..(172): Xaa in position 172 is any amino acid
  Variant (174)..(174): Xaa in position 174 is any amino acid

SEQ ID NO: 50286 - protein, 9 aa, Artificial sequence
  Consensus
  Variant (2)..(2): Xaa in position 2 is Leu or Val
  Variant (3)..(5): Xaa in position 3 to 5 is any amino acid
  Variant (6)..(6): Xaa in position 6 is Asp, Gly, Ser or Thr
  Variant (8)..(8): Xaa in position 8 is Leu, Met or Val
WXXXXXSXT

SEQ ID NO: 50287 - protein, 17 aa, Artificial sequence
  Consensus
  Variant (3)..(3): Xaa in position 3 is Ile or Val
  Variant (4)..(4): Xaa in position 4 is any amino acid
  Variant (6)..(8): Xaa in position 6 to 8 is any amino acid
  Variant (9)..(9): Xaa in position 9 is Asp, Glu, Gly, Asn or Gln
  Variant (10)..(14): Xaa in position 10 to 14 is any amino acid
  Variant (15)..(15): Xaa in position 15 is Ala, Gly or Gln
  Variant (16)..(16): Xaa in position 16 is any amino acid
  Variant (17)..(17): Xaa in position 17 is Gln, Ser or Thr
REXXLXXXXXXXXXXXX

SEQ ID NO: 50288 - protein, 10 aa, Artificial sequence
  Consensus
  Variant (2)..(3): Xaa in position 2 to 3 is any amino acid
  Variant (4)..(4): Xaa in position 4 is Ala, Pro or Ser
  Variant (5)..(5): Xaa in position 5 is Ile or Leu
  Variant (7)..(8): Xaa in position 7 to 8 is any amino acid
  Variant (9)..(9): Xaa in position 9 is Leu or Val
GXXXXGXXXF

SEQ ID NO: 50289 - protein, 23 aa, Artificial sequence
  Consensus
  Variant (2)..(3): Xaa in position 2 to 3 is any or no amino acid
  Variant (5)..(5): Xaa in position 5 is any or no amino acid
  Variant (7)..(14): Xaa in position 7 to 14 is any amino acid
  Variant (15)..(15): Xaa in position 15 is Ile, Leu, Met or Val
  Variant (16)..(16): Xaa in position 16 is Leu or Met
  Variant (17)..(17): Xaa in position 17 is Ile, Leu or Val
  Variant (18)..(18): Xaa in position 18 is any amino acid
  Variant (20)..(21): Xaa in position 20 to 21 is any amino acid
  Variant (23)..(23): Xaa in position 23 is Ala, Pro or Ser
RXXRXSXXXXXXXXXXXXEXXLX

SEQ ID NO: 50290 - DNA, 2970 bp, Saccharomyces cerevisiae; identical to SEQ ID NO: 34137
  CDS (1)..(2970)

SEQ ID NO: 50291 - protein, 989 aa, Saccharomyces cerevisiae; identical to SEQ ID NO: 34138

SEQ ID NO: 50292 - DNA, 2973 bp, Eremothecium gossypii; identical to SEQ ID NO: 34139
  CDS (1)..(2973)

SEQ ID NO: 50293 - protein, 990 aa, Eremothecium gossypii; identical to SEQ ID NO: 34140

SEQ ID NO: 50294 - DNA, 3039 bp, Neurospora crassa; identical to SEQ ID NO: 34141
  CDS (1)..(3039)

SEQ ID NO: 50295 - protein, 1012 aa, Neurospora crassa; identical to SEQ ID NO: 34142

SEQ ID NO: 50296 - DNA, 2967 bp, Magnaporthe grisea 70-15; identical to SEQ ID NO: 34143
  CDS (1)..(2967)

SEQ ID NO: 50297 - protein, 988 aa, Magnaporthe grisea 70-15; identical to SEQ ID NO: 34144

SEQ ID NO: 50298 - DNA, 3015 bp, Gibberella zeae PH-1; identical to SEQ ID NO: 34145
  CDS (1)..(3015)

SEQ ID NO: 50299 - protein, 1004 aa, Gibberella zeae PH-1; identical to SEQ ID NO: 34146

SEQ ID NO: 50300 - DNA, 2973 bp, Candida glabrata CBS138; identical to SEQ ID NO: 34147
  CDS (1)..(2973)

SEQ ID NO: 50301 - protein, 990 aa, Candida glabrata CBS138; identical to SEQ ID NO: 34148

SEQ ID NO: 50302 - DNA, 2949 bp, Kluyveromyces lactis NRRL Y-1140; identical to SEQ ID NO: 34149
  CDS (1)..(2949)

SEQ ID NO: 50303 - protein, 982 aa, Kluyveromyces lactis NRRL Y-1140; identical to SEQ ID NO: 34150

SEQ ID NO: 50304 - DNA, 3192 bp, Debaryomyces hansenii CBS767; identical to SEQ ID NO: 34151
  CDS (1)..(3192)

SEQ ID NO: 50305 - protein, 1063 aa, Debaryomyces hansenii CBS767; identical to SEQ ID NO: 34152

SEQ ID NO: 50306 - DNA, 2973 bp, Yarrowia lipolytica CLIB99; identical to SEQ ID NO: 34153
  CDS (1)..(2973)

SEQ ID NO: 50307 - protein, 990 aa, Yarrowia lipolytica CLIB99; identical to SEQ ID NO: 34154

SEQ ID NO: 50308 - DNA, 3150 bp, Aspergillus nidulans FGSC A4; identical to SEQ ID NO: 34155
  CDS (1)..(3150)

SEQ ID NO: 50309 - protein, 1049 aa, Aspergillus nidulans FGSC A4; identical to SEQ ID NO: 34156

SEQ ID NO: 50310 - DNA, 3105 bp, Candida albicans SC5314; identical to SEQ ID NO: 34157
  CDS (1)..(3105): transl_table=12

SEQ ID NO: 50311 - protein, 1034 aa, Candida albicans SC5314; identical to SEQ ID NO: 34158

SEQ ID NO: 50312 - DNA, 3198 bp, Aspergillus fumigatus Af293; identical to SEQ ID NO: 34159
  CDS (1)..(3198)

SEQ ID NO: 50313 - protein, 1065 aa, Aspergillus fumigatus Af293; identical to SEQ ID NO: 34160

SEQ ID NO: 50314 - DNA, 23 bp, Artificial sequence
  Primer sequence
atgttgcggtttcagcgatttgc

SEQ ID NO: 50315 - DNA, 24 bp, Artificial sequence
  Primer sequence
ctacagttccttcacctcccaatt

SEQ ID NO: 50316 - protein, 1038 aa, Artificial sequence; identical to SEQ ID NO: 34163
  Consensus
  Variant (2)..(3): Xaa in position 2 to 3 is any amino acid
  Variant (8)..(8): Xaa in position 8 is any amino acid
  Variant (10)..(14): Xaa in position 10 to 14 is any amino acid
  Variant (18)..(19): Xaa in position 18 to 19 is any amino acid
  Variant (21)..(21): Xaa in position 21 is any amino acid
  Variant (24)..(24): Xaa in position 24 is any amino acid
  Variant (26)..(26): Xaa in position 26 is any amino acid
  Variant (28)..(28): Xaa in position 28 is any amino acid
  Variant (29)..(29): Xaa in position 29 is any or no amino acid
  Variant (33)..(33): Xaa in position 33 is any amino acid
  Variant (38)..(38): Xaa in position 38 is any amino acid
  Variant (40)..(40): Xaa in position 40 is any amino acid
  Variant (41)..(41): Xaa in position 41 is any or no amino acid
  Variant (43)..(43): Xaa in position 43 is any amino acid
  Variant (48)..(48): Xaa in position 48 is any amino acid
  Variant (58)..(58): Xaa in position 58 is any amino acid
  Variant (74)..(74): Xaa in position 74 is any amino acid
  Variant (87)..(87): Xaa in position 87 is any amino acid
  Variant (97)..(97): Xaa in position 97 is any amino acid
  Variant (100)..(100): Xaa in position 100 is any amino acid
  Variant (112)..(113): Xaa in position 112 to 113 is any amino acid
  Variant (116)..(116): Xaa in position 116 is any amino acid
  Variant (119)..(120): Xaa in position 119 to 120 is any amino acid
  Variant (124)..(124): Xaa in position 124 is any amino acid
  Variant (128)..(128): Xaa in position 128 is any amino acid
  Variant (132)..(134): Xaa in position 132 to 134 is any amino acid
  Variant (137)..(137): Xaa in position 137 is any amino acid
  Variant (144)..(154): Xaa in position 144 to 154 is any amino acid
  Variant (155)..(166): Xaa in position 155 to 166 is any or no amino acid
  Variant (183)..(183): Xaa in position 183 is any amino acid
  Variant (185)..(185): Xaa in position 185 is any amino acid
  Variant (187)..(187): Xaa in position 187 is any amino acid
  Variant (193)..(193): Xaa in position 193 is any amino acid
  Variant (195)..(195): Xaa in position 195 is any amino acid
  Variant (199)..(199): Xaa in position 199 is any amino acid
  Variant (208)..(209): Xaa in position 208 to 209 is any amino acid
  Variant (214)..(214): Xaa in position 214 is any amino acid
  Variant (216)..(217): Xaa in position 216 to 217 is any amino acid
  Variant (219)..(220): Xaa in position 219 to 220 is any amino acid
  Variant (223)..(225): Xaa in position 223 to 225 is any amino acid
  Variant (233)..(233): Xaa in position 233 is any amino acid
  Variant (238)..(240): Xaa in position 238 to 240 is any amino acid
  Variant (242)..(244): Xaa in position 242 to 244 is any amino acid
  Variant (246)..(247): Xaa in position 246 to 247 is any amino acid
  Variant (249)..(254): Xaa in position 249 to 254 is any amino acid
  Variant (256)..(256): Xaa in position 256 is any amino acid
  Variant (258)..(262): Xaa in position 258 to 262 is any amino acid
  Variant (263)..(280): Xaa in position 263 to 280 is any or no amino acid
  Variant (282)..(295): Xaa in position 282 to 295 is any or no amino acid
  Variant (297)..(297): Xaa in position 297 is any amino acid
  Variant (304)..(305): Xaa in position 304 to 305 is any amino acid
  Variant (307)..(309): Xaa in position 307 to 309 is any amino acid
  Variant (311)..(312): Xaa in position 311 to 312 is any amino acid
  Variant (313)..(315): Xaa in position 313 to 315 is any or no amino acid
  Variant (319)..(321): Xaa in position 319 to 321 is any amino acid
  Variant (324)..(325): Xaa in position 324 to 325 is any amino acid
  Variant (328)..(328): Xaa in position 328 is any amino acid
  Variant (332)..(332): Xaa in position 332 is any amino acid
  Variant (334)..(335): Xaa in position 334 to 335 is any amino acid
  Variant (337)..(338): Xaa in position 337 to 338 is any amino acid
  Variant (342)..(342): Xaa in position 342 is any amino acid
  Variant (343)..(343): Xaa in position 343 is any or no amino acid
  Variant (347)..(348): Xaa in position 347 to 348 is any amino acid
  Variant (351)..(351): Xaa in position 351 is any amino acid
  Variant (355)..(355): Xaa in position 355 is any amino acid
  Variant (357)..(364): Xaa in position 357 to 364 is any amino acid
  Variant (369)..(369): Xaa in position 369 is any amino acid
  Variant (371)..(396): Xaa in position 371 to 396 is any amino acid
  Variant (397)..(405): Xaa in position 397 to 405 is any or no amino acid
  Variant (408)..(408): Xaa in position 408 is any amino acid
  Variant (410)..(410): Xaa in position 410 is any amino acid
  Variant (417)..(418): Xaa in position 417 to 418 is any amino acid
  Variant (420)..(422): Xaa in position 420 to 422 is any amino acid
  Variant (424)..(424): Xaa in position 424 is any amino acid
  Variant (428)..(428): Xaa in position 428 is any amino acid
  Variant (431)..(432): Xaa in position 431 to 432 is any amino acid
  Variant (434)..(436): Xaa in position 434 to 436 is any amino acid
  Variant (438)..(438): Xaa in position 438 is any amino acid
  Variant (440)..(441): Xaa in position 440 to 441 is any amino acid
  Variant (444)..(446): Xaa in position 444 to 446 is any amino acid
  Variant (448)..(452): Xaa in position 448 to 452 is any amino acid
  Variant (454)..(455): Xaa in position 454 to 455 is any amino acid
  Variant (457)..(463): Xaa in position 457 to 463 is any amino acid
  Variant (465)..(468): Xaa in position 465 to 468 is any amino acid
  Variant (469)..(470): Xaa in position 469 to 470 is any or no amino acid
  Variant (473)..(473): Xaa in position 473 is any amino acid
  Variant (478)..(483): Xaa in position 478 to 483 is any amino acid
  Variant (484)..(485): Xaa in position 484 to 485 is any or no amino acid
  Variant (489)..(493): Xaa in position 489 to 493 is any amino acid
  Variant (495)..(497): Xaa in position 495 to 497 is any amino acid
  Variant (499)..(501): Xaa in position 499 to 501 is any amino acid
  Variant (503)..(504): Xaa in position 503 to 504 is any amino acid
  Variant (507)..(508): Xaa in position 507 to 508 is any amino acid
  Variant (511)..(512): Xaa in position 511 to 512 is any amino acid
  Variant (514)..(525): Xaa in position 514 to 525 is any amino acid
  Variant (526)..(533): Xaa in position 526 to 533 is any or no amino acid
  Variant (535)..(544): Xaa in position 535 to 544 is any amino acid
  Variant (547)..(548): Xaa in position 547 to 548 is any amino acid
  Variant (553)..(553): Xaa in position 553 is any amino acid
  Variant (555)..(555): Xaa in position 555 is any amino acid
  Variant (558)..(558): Xaa in position 558 is any amino acid
  Variant (560)..(565): Xaa in position 560 to 565 is any amino acid
  Variant (567)..(578): Xaa in position 567 to 578 is any amino acid
  Variant (579)..(582): Xaa in position 579 to 582 is any or no amino acid
  Variant (589)..(597): Xaa in position 589 to 597 is any amino acid
  Variant (598)..(598): Xaa in position 598 is any or no amino acid
  Variant (601)..(601): Xaa in position 601 is any amino acid
  Variant (603)..(606): Xaa in position 603 to 606 is any amino acid
  Variant (611)..(613): Xaa in position 611 to 613 is any amino acid
  Variant (615)..(616): Xaa in position 615 to 616 is any amino acid
  Variant (620)..(627): Xaa in position 620 to 627 is any amino acid
  Variant (630)..(630): Xaa in position 630 is any amino acid
  Variant (634)..(634): Xaa in position 634 is any amino acid
  Variant (638)..(638): Xaa in position 638 is any or no amino acid
  Variant (641)..(648): Xaa in position 641 to 648 is any amino acid
  Variant (650)..(661): Xaa in position 650 to 661 is any amino acid
  Variant (662)..(662): Xaa in position 662 is any or no amino acid
  Variant (664)..(664): Xaa in position 664 is any amino acid
  Variant (667)..(672): Xaa in position 667 to 672 is any amino acid
  Variant (675)..(679): Xaa in position 675 to 679 is any amino acid
  Variant (682)..(683): Xaa in position 682 to 683 is any amino acid
  Variant (685)..(685): Xaa in position 685 is any amino acid
  Variant (687)..(691): Xaa in position 687 to 691 is any amino acid
  Variant (692)..(696): Xaa in position 692 to 696 is any or no amino acid
  Variant (698)..(699): Xaa in position 698 to 699 is any amino acid
  Variant (702)..(711): Xaa in position 702 to 711 is any amino acid
  Variant (714)..(715): Xaa in position 714 to 715 is any amino acid
  Variant (718)..(718): Xaa in position 718 is any amino acid
  Variant (721)..(723): Xaa in position 721 to 723 is any amino acid
  Variant (725)..(725): Xaa in position 725 is any amino acid
  Variant (727)..(727): Xaa in position 727 is any amino acid
  Variant (730)..(733): Xaa in position 730 to 733 is any amino acid
  Variant (735)..(735): Xaa in position 735 is any amino acid
  Variant (737)..(739): Xaa in position 737 to 739 is any amino acid
  Variant (742)..(742): Xaa in position 742 is any amino acid
  Variant (745)..(746): Xaa in position 745 to 746 is any amino acid
  Variant (748)..(749): Xaa in position 748 to 749 is any amino acid
  Variant (751)..(760): Xaa in position 751 to 760 is any amino acid
  Variant (761)..(764): Xaa in position 761 to 764 is any or no amino acid
  Variant (768)..(769): Xaa in position 768 to 769 is any amino acid
  Variant (771)..(772): Xaa in position 771 to 772 is any amino acid
  Variant (775)..(799): Xaa in position 775 to 799 is any amino acid
  Variant (800)..(806): Xaa in position 800 to 806 is any or no amino acid
  Variant (808)..(809): Xaa in position 808 to 809 is any amino acid
  Variant (811)..(813): Xaa in position 811 to 813 is any amino acid
  Variant (815)..(839): Xaa in position 815 to 839 is any amino acid
  Variant (840)..(852): Xaa in position 840 to 852 is any or no amino acid
  Variant (857)..(857): Xaa in position 857 is any amino acid
  Variant (859)..(861): Xaa in position 859 to 861 is any amino acid
  Variant (863)..(867): Xaa in position 863 to 867 is any amino acid
  Variant (870)..(873): Xaa in position 870 to 873 is any amino acid
  Variant (875)..(875): Xaa in position 875 is any amino acid
  Variant (877)..(877): Xaa in position 877 is any amino acid
  Variant (885)..(885): Xaa in position 885 is any amino acid
  Variant (890)..(890): Xaa in position 890 is any amino acid
  Variant (904)..(907): Xaa in position 904 to 907 is any amino acid
  Variant (909)..(909): Xaa in position 909 is any amino acid
  Variant (911)..(911): Xaa in position 911 is any amino acid
  Variant (913)..(913): Xaa in position 913 is any amino acid
  Variant (923)..(924): Xaa in position 923 to 924 is any amino acid
  Variant (927)..(931): Xaa in position 927 to 931 is any amino acid
  Variant (933)..(934): Xaa in position 933 to 934 is any amino acid
  Variant (936)..(936): Xaa in position 936 is any amino acid
  Variant (938)..(940): Xaa in position 938 to 940 is any amino acid
  Variant (941)..(947): Xaa in position 941 to 947 is any or no amino acid
  Variant (949)..(951): Xaa in position 949 to 951 is any amino acid
  Variant (954)..(954): Xaa in position 954 is any amino acid
  Variant (959)..(959): Xaa in position 959 is any amino acid
  Variant (963)..(963): Xaa in position 963 is any amino acid
  Variant (968)..(972): Xaa in position 968 to 972 is any amino acid
  Variant (975)..(977): Xaa in position 975 to 977 is any amino acid
  Variant (979)..(981): Xaa in position 979 to 981 is any amino acid
  Variant (984)..(984): Xaa in position 984 is any amino acid
  Variant (987)..(989): Xaa in position 987 to 989 is any amino acid
  Variant (992)..(994): Xaa in position 992 to 994 is any amino acid
  Variant (997)..(997): Xaa in position 997 is any amino acid
  Variant (999)..(1001): Xaa in position 999 to 1001 is any amino acid
  Variant (1003)..(1004): Xaa in position 1003 to 1004 is any amino acid
  Variant (1007)..(1008): Xaa in position 1007 to 1008 is any amino acid
  Variant (1012)..(1032): Xaa in position 1012 to 1032 is any amino acid
  Variant (1033)..(1035): Xaa in position 1033 to 1035 is any or no amino acid
  Variant (1037)..(1037): Xaa in position 1037 is any amino acid

SEQ ID NO: 50317 - protein, 101 aa, Artificial sequence; identical to SEQ ID NO: 34164
  Consensus
  Variant (2)..(2): Xaa in position 2 is any amino acid
  Variant (3)..(3): Xaa in position 3 is Ala or Ser
  Variant (4)..(4): Xaa in position 4 is Asp, Glu, Gln or Arg
  Variant (5)..(5): Xaa in position 5 is His or Tyr
  Variant (8)..(8): Xaa in position 8 is Ile, Leu or Val
  Variant (9)..(9): Xaa in position 9 is Ala, Asp or Glu
  Variant (11)..(11): Xaa in position 11 is Asp, Glu or Asn
  Variant (13)..(13): Xaa in position 13 is any amino acid
  Variant (18)..(18): Xaa in position 18 is Gly or Ser
  Variant (19)..(19): Xaa in position 19 is Ile or Val
  Variant (20)..(20): Xaa in position 20 is Ala or Gly
  Variant (22)..(22): Xaa in position 22 is Lys or Arg
  Variant (24)..(24): Xaa in position 24 is any or no amino acid
  Variant (27)..(27): Xaa in position 27 is any or no amino acid
  Variant (29)..(29): Xaa in position 29 is any amino acid
  Variant (32)..(32): Xaa in position 32 is Ile, Leu or Val
  Variant (45)..(45): Xaa in position 45 is any amino acid
  Variant (48)..(48): Xaa in position 48 is Pro or Gln
  Variant (49)..(49): Xaa in position 49 is Ile or Val
  Variant (58)..(58): Xaa in position 58 is Asn or Pro
  Variant (59)..(59): Xaa in position 59 is Lys or Arg
  Variant (60)..(60): Xaa in position 60 is Ser or Thr
  Variant (62)..(62): Xaa in position 62 is Ala or Ser
  Variant (68)..(68): Xaa in position 68 is Phe or Met
  Variant (70)..(70): Xaa in position 70 is Ala, Gly or Ser
  Variant (71)..(71): Xaa in position 71 is any amino acid
  Variant (73)..(73): Xaa in position 73 is His or Tyr
  Variant (75)..(75): Xaa in position 75 is any amino acid
  Variant (76)..(76): Xaa in position 76 is Phe or Tyr
  Variant (79)..(79): Xaa in position 79 is Ala or Ser
  Variant (83)..(84): Xaa in position 83 to 84 is any amino acid
  Variant (86)..(86): Xaa in position 86 is Phe or Met
  Variant (87)..(87): Xaa in position 87 is any amino acid
  Variant (90)..(90): Xaa in position 90 is any amino acid
  Variant (91)..(91): Xaa in position 91 is Asp, Gly or Ser
  Variant (92)..(92): Xaa in position 92 is Leu or Val
  Variant (94)..(94): Xaa in position 94 is Leu or Met
  Variant (95)..(95): Xaa in position 95 is Asp or Asn
  Variant (96)..(96): Xaa in position 96 is Ala or Ser
  Variant (98)..(98): Xaa in position 98 is Leu or Met
  Variant (99)..(99): Xaa in position 99 is any amino acid

SEQ ID NO: 50318 - protein, 17 aa, Artificial sequence
  Consensus
  Variant (5)..(5): Xaa in position 5 is Phe or Tyr
  Variant (12)..(12): Xaa in position 12 is Ile, Met or Val
  Variant (14)..(14): Xaa in position 14 is Asp or Asn
  Variant (16)..(16): Xaa in position 16 is Ala, Asp, Gly, Asn or Ser
KGVVXNEMKGQXSXAXY

SEQ ID NO: 50319 - protein, 44 aa, Artificial sequence; identical to SEQ ID NO: 34166
  Consensus
  Variant (2)..(2): Xaa in position 2 is any amino acid
  Variant (7)..(8): Xaa in position 7 to 8 is any amino acid
  Variant (10)..(10): Xaa in position 10 is Pro, Thr or Val
  Variant (11)..(11): Xaa in position 11 is Asp or Glu
  Variant (13)..(13): Xaa in position 13 is any amino acid
  Variant (14)..(14): Xaa in position 14 is His or Tyr
  Variant (15)..(15): Xaa in position 15 is any amino acid
  Variant (16)..(16): Xaa in position 16 is Asp, Gly or Gln
  Variant (18)..(19): Xaa in position 18 to 19 is any amino acid
  Variant (21)..(24): Xaa in position 21 to 24 is any amino acid
  Variant (26)..(26): Xaa in position 26 is any amino acid
  Variant (31)..(31): Xaa in position 31 is Lys or Arg
  Variant (32)..(32): Xaa in position 32 is any amino acid
  Variant (33)..(33): Xaa in position 33 is Phe, Ile or Leu
  Variant (34)..(34): Xaa in position 34 is Ser or Thr
  Variant (37)..(37): Xaa in position 37 is any amino acid
  Variant (38)..(38): Xaa in position 38 is Phe, Ile, Leu or Met
  Variant (39)..(39): Xaa in position 39 is Pro or Ser
  Variant (40)..(40): Xaa in position 40 is Leu or Val
  Variant (41)..(41): Xaa in position 41 is any amino acid
  Variant (42)..(42): Xaa in position 42 is Asp or Val
  Variant (43)..(43): Xaa in position 43 is any amino acid

SEQ ID NO: 50320 - protein, 66 aa, Artificial sequence; identical to SEQ ID NO: 34167
  Consensus
  Variant (2)..(2): Xaa in position 2 is any amino acid
  Variant (3)..(3): Xaa in position 3 is Ser or Thr
  Variant (5)..(6): Xaa in position 5 to 6 is any amino acid
  Variant (8)..(10): Xaa in position 8 to 10 is any amino acid
  Variant (11)..(11): Xaa in position 11 is Asp or Asn
  Variant (12)..(13): Xaa in position 12 to 13 is any amino acid
  Variant (14)..(14): Xaa in position 14 is Asp, Glu or Gln
  Variant (15)..(15): Xaa in position 15 is Ser or Thr
  Variant (17)..(17): Xaa in position 17 is any amino acid
  Variant (18)..(18): Xaa in position 18 is Ala, Leu or Val
  Variant (19)..(19): Xaa in position 19 is any amino acid
  Variant (20)..(20): Xaa in position 20 is Ile, Leu or Val
  Variant (21)..(21): Xaa in position 21 is Ile or Leu
  Variant (22)..(22): Xaa in position 22 is Gly or Ser
  Variant (23)..(23): Xaa in position 23 is Ala, Asn, Ser or Thr
  Variant (26)..(26): Xaa in position 26 is Phe, Ile, Leu or Met
  Variant (29)..(29): Xaa in position 29 is His or Tyr
  Variant (30)..(30): Xaa in position 30 is Asp, Gly or Ser
  Variant (32)..(32): Xaa in position 32 is Ala, Ile, Pro or Val
  Variant (33)..(33): Xaa in position 33 is Phe, Leu or Met
  Variant (34)..(34): Xaa in position 34 is His or Tyr
  Variant (35)..(36): Xaa in position 35 to 36 is any amino acid
  Variant (38)..(39): Xaa in position 38 to 39 is any amino acid
  Variant (40)..(41): Xaa in position 40 to 41 is any or no amino acid
  Variant (43)..(49): Xaa in position 43 to 49 is any amino acid
  Variant (50)..(50): Xaa in position 50 is any or no amino acid
  Variant (52)..(52): Xaa in position 52 is Ala, Ser or Thr
  Variant (54)..(54): Xaa in position 54 is any amino acid
  Variant (55)..(55): Xaa in position 55 is Asp or Glu
  Variant (56)..(56): Xaa in position 56 is Asn, Pro, Ser or Thr
  Variant (57)..(57): Xaa in position 57 is any amino acid
  Variant (58)..(58): Xaa in position 58 is Ala, Gly, Pro or Thr
  Variant (59)..(60): Xaa in position 59 to 60 is any amino acid
  Variant (61)..(61): Xaa in position 61 is Gly, Asn or Pro
  Variant (62)..(63): Xaa in position 62 to 63 is Phe, Ile or Leu
  Variant (64)..(64): Xaa in position 64 is Ser or Thr
  Variant (65)..(65): Xaa in position 65 is Ile or Val

SEQ ID NO: 50321 - protein, 89 aa, Artificial sequence; identical to SEQ ID NO: 34168
  Consensus
  Variant (2)..(2): Xaa in position 2 is Phe or Tyr
  Variant (3)..(3): Xaa in position 3 is any amino acid
  Variant (5)..(5): Xaa in position 5 is any amino acid
  Variant (7)..(7): Xaa in position 7 is Ala, Gly, Ser or Thr
  Variant (8)..(8): Xaa in position 8 is Ala, Gly or Ser
  Variant (9)..(9): Xaa in position 9 is any amino acid
  Variant (10)..(10): Xaa in position 10 is Ala, Cys or Ser
  Variant (11)..(12): Xaa in position 11 to 12 is any amino acid
  Variant (13)..(13): Xaa in position 13 is Gly or Thr
  Variant (14)..(14): Xaa in position 14 is Ala, Ser, Thr or Val
  Variant (15)..(15): Xaa in position 15 is Pro or Ser
  Variant (16)..(16): Xaa in position 16 is Phe or Tyr
  Variant (17)..(20): Xaa in position 17 to 20 is any amino acid
  Variant (21)..(21): Xaa in position 21 is Gly, Asn or Ser
  Variant (22)..(22): Xaa in position 22 is Ala or Ser
  Variant (23)..(23): Xaa in position 23 is any amino acid
  Variant (25)..(25): Xaa in position 25 is any amino acid
  Variant (26)..(26): Xaa in position 26 is Ile or Val
  Variant (27)..(27): Xaa in position 27 is Leu or Met
  Variant (28)..(28): Xaa in position 28 is Ala or Ser
  Variant (29)..(29): Xaa in position 29 is Asn, Gln or Ser
  Variant (30)..(30): Xaa in position 30 is Leu or Met
  Variant (33)..(34): Xaa in position 33 to 34 is any or no amino acid
  Variant (36)..(37): Xaa in position 36 to 37 is any or no amino acid
  Variant (40)..(40): Xaa in position 40 is any amino acid
  Variant (42)..(42): Xaa in position 42 is Ile or Val
  Variant (51)..(51): Xaa in position 51 is Ala or Gly
  Variant (53)..(53): Xaa in position 53 is Ala or Ser
  Variant (54)..(56): Xaa in position 54 to 56 is any amino acid
  Variant (57)..(57): Xaa in position 57 is Ala, Pro or Ser
  Variant (58)..(59): Xaa in position 58 to 59 is any amino acid
  Variant (61)..(61): Xaa in position 61 is any amino acid
  Variant (63)..(63): Xaa in position 63 is Ala, Gly, Asn or Ser
  Variant (64)..(64): Xaa in position 64 is Phe or Tyr
  Variant (65)..(65): Xaa in position 65 is any amino acid
  Variant (71)..(71): Xaa in position 71 is any amino acid
  Variant (72)..(72): Xaa in position 72 is Ala, Leu or Pro
  Variant (73)..(74): Xaa in position 73 to 74 is any amino acid
  Variant (75)..(75): Xaa in position 75 is Ser or Thr
  Variant (76)..(76): Xaa in position 76 is Ile or Leu
  Variant (77)..(81): Xaa in position 77 to 81 is any amino acid
  Variant (82)..(82): Xaa in position 82 is Ala, Ser or Val
  Variant (83)..(83): Xaa in position 83 is Ala, Gly or Pro
  Variant (84)..(84): Xaa in position 84 is any amino acid
  Variant (85)..(85): Xaa in position 85 is Phe, Trp or Tyr
  Variant (86)..(88): Xaa in position 86 to 88 is any amino acid
  Variant (89)..(89): Xaa in position 89 is Asp, Glu, Lys or Arg

SEQ ID NO: 50322 - DNA, 942 bp, Saccharomyces cerevisiae
  CDS (1)..(942)
atgaataaacttgttgatgcccactgtcatgttataaccgacccagacaacacattctgcggtgatgatggagggtcccagggtacgttgcgttgcgttatgtcatcaaacccatatgactggaacaatttgaaaaaattggctggcagaagcacaagtaaaaacgatatatgcgtgggatttggtgtgcatccttggtacagccacttattttatgtgggaagtcggcgcgacaaggtttctcactatcaagatgtactggagtataagaatgaagaacagttcgacagtttggttcaggtgcttcccgaacctctagatcttgaagagtatataaaaagagagtttaacgacactttggttagtgtgattggagaaatcggtcttgataagctcttcagacttcctgcaaatggtttctacatgcagaacgagaaggcaaggcttacgacagtgaaggtcaaactatcgcatcaagaaacagtattcaggcgattttggcgactggcaaggcacacaagcaagcccatctctatacacgatgtaaagtgccacgggaaactaaacgatatctgcaatgaagagctcttgacgtatcactctgtcaagatatgtttacattcgtacacaggctccaaggaaacgcttctgggccaatggctcaagaagtttcccccggatcgtatttttgtgagcctatccaaatggattaattttaaggacccagaagagggagatgccctggtcaggagcttgccctcaacttgcatacttactgaaaccgactatcctattgacaatccagatccgtcataccaaaaggcccttacagagcagctgcagtatttgaatgcacaaatcgcacgagcatgggacgagacactggatgcctcacaagccgctttgcgtgtatacgaaaactttcagaaatttatcaagtga

SEQ ID NO: 50323 - protein, 313 aa, Saccharomyces cerevisiae
MNKLVDAHCHVITDPDNTFCGDDGGSQGTLRCVMSSNPYDWNNLKKLAGRSTSKNDICVGFGVHPWYSHLFYVGSRRDKVSHYQDVLEYKNEEQFDSLVQVLPEPLDLEEYIKREFNDTLVSVIGEIGLDKLFRLPANGFYMQNEKARLTTVKVKLSHQETVFRRFWRLARHTSKPISIHDVKCHGKLNDICNEELLTYHSVKICLHSYTGSKETLLGQWLKKFPPDRIFVSLSKWINFKDPEEGDALVRSLPSTCILTETDYPIDNPDPSYQKALTEQLQYLNAQIARAWDETLDASQAALRVYENFQKFIK

SEQ ID NO: 50324 - DNA, 819 bp, Arabidopsis thaliana
  CDS (1)..(819)
atgaagttgtttgatgctcattgtcacctccaagacaagagggtcatcgacaaagcctcgcagctcatatctgctgctttagctgtcggtgttaccaatttcgcagtcaatggaacctccgagaaagattggaacttggtgaaagagatgggagagacgtatccttctgttgttccttgctttggactccatccttggtttattgctgatagaagccctcattggtttaaaacattgaagaagttctttgagaccactcctactgctgctgttggagaaattggtttagacaaaggtcccttagcaggaggaattgattactcagaccagctagtcgtgtttcgcccacagcttgaacttgcaaaagaactgaacaaaccagtagcagttcattgcatcgatgcatttgatgatctcctagagataatgagatccatagggccttttcctgctggggtgattcttcattcattcaatggttcagctgaagttgttcctaaactcgctgagcttggtgcatacttctctttttctggctggttcacttacattgatgagaaaattgccaagaagactttgaaatcgattccttccgataggctcttattggagacggattcacctgacgggttaccaaaatcagatgagagttcttcggatccaaaaccaactctcaatgagcctgcaaacattcttgctgtactagattatgttgcgaacctgtcaaacatgaagaaggaagagcttgcggagttaagttatgtgaattctgtgaggttgttttcttatccaggttccaaattgcttacagaccagtaa

SEQ ID NO: 50325 - protein, 272 aa, Arabidopsis thaliana
MKLFDAHCHLQDKRVIDKASQLISAALAVGVTNFAVNGTSEKDWNLVKEMGETYPSVVPCFGLHPWFIADRSPHWFKTLKKFFETTPTAAVGEIGLDKGPLAGGIDYSDQLVVFRPQLELAKELNKPVAVHCIDAFDDLLEIMRSIGPFPAGVILHSFNGSAEVVPKLAELGAYFSFSGWFTYIDEKIAKKTLKSIPSDRLLLETDSPDGLPKSDESSSDPKPTLNEPANILAVLDYVANLSNMKKEELAELSYVNSVRLFSYPGSKLLTDQ

SEQ ID NO: 50326 - DNA, 978 bp, Arabidopsis thaliana
  CDS (1)..(978)
atgaaactgttcgacgcgcactgtcaccttcaagacccgaggattatcaccaaagctcctcagataatctcctccgccgttgcttccggcgtctctgctttcgccgtcaatggagtctccgagaaagattggagtttggtcaaagagatgggagctaaatacccttctgttgttccttgctttgggatccatccatggtatgtagcagagaggagtcctcaatggtttgagacattaaagagtttctttgagaccactcctactgctgctgttggagaaattggtttggacaaagggtctaagggaagggagattgatttctcagaacaggttaccgtctttcgtcaacagcttgaacttgcaaaggaattgaagaaacctgcgtcagttcattgtgttcgtgcatttggggatctactcgagatattaaaatctgtagggccttttccttctggggtcatgcttcactcgtatttgggttctgctgagatggttcctgaatttgctaagctcggtgcatatttctccttctccggtttccttatgtccatgagtgagaaaaaagccaagaagatgttgaaagcagttccatctgataggatcttattggagacggattcaccagatgcactaccaaaggcagagtcaggttgtctctactttgtagacggagatccttctctacccgaagaaggaaattcagctcaggatcttgattctgcttcatatgataagcctaatgtgtctagtgactcgatgaagttaacaaaggaaacacttaatcacccggctaatattcatatcgtactcggatatgtagcgcagttgttggatatgaagaatgaagaactcgcggaactaagttatcaaaatgctgttcggttattctcttacgaaggttcaaagatacttcttgacagaggtactggtgatgtctctggtcacactcaaaaccagtcaacaacacatgtatcatga

SEQ ID NO: 50327 - protein, 325 aa, Arabidopsis thaliana
MKLFDAHCHLQDPRIITKAPQIISSAVASGVSAFAVNGVSEKDWSLVKEMGAKYPSVVPCFGIHPWYVAERSPQWFETLKSFFETTPTAAVGEIGLDKGSKGREIDFSEQVTVFRQQLELAKELKKPASVHCVRAFGDLLEILKSVGPFPSGVMLHSYLGSAEMVPEFAKLGAYFSFSGFLMSMSEKKAKKMLKAVPSDRILLETDSPDALPKAESGCLYFVDGDPSLPEEGNSAQDLDSASYDKPNVSSDSMKLTKETLNHPANIHIVLGYVAQLLDMKNEELAELSYQNAVRLFSYEGSKILLDRGTGDVSGHTQNQSTTHVS

SEQ ID NO: 50328 - DNA, 771 bp, Thermoanaerobacter tengcongensis MB4
  CDS (1)..(771): transl_table=11
ttgcttatagactctcacgctcatcttgaggatgagaaatacaatgaagacagggaaaaagtgattgaggagtgcaaaaaggacctcacatttttaataaatgtggggtccaatatattgacttctaaaaagaccattgaacttgcccacaaatacgattttatatacgcaactgtgggcattcaccctcatgatgcagaaagagaaaaagacaaaatagaggaaatagagaagttggctcttgaggataaagtggtggctataggagaaattggcttggattattattacggtgaccctcctaaagaatttcaaattgaggcttttgtgaagcagataaggctcgcaaaaaagcttaaacttcccattgtaattcacgacagagtcgcccatgaggatatcttaaaaatactgaaaaaagaatggacacaggatttaaaaggggtatttcacagttattctggtagtgtcgagatgataaaagaagtgataagtatgaatttttacatctctctttcaggaactgtcactttcaaaaacgctaaaaaagttagggaggttgcaaaagaagttcctcttgaatggcttttgattgagacagatagtccctatttgactcctgagccctacagaggtaagagaaacaagcccacatatgttaaatttgtagcacaaaaaattgctgaaataaaaggtataagttttgaagaagtttgtgaaacaacctcgcaaaatgccataaagcttttcaatttgccctcctgtttttga

SEQ ID NO: 50329 - protein, 256 aa, Thermoanaerobacter tengcongensis MB4
MLIDSHAHLEDEKYNEDREKVIEECKKDLTFLINVGSNILTSKKTIELAHKYDFIYATVGIHPHDAEREKDKIEEIEKLALEDKVVAIGEIGLDYYYGDPPKEFQIEAFVKQIRLAKKLKLPIVIHDRVAHEDILKILKKEWTQDLKGVFHSYSGSVEMIKEVISMNFYISLSGTVTFKNAKKVREVAKEVPLEWLLIETDSPYLTPEPYRGKRNKPTYVKFVAQKIAEIKGISFEEVCETTSQNAIKLFNLPSCF

SEQ ID NO: 50330 - DNA, 897 bp, Eremothecium gossypii
  CDS (1)..(897)
atggtgccattggtagatagccactgccacgtgcggacgcggcggagcgccgcagacgtgctggttcttgcgccagcagcgggcaccgcccgctgtctgatgtcctgcaacgtgtacgactgggaggcgcttgcggcggccggcgccgtgtgcaaggggttcggcgtccatccgtggtatgcgcatctgttttgcctgggacctacgtgcgagaaggcggcccactaccgggcggtgctgcaggcgcgcgacgcgggggagctggaggcactgatcgcgcagctgccgccccccgtgccgctggaggcgcacatcgccgccggcatggccgcgcagccgcagtgcgtgggcgaggttgggctggataaggtgttccggctgcctgcgggcggcgtttacgagggcggcggcgcgctcaccaacgtgcgcatcagcgcagaccaccagctcgccgtattccgccgtatgtgcgagctcgctgccgcgcatcgcctgccgctttcggtgcactcggtgcggtggcacggtaaggtgctggatgtgtacgatgaggtgctgggcgcagactctcgcgtgaacgtgtgtctgcactcgtactcggaagatacgcactctgcccaccgttggtgtgacgagttcgtaagccgtgcgttctatggtgtgtcgaacgccctcaacatgcgcaactacgacacctcgctgcagttactgcgcgctctaccgctcgacagcttgctgaccgagaccgaccacacggtcgacgataccgacccggcggccctacaggccgacctgttcgcggtactacatgcgatccaggacgcccacggacttccgtcgctcgacgccgcgcgcgtggccgtgtatagcaacttctgcagatttctctctaagtag

SEQ ID NO: 50331 - protein, 298 aa, Eremothecium gossypii
MVPLVDSHCHVRTRRSAADVLVLAPAAGTARCLMSCNVYDWEALAAAGAVCKGFGVHPWYAHLFCLGPTCEKAAHYRAVLQARDAGELEALIAQLPPPVPLEAHIAAGMAAQPQCVGEVGLDKVFRLPAGGVYEGGGALTNVRISADHQLAVFRRMCELAAAHRLPLSVHSVRWHGKVLDVYDEVLGADSRVNVCLHSYSEDTHSAHRWCDEFVSRAFYGVSNALNMRNYDTSLQLLRALPLDSLLTETDHTVDDTDPAALQADLFAVLHAIQDAHGLPSLDAARVAVYSNFCRFLSK

SEQ ID NO: 50332 - DNA, 1329 bp, Neurospora crassa
  CDS (1)..(1329)
atgtgtccctccaccggcgaatcaatacctcatgaagttcccaaaagagacgatgatgaagctcccaaagagcccttcccatggcacgttggtgtctacgacgcccactgtcatcccaccgacaccatggcttccatctccagcataaacaacatgcaagctcgacttctcaccatcatggccacacgcggtcaagaccaagacctcgtcgcctccgtagccgagcagcacggcatcacagacttgaacgagctgcgcgaaagcagttcatccgaaacccccaagaaggtcgtcccagcgttcggctggcacccttggttctctcaccagctctacgatgactccaaagacgaagaagaagaagaagaaggagaagaggtcacggatgtacaggcacacaatagaaaaactaagcactactctaccgttctatcgccccctcccgatgccgatttcatcgcttctctccccgatcccattcctctcagcaagtttctccaagaaacccgccaacgcctgctcgcccaccccacagccctggtcggcgaaatcggccttgacaaagcgtttcgtctcccgtggggcaaagtgaatgagtcgtcctcgtcctcgcgcaacgacggcgacctaacaccgggcggtcgagaaggacggatgctcagtccttaccacgtcaagatggcgcaccaggtcgacgttctcaaagcccaacttcgcctggcaggcgagctgggtcgtcccgtctctctacacggcgtgcaggctcacggcgtgttattcgatgccttggcgtcgctgtggaagggacatgagaaggaggtggtgtcgcggaagaagcaaaagatgattgccaagggcgtgtcggaggatttttcctcctcgtctagtgatgaggaggaggaatccgattactcggaatttgggcttgtgggggagcccaagcaactacacaaaatcatgaagcccaagaagaagccgtacaaaccgaaaccgaaaccgttcccgccgagggcgtgtctacattccttcagcgggccgccgcaggtgttgaagcagtatttggatcccaagatcccggtcaagtgctacttttcgttttccatggtgattaatctggggacggcgggcggagaggccaagtttgcggatgtgattcgggcgtgtccggatgggcaggtgctggtggagagcgatttgcatgtggcgggcgaggatatggatgggtatttggaggatattgcgaggaggatatgtgagataaaggggtgggggttggaggaggggatgcagaggataaggaggaattatgaagagtttttgtttggttga

SEQ ID NO: 50333 - protein, 442 aa, Neurospora crassa
MCPSTGESIPHEVPKRDDDEAPKEPFPWHVGVYDAHCHPTDTMASISSINNMQARLLTIMATRGQDQDLVASVAEQHGITDLNELRESSSSETPKKVVPAFGWHPWFSHQLYDDSKDEEEEEEGEEVTDVQAHNRKTKHYSTVLSPPPDADFIASLPDPIPLSKFLQETRQRLLAHPTALVGEIGLDKAFRLPWGKVNESSSSSRNDGDLTPGGREGRMLSPYHVKMAHQVDVLKAQLRLAGELGRPVSLHGVQAHGVLFDALASLWKGHEKEVVSRKKQKMIAKGVSEDFSSSSSDEEEESDYSEFGLVGEPKQLHKIMKPKKKPYKPKPKPFPPRACLHSFSGPPQVLKQYLDPKIPVKCYFSFSMVINLGTAGGEAKFADVIRACPDGQVLVESDLHVAGEDMDGYLEDIARRICEIKGWGLEEGMQRIRRNYEEFLFG

SEQ ID NO: 50334 - DNA, 1254 bp, Magnaporthe grisea 70-15
  CDS (1)..(1254)
atgtgtccaggccacgggcatgctccgggtaatgccccggtctcggccggcagtccgagtaacaccggacccggcgactccgaaccttttccctgggagatcggagcttatgattcacactgccaccccactaccactcccgcctccatcgcccacattcccacaatgcggacccgggccatgaccgtcatggcctctcgcgcccaggaccaggctctctcggccaccgctgcagacgaccacggtgtccccagtcgctctgaactgcagtcgcggtcgttggatcccagcgctccggtcggcagggttgtccctgcttttggctaccatccttggttctcgcacctgatctatgacgactcggcgtgcgcagagctcgacaaggccgcccacttcgcctcggtcctgaagccatctccggcctcggacccggacttcctcgccagcctgcttgacccggaacctctctcgtccgtcgtcgctgcgacaaaagagaggttgctccgctacccgaccggaatggtcggcgaggtaggtctcgacaaggcgtttcggctcccgcagcctcgcgaaccggggccggacggcgagatcgacccacccgctgaggacgagcgcgacatggttcccggcgggcggtacggccgcatgctgagcaagtaccgagtcaacctgccgcaccaggagcgcgtcttcttggctcaggtcgccctggctggggagctcgggcggcccgtgagcgtgcacggggtgcagtgctcaggtctgctgctggatgcgctctccaagacgtggaagggccacgagagggaggtcgtcagccggcggaagcagaggctggtggctcagaacgcccaggcctgggaggagtatgactcggacgaggaggatgagccgcagcagacagaggtcggcgcgaagccgtttcctccgcggatatgcctgcactccttctctggttcggccgaagtgttaaagcagtacacggacccgcggataccctccaaaatattcttttccttctcagttgcgataaacatgggtaccgcctctgtcgaggagaaattgcccgagataatacgagcctgtccagatgataggatacttgtagagaccgatctgcatcttgccggcgacgagatggattcaatgctggagaagatttaccgccatgtgtgccacgtaaaaggctggggactcaaggagggcatggagaggatagccaggaactatgaagatttcgtgtttggctag

SEQ ID NO: 50335 - protein, 417 aa, Magnaporthe grisea 70-15
MCPGHGHAPGNAPVSAGSPSNTGPGDSEPFPWEIGAYDSHCHPTTTPASIAHIPTMRTRAMTVMASRAQDQALSATAADDHGVPSRSELQSRSLDPSAPVGRVVPAFGYHPWFSHLIYDDSACAELDKAAHFASVLKPSPASDPDFLASLLDPEPLSSVVAATKERLLRYPTGMVGEVGLDKAFRLPQPREPGPDGEIDPPAEDERDMVPGGRYGRMLSKYRVNLPHQERVFLAQVALAGELGRPVSVHGVQCSGLLLDALSKTWKGHEREVVSRRKQRLVAQNAQAWEEYDSDEEDEPQQTEVGAKPFPPRICLHSFSGSAEVLKQYTDPRIPSKIFFSFSVAINMGTASVEEKLPEIIRACPDDRILVETDLHLAGDEMDSMLEKIYRHVCHVKGWGLKEGMERIARNYEDFVFG

SEQ ID NO: 50336 - DNA, 1176 bp, Gibberella zeae PH-1
  CDS (1)..(1176)
atgtgtatgcatgatcatcaagacaacgcgggtaccgagccaccgctcgaccctgtggaaccattcccgtggcatctcggagttttcgatgcccataaccacatcggcgaacgtgtttattcagtttccgacttacctaccatgaaatctcgtgcggtagcaataatggcaacaagaacacaagatcagccgctcattgaagccatcgtccaacaacacggggtgaaaggcccggaatgtttctcccaagataaaacgactgtcatcgcaggttacgggaggcacccgtggttttcgcatgagctttatgacgactcattggaaaaccctacctatgtgccatctgatgatgttgaggccgcaaaagggcgacattataaggcagtactttcaccagccccagaagacccggcgtggtggcacgatcaaccagctccaatcgccctttcagagttcatcgctgaaaccagggcccggcttatacgggatccatttgcaatggtcggcgaaattggtctagacaagccttttaggttaccaatgcagtggcccgacccaagaccgcccagagatcccgcacgcacgggaggaggacgcgagagaagaccacttagtcagcaccgtatacaaattccgcaccaaaaggctgtattcatggctcatttgaaacttgccggtgaacttggaagagctgtcagtgtccacggtgttcaagtacatggacttttgtacaacgctttgacagagtgctggaaggggcacgaactcaaaggccgccgcgcgagggacaaagaaaggaaggagaacactcaaacggccgatgttgaagaggcaacttcgaagccatatcctccgcgtatttgtctccactccttcagtggcaaagaagacgccgtgaagcagtatcttcaaccttcgatccctgcaaagatattcttctcgttttccaaggccaacaatctgggtacggatatgggaacggaaaagagcaaggatgccgtgaaggcggtgcctgataatcgaatcttggtcgagagtgatcttcacacggccggtcaaaggatggataatgagcttgaggagatgtatagagcaatttgcgagttcaaaggatggacactggaacatggtgtagcgcagatagcaaagaactacaccgagtttgtatttggctag

SEQ ID NO: 50337 - protein, 391 aa, Gibberella zeae PH-1
MCMHDHQDNAGTEPPLDPVEPFPWHLGVFDAHNHIGERVYSVSDLPTMKSRAVAIMATRTQDQPLIEAIVQQHGVKGPECFSQDKTTVIAGYGRHPWFSHELYDDSLENPTYVPSDDVEAAKGRHYKAVLSPAPEDPAWWHDQPAPIALSEFIAETRARLIRDPFAMVGEIGLDKPFRLPMQWPDPRPPRDPARTGGGRERRPLSQHRIQIPHQKAVFMAHLKLAGELGRAVSVHGVQVHGLLYNALTECWKGHELKGRRARDKERKENTQTADVEEATSKPYPPRICLHSFSGKEDAVKQYLQPSIPAKIFFSFSKANNLGTDMGTEKSKDAVKAVPDNRILVESDLHTAGQRMDNELEEMYRAICEFKGWTLEHGVAQIAKNYTEFVFG

SEQ ID NO: 50338 - DNA, 1425 bp, Gibberella zeae PH-1
  CDS (1)..(1425)
atgctctctacaacctctaacgtacgcaagcgtgcttgtcattacacaagagagatcatcgaaataccaatgccattatcagagcaaatcatctacctcactgaaaactgctccgtcgataacaaacaccaaccacagacgtcacatgagcaactcatctcacttttgactcatcccctgattcgatcaatcgtcaacatgtgtcaatacacccacaattacgatgagcaaccagtgcctgtagtagatgtaggcgacgaatccccgttcccctggcatctgccaatatgcgacgctcactgccatccaacggataccatggattccatacaggatatcccctcaatgcgcgcggctgcattggctattatggcaacccgggcacaggaccaggatcttgtcgcagaagtggccaacaagcactccaacgataaccccaagctgctcttccaaggcaactccggccaaagcaatacttgggtagttccatcttttggctggcacccctggttttcacatctcctctatgacgactcggccgatgctccgacatatcggcccacctccggctccgagaccgacaacgctgccaagcaggcccactacaacgccgttctccagccggaaccttcatcggactttgtcgcctctctgccaaccccaatcgctgtaagcacgtttctagaggaaactgaatcccgtctatctgccaatccctatgccttggtcggcgaaattggcgttgacaaggccttccgtcttcctgaaccatggaacccctctgagcaagctgaacgagattcgactttgactcctggaggtcgcgaaggtcggcatctcagtcctcatcgggtaagaatagagcatcagcgtgccattctcgctgcacagctccgtcttgctggcaagactcgccgagctgttagcgtacacggtgtgcaagctcatggagtgctccatgacactcttgtcgacacatggaagggtcatgagcgcgaagtgataacacgtcgaaaacggcgtcttgttgccaagggggctgaggacttttcggatgaggaagatgacgatgacagcgagaagccatatcctccacggatatgtctgcactcattcagtgctagtgttgaagtgttgaagcagtacctcagcccaacaatcccagctcgcatttttgtctcactgtcggtggctgtcaaccttagcacggatgccagttgcaccaagactgacgaggtgctccgcgctctgcccgatgacagcgtgcttatagaaagcgatcttcacatagtaggtgagcacatggaaaaggcactagaagacatgtaccgacatgtttgcgaagttaaaggttgggagctcgaggaaggtgtcaagaagatagccatgaattacgaggagttcatctttggacgacgagagtag

SEQ ID NO: 50339 - protein, 474 aa, Gibberella zeae PH-1
MLSTTSNVRKRACHYTREIIEIPMPLSEQIIYLTENCSVDNKHQPQTSHEQLISLLTHPLIRSIVNMCQYTHNYDEQPVPVVDVGDESPFPWHLPICDAHCHPTDTMDSIQDIPSMRAAALAIMATRAQDQDLVAEVANKHSNDNPKLLFQGNSGQSNTWVVPSFGWHPWFSHLLYDDSADAPTYRPTSGSETDNAAKQAHYNAVLQPEPSSDFVASLPTPIAVSTFLEETESRLSANPYALVGEIGVDKAFRLPEPWNPSEQAERDSTLTPGGREGRHLSPHRVRIEHQRAILAAQLRLAGKTRRAVSVHGVQAHGVLHDTLVDTWKGHEREVITRRKRRLVAKGAEDFSDEEDDDDSEKPYPPRICLHSFSASVEVLKQYLSPTIPARIFVSLSVAVNLSTDASCTKTDEVLRALPDDSVLIESDLHIVGEHMEKALEDMYRHVCEVKGWELEEGVKKIAMNYEEFIFGRRE

SEQ ID NO: 50340 - DNA, 1095 bp, Ustilago maydis 521
  CDS (1)..(1095)
atgtgtacaggagagtcgcacaccgagacatgcaaggcggtgacgcccaaacaaccatcgccgaatcttgcgggcttgtttgtggactcacattgccaccctacggacgatccggtagcgtacactgcgttgaatttagacgatcttagcgatcgcattagcaattcaaccgttggacgactagtatgcatgtcaacaaatgcgagagaccagaacatggtcgcagagctagcctcacggcatccggacaaagtgacgccctgctttgggtggcatccctggtttgcccatcagatctcgctctccgacccggcgccaagcaaagagaaacactaccacgaactttttggcattcttgacacttggtcagtcgagcatcatccggccaaagaagagctcgactcgatatgggatcagttgtcggagccaatatcgcttagcagcgtctgccaaggaattcgcggacaatttgaccggtttcccaacgcactgttgggcgaagtcggaatagaccgagcgttcagaatacctcggcgagcatggaactatgatccacaaagagcagagctcaaaacagccgtcccgaagttgaccaggctcaagacaccacaggcgcatcagttgtcggtcttgcgagcacagatcgacgttgccctggcctaccgacgcaacatctcgcttcactctgttcaagcagcaggtctcacagtagaccttctggcatctctgcgaaatgaaaacatatccgccttcggcgccgtgcgggtttcactccattcttgtacgctcgacaacaatgtggtgcgatccgtcacgaagaagcatgccaacgtctacgttggcttttcttcgaccatcaaccgcaagcagatcgaagcacgcgaatgcttggcgagcgtcgatcgtagtcgtgccttgatggaaagcgactatcacacggtgagtgcgattccaggctacctgctcgaggccgtcgattactttgctcaactgcatgatctgagcacggaagcggctgcacagcagctgcgcgctaattgggacaccttctattcaggcagcccactggcggaagagtcggacgactcagactaa

SEQ ID NO: 50341 - protein, 364 aa, Ustilago maydis 521
MCTGESHTETCKAVTPKQPSPNLAGLFVDSHCHPTDDPVAYTALNLDDLSDRISNSTVGRLVCMSTNARDQNMVAELASRHPDKVTPCFGWHPWFAHQISLSDPAPSKEKHYHELFGILDTWSVEHHPAKEELDSIWDQLSEPISLSSVCQGIRGQFDRFPNALLGEVGIDRAFRIPRRAWNYDPQRAELKTAVPKLTRLKTPQAHQLSVLRAQIDVALAYRRNISLHSVQAAGLTVDLLASLRNENISAFGAVRVSLHSCTLDNNVVRSVTKKHANVYVGFSSTINRKQIEARECLASVDRSRALMESDYHTVSAIPGYLLEAVDYFAQLHDLSTEAAAQQLRANWDTFYSGSPLAEESDDSD

SEQ ID NO: 50342 - DNA, 897 bp, Candida glabrata CBS138
  CDS (1)..(897)
atgctagtggatgcgcactgtcatctcgacggcagcgcagacagccgcggatgtgcggagtatgcgaggaacgtgcgggtgtgcctgatgagtacgaacccgcaggacgctgagatgttgtcggtagggattggtcttggcaatgcggtgtgcgcgtttggcgtgcacccgtggttctcgcactggttctacgtaggcgatgcgcctgggaagctggagcattacagtcgggtgatgcaggcggatgctgcggatgagggctttctgtcgctggtggatgagttaccggaccccattgacctggaccagtacatacgggaccactttcccaagggccggtggcaagtcatcggtgaagtgggactcgataagctgttccgtgtgaagcgtagggacggcacactgtcgcgctggcatgtgtccatggaccaccagcgggtggtgttggacaggttccttgatctggcagtgcggaccggactaagtgtgtcgctgcatggcgtcaaggctcatggctctctgctggacaggtgcgagaagaagctgctgaacacaccttgtaacatctgcttgcactcgtatacgggtcctgcagatactttgacggccctgtggatacgcaagtttggtcacgagcgcatatttgtgtccttatcacagtacattaatctagacgacaagcatagagcggtcactgagaacatactagacatatgtcccaagacttgcatattaccagagacagacttcgagatcaataagcatgacgcacaacggttggagatgtcgctgcgcacagtttacaacttcataggccagaggtggggcatagataactacgaagaattgatgcaaaccaactttgagtcattttatgggcactcaattgctcagtaa

SEQ ID NO: 50343 - protein, 298 aa, Candida glabrata CBS138
MLVDAHCHLDGSADSRGCAEYARNVRVCLMSTNPQDAEMLSVGIGLGNAVCAFGVHPWFSHWFYVGDAPGKLEHYSRVMQADAADEGFLSLVDELPDPIDLDQYIRDHFPKGRWQVIGEVGLDKLFRVKRRDGTLSRWHVSMDHQRVVLDRFLDLAVRTGLSVSLHGVKAHGSLLDRCEKKLLNTPCNICLHSYTGPADTLTALWIRKFGHERIFVSLSQYINLDDKHRAVTENILDICPKTCILPETDFEINKHDAQRLEMSLRTVYNFIGQRWGIDNYEELMQTNFESFYGHSIAQ

SEQ ID NO: 50344 - DNA, 975 bp, Kluyveromyces lactis NRRL Y-1140
  CDS (1)..(975)
atggttccatgtcttgtcgatgcacattgccatgtgtctactatggtggatgctgtaggatgcgataagatcagaagcaatttggacctggcccttgccggaacggcaagtgatgtccaacggtgtgtcatgagcacgaatgtgtacgactgggaattactggagcccctgctgctaatgaaacaactggatgatgaaggtcccggaatcaatgttagtcttggtgtgcatccctggtattgccatttatatcagttagataggtcgctttctaaggtagggcattataggaattgtcttaaatgtaaagacgaggtacagttgatggaattggtagagcaattgccggatccagtagatttgtcaagttacttgtcagatgagcgggtttctcgtgtgggttgtattggcgagatcggattggacaaggtttttcggttgcctcagaatggctttctcgtgagcaataatgggacatcgttggaaagaagtagtttaagcaatgtaagggtagagtttgcacatcagatccaggtatttgaaacgttattaaaagttgcaaagggaagggggttgccggtttcgatccattctgtgaaatgtcaaggtactacttttgatatttgcaagagaatattattggatagcgaggtgaacatatgtttgcactcgtttactgggacattggatacggtgcggctatggctggcgaatttcccacatgaacggcttttctttagcgtttcgtgttggatcaacttgaaagactgggattctggtgctgagctgttgaagagtttgcccttgcagtgtattttgacagagacagattgttctgtggattcagtgtcgtcgcaagagcaacgacagatgctagattccgttcttgacgccatttcaagagctcacggcatttccaggactaaggcgatggacacggtattacaaaacttcaatagattcttacgtaaatga

SEQ ID NO: 50345 - protein, 324 aa, Kluyveromyces lactis NRRL Y-1140
MVPCLVDAHCHVSTMVDAVGCDKIRSNLDLALAGTASDVQRCVMSTNVYDWELLEPLLLMKQLDDEGPGINVSLGVHPWYCHLYQLDRSLSKVGHYRNCLKCKDEVQLMELVEQLPDPVDLSSYLSDERVSRVGCIGEIGLDKVFRLPQNGFLVSNNGTSLERSSLSNVRVEFAHQIQVFETLLKVAKGRGLPVSIHSVKCQGTTFDICKRILLDSEVNICLHSFTGTLDTVRLWLANFPHERLFFSVSCWINLKDWDSGAELLKSLPLQCILTETDCSVDSVSSQEQRQMLDSVLDAISRAHGISRTKAMDTVLQNFNRFLRK

SEQ ID NO: 50346 - DNA, 1041 bp, Debaryomyces hansenii CBS767
  CDS (1)..(1041)
atgaatggatatgtacagtttttagcagacagtcactgtcatttagatgtggaatgttcatctcaaagagcagaagaattagggaattttttgaacactctggagtcaataattgaccgcagagagttctttcatattatgtcctcaaatcatgtagacatatttcatatagacttaatattagacaaattagaaaacaaaactgttctcccatatttcggtattcatccatggtacagccacttatttactgatctcaagttggaggaatttgagaacgaacaagaatggaagcaaattcattacgaatcagtacttgatcctacaccaccgtccgagttgttagaggtactaccaaatcccataagcttcgactcgcatgttaatgaaatacgcaggcttgccaacaagcatcaaaaaaagggattttctgttggcattggagaaattgggttagataaactatttagaattccactgaacggatattttggcaatcagaaactccccctcaacgataatccaaataagctatcggcctgtagagtcaaaatggatcaccaagcatacatatttgcaaggcaattgaaattggccagtagtttgaaaagacctatttctttacattgtgtcaaggcacatggtttactatacgaccaagtaactagtaaaaaagaacttgacggcatttcttcagttatacttcattcatattccggatctctcgatcaggcaggtttgtggatacgacacttttcgaagtcgaatcgactattatatttttcgctctcaaattggattaatggatccgccaagaaacaagattcgttaaaagatctcgttaaactacttggcaacgatcagatactactagaaactgatgttggtatagacaaatatctactagatcctgagagaagagaagaatatttcaatcagctaaaagaaatttttatcaagatatgctcaattaaaggctggggtgaagatcttgcgaaggagatcatatttgacaattggaataaatctatcgcccaatga

SEQ ID NO: 50347 - protein, 346 aa, Debaryomyces hansenii CBS767
MNGYVQFLADSHCHLDVECSSQRAEELGNFLNTLESIIDRREFFHIMSSNHVDIFHIDLILDKLENKTVLPYFGIHPWYSHLFTDLKLEEFENEQEWKQIHYESVLDPTPPSELLEVLPNPISFDSHVNEIRRLANKHQKKGFSVGIGEIGLDKLFRIPLNGYFGNQKLPLNDNPNKLSACRVKMDHQAYIFARQLKLASSLKRPISLHCVKAHGLLYDQVTSKKELDGISSVILHSYSGSLDQAGLWIRHFSKSNRLLYFSLSNWINGSAKKQDSLKDLVKLLGNDQILLETDVGIDKYLLDPERREEYFNQLKEIFIKICSIKGWGEDLAKEIIFDNWNKSIAQ

SEQ ID NO: 50348 - DNA, 936 bp, Oryza sativa (japonica cultivar-group)
  CDS (1)..(936)
atggcccaggcaccagcgcgcgccgcttccgtcgtgcggctcttcgacgcgcactgccacctgcaggacccgcgtgtgctgtccgtcgccccttccctcatacgcgccgccaccgccgccggcgtcgcgcgcttcgccgtcaacggcacttccgagaaagactggcacctggtgaagcagatggccgaggagtacccgtccgtcgtcccctgcttcggcctccacccatggtgggtaccggagagatcgccggattggatggattcgctccggcggttcttcgctgaaacaccagaggcggctgttggggagattggtctggacaaaggttcacatggaaaaaccattgactttggagaacaggttgaagttttccagcagcaacttgaacttgctaaggagttgaacaagcctgtttctgttcattgtgtgcgcgcctttggtgatcttctggagatactaaagagaactggacctttcccagctggtgtgttgctgcattcgtatctaggatctgcagaaatggtgtccagccttgaaattttaggctgttacttttcgttgtccggcttccttacaggcatgaaatccacgaaggcaaagaaaatgctaaaatcaatgcccttagacagaattctgctagagaccgacgcaccggatgcattaccgaaattggatgatatttctctattagcagtacctgtggatagctcaagtgcagataatggagaaagtaaaaaagattctaattcacgggcatctaccacttcaaatgagtctttgaaccatccatctaatatccacattgttatgaagtatgtcgcctcactgcttgaaatatcagaaatagaacttgctgaagtgacatacaagaatgcgaccaagctgttctcttatcatggatccaaagttcacaatgaagtggaagctgtgtga

SEQ ID NO: 50349 - protein, 311 aa, Oryza sativa (japonica cultivar-group)
MAQAPARAASVVRLFDAHCHLQDPRVLSVAPSLIRAATAAGVARFAVNGTSEKDWHLVKQMAEEYPSVVPCFGLHPWWVPERSPDWMDSLRRFFAETPEAAVGEIGLDKGSHGKTIDFGEQVEVFQQQLELAKELNKPVSVHCVRAFGDLLEILKRTGPFPAGVLLHSYLGSAEMVSSLEILGCYFSLSGFLTGMKSTKAKKMLKSMPLDRILLETDAPDALPKLDDISLLAVPVDSSSADNGESKKDSNSRASTTSNESLNHPSNIHIVMKYVASLLEISEIELAEVTYKNATKLFSYHGSKVHNEVEAV

SEQ ID NO: 50350 - DNA, 954 bp, Yarrowia lipolytica CLIB99
  CDS (1)..(954)
atgtttgatgcccattgtcacccaacagacactcctgataccctcgatctgatcccgagcatgaaaacggaccttctggcctgcatgtcgaccaactttcaagatatagaaagagtggagtcgattgctgattggcctaaggtggtaccttgtttcggataccatccttggttcacatggaaggtgtacacggaagaaggattggaagcaaaggaacattatagtcgtgttttggcaggtcccagaggctctgaggaggaactgcagggattcgtggccagccaagagcaaccaatgccgttctccaattatcttgatctcatgagacaaggtcttgagaagtatcctaatggcatgattggggaggcgggtttggacaagccgtttcgggttaaggataaagagggggataagctgacgccatttagagtgtctcttgaccaccagcggacgattttggggctccagttgcaactagctgttgactatgggagacccatatctttgcatggagttcagtgtcatggagcgttacttgagtgtgtaaccgagattctaaagaagaaccctggaaaacccctgactgtttgtttgcattcttactctggtcctcccgactttctggtaggctggttcaagttggaaggctccaagaagaagcctaccaaggtacgtgtcttcgtgtctgtgagcagtgttataacctgcggacacatcgatcgtgaaggagaccgcttcgatcaaaagttggagaagatttctcctttgttggcgaagattccggacgaccggctgcttattgagtcggattactacaaagcaggacctgttatggatgatcttatgcaggaggtgctggatctagttgctcatgcaaagggtgtatctaaagcgggggctctcgagatgttggacaagaactctcgagagtttttggactacagacgcgagtag

SEQ ID NO: 50351 - protein, 317 aa, Yarrowia lipolytica CLIB99
MFDAHCHPTDTPDTLDLIPSMKTDLLACMSTNFQDIERVESIADWPKVVPCFGYHPWFTWKVYTEEGLEAKEHYSRVLAGPRGSEEELQGFVASQEQPMPFSNYLDLMRQGLEKYPNGMIGEAGLDKPFRVKDKEGDKLTPFRVSLDHQRTILGLQLQLAVDYGRPISLHGVQCHGALLECVTEILKKNPGKPLTVCLHSYSGPPDFLVGWFKLEGSKKKPTKVRVFVSVSSVITCGHIDREGDRFDQKLEKISPLLAKIPDDRLLIESDYYKAGPVMDDLMQEVLDLVAHAKGVSKAGALEMLDKNSREFLDYRRE

SEQ ID NO: 50352 - DNA, 1380 bp, Cryptococcus neoformans var. neoformans JEC21
  CDS (1)..(1380)
atgtgccacgacaagccccccacgcagaaacaagcacgggacgcacaggccgccgacgcgcccctcgcctgggagacgatcccgctgcctcccgcccatgtcctctcccaccgtacgccccccccccctccccccctctggctaatgagtacgacagtgacagacgcacactgccacccgacagacctcgcccatccccccgcggtatacgacatcctcgccctcggcggactcgcagccatggcgaccgcggcggacgaccaggcgaaagtggaggcgctgggccgggagaggcagtggttcaggggggacccgggccggaacgagggacgcggcagggggaaagggaaagggggggcaggggtgggcgtggtggcgtgcttcggataccatccctggttcacccatcgctataccctctctccgccgtccgccatcccttccaggcgggaccactatacctctctcttcctccaatccgcccctgccaagtccacctccagcgaccgcccagacgaaaacacgctcgaaaccctgttggaaaccctcctgcccttcctccccgacccaacccctctccagcccttgctccacaccctccgccaaaacctcgtcaagttcttggacgaagggagactgacaatgctgggagaggtggggctggatgcgagtgcgaggctgaggtggccggtcgaggcgagaggtatctgggaggagatgtatgggaaggggaggaaggaactggagcccgcgccaggggaaggagaagaatggaaacgcctgacaccgttcaaagtccccatcgcacatcaacgtgccgtccttgaagctcaaatggaaatcgcaatcgagctgggtgtcaacatttcattccattctgtcgcttgtgctggcccgacgatggatgttttaaacagtatgaaaaccaaacacggcccccactttatccggcgcgtaaacgttgatcttcattccgccgggggatggagtcctcagttctggacacaggctcaaaaatcccttcccaacctatacgcatccccctccatccccatcacttcccgctccccctccgccccatctctcatccgcgccatcgcccgcgatagaatgctggtagagtcggacacccatgatgcgaggttgagtacaaggtacgtttgggcagcgacagagtgggtgggcaggttgaaagggtggaaggtggagggtttggatcgcaatcgggattgtccaagggtggaggaagactgggaactagaaagcgaagaagaagcatacgaccatcgtggaaaacctatcgaccctgcaccagaagaaacatggaccgttcggacattggagaggaactgggcacggtttatgcgtcttttagattga

SEQ ID NO: 50353 - protein, 459 aa, Cryptococcus neoformans var. neoformans JEC21
MCHDKPPTQKQARDAQAADAPLAWETIPLPPAHVLSHRTPPPPPPLWLMSTTVTDAHCHPTDLAHPPAVYDILALGGLAAMATAADDQAKVEALGRERQWFRGDPGRNEGRGRGKGKGGAGVGVVACFGYHPWFTHRYTLSPPSAIPSRRDHYTSLFLQSAPAKSTSSDRPDENTLETLLETLLPFLPDPTPLQPLLHTLRQNLVKFLDEGRLTMLGEVGLDASARLRWPVEARGIWEEMYGKGRKELEPAPGEGEEWKRLTPFKVPIAHQRAVLEAQMEIAIELGVNISFHSVACAGPTMDVLNSMKTKHGPHFIRRVNVDLHSAGGWSPQFWTQAQKSLPNLYASPSIPITSRSPSAPSLIRAIARDRMLVESDTHDARLSTRYVWAATEWVGRLKGWKVEGLDRNRDCPRVEEDWELESEEEAYDHRGKPIDPAPEETWTVRTLERNWARFMRLLD

SEQ ID NO: 50354 - DNA, 969 bp, Dictyostelium discoideum
  CDS (1)..(969)
atgtgtgaaaaagaaattaataataataataataataatgaattaactgaaaaatctaaagaggaaattgaaaaagatgaaattgaatacttggaatatttaaaatataggaaagaaattattgatagtcattgtcatattcatgaagatgttgaacatttacaagagtcatgtgatttaccatttaaaaagatattactcatgggtacaacagttgaagattgggataaaattaaccaattagccgataagatcaatgatgataataaaatcattagatgttttggtatacatccttggtttgtttataattatttaccaccaactgaattaattggtaaaataaaagaaggtgatggcagtaatgattcaataataataagtattgacgaaacgtggagaattaaaatgaaagaattgttactaaaatatccaaattcaatagtgggtgaaattggtattgacaaggtgacaaaagttagattaaatggatttaataagaatgaccaggagagccaaatgagggtgtttagagaccagattgagatagccaatgaattggacagattggttagtttacattgtgtacaactccaaggtcaactattaacattcttccaatcacttgatattgataaattcccacctgcaattgcactacatacttttggtggtaaacctgctacagtcgatcaattttgtaaaatggcatctggaaaaggtgataaattctatttcggtctatcatttataaatttaacattttcaaaagttgataaactcattcaagcaattcctgatgacagattattactagaaagtgatcaaaattcaccaacccaagttgatcaatcattatttaaattaattcaaaaaatttcaatttcaaaaaattggacaattcaaaaaacaattgaacaaacaactttaaatactttaaattttctttcaaagcaaattaaaaaataa

SEQ ID NO: 50355 - protein, 322 aa, Dictyostelium discoideum
MCEKEINNNNNNNELTEKSKEEIEKDEIEYLEYLKYRKEIIDSHCHIHEDVEHLQESCDLPFKKILLMGTTVEDWDKINQLADKINDDNKIIRCFGIHPWFVYNYLPPTELIGKIKEGDGSNDSIIISIDETWRIKMKELLLKYPNSIVGEIGIDKVTKVRLNGFNKNDQESQMRVFRDQIEIANELDRLVSLHCVQLQGQLLTFFQSLDIDKFPPAIALHTFGGKPATVDQFCKMASGKGDKFYFGLSFINLTFSKVDKLIQAIPDDRLLLESDQNSPTQVDQSLFKLIQKISISKNWTIQKTIEQTTLNTLNFLSKQIKK

SEQ ID NO: 50356 - DNA, 1215 bp, Aspergillus nidulans FGSC A4
  CDS (1)..(1215)
atgaaccagtctgaatctcaatatgagcccgactttccttggggaattggtgtcttcgacgctcattgccaccctactgacaccatggcgagcatcgccgatataccccgcatgaaagcaacgacacttacaatcatgtccacacgagctgacgaccaagacctggtctttcaagtcgcaactcagcttgccaaagaatcaggcgatgggaatgaggacgcacggcgcgttcttccctgttttggctggcacccgtggttttcgcacctgatcatggacgacataacaccgtccaaagatgatcaaaaggaaattgacgagaacaccaaaaagtcacactatagccgaattctaaaaccatccccagatgaggctttcacatcttctcttccaacccccatacccctctcgcagctcctatcagaaacgcggtcaagactacaggccttccctgctgccctcgtcggcgaaattggtttggatcgagcctttcgactaccccagccctggacgcaagaggagcacgacgcccgagatggcgcgatgacgcctgggtcgcgcgagggccgccggctttctccctaccaggtcaggccggagcaccagaaagctgttctggaagctcagttgcgtctggccggagcattgcagcggccggtgtctgtgcatagtgtgcaggcacatggggccgtgattgaggtcttcaagggcctttggaaagggcatgagcggaaggtcgcttcacggcgcgagcggaaacgccgacatagtcatgccgaggcgcatgcgggaagcgatgatgaagatgcgcgaggcgcgcagacctcacatagtgcaggcacaagggaacgcgaagccctccccttcccgccacggatatgcatgcactcctattcgggtcctgcagaaaccctaaagcaattcctgcacccgtcgaacccatcagacgtctatttctctttttcaagcgttatcaatttctcccatcactctgacaagtctgttgcggtgatcaaggctttacccgacgacagggtgttaattgaaagtgatctgcatattgccgggcaacagatggacgatcggctcgaggaggtcactcggcagatttgtgaaatccgcgggtgggatctgcggcaaggggtgcagcagctggcggataattggagacgctttgtgtatggtgacgcgctgccagattcatcaaatagctga

SEQ ID NO: 50357 - protein, 404 aa, Aspergillus nidulans FGSC A4
MNQSESQYEPDFPWGIGVFDAHCHPTDTMASIADIPRMKATTLTIMSTRADDQDLVFQVATQLAKESGDGNEDARRVLPCFGWHPWFSHLIMDDITPSKDDQKEIDENTKKSHYSRILKPSPDEAFTSSLPTPIPLSQLLSETRSRLQAFPAALVGEIGLDRAFRLPQPWTQEEHDARDGAMTPGSREGRRLSPYQVRPEHQKAVLEAQLRLAGALQRPVSVHSVQAHGAVIEVFKGLWKGHERKVASRRERKRRHSHAEAHAGSDDEDARGAQTSHSAGTREREALPFPPRICMHSYSGPAETLKQFLHPSNPSDVYFSFSSVINFSHHSDKSVAVIKALPDDRVLIESDLHIAGQQMDDRLEEVTRQICEIRGWDLRQGVQQLADNWRRFVYGDALPDSSNS

SEQ ID NO: 50358 - DNA, 972 bp, Candida albicans SC5314
  CDS (1)..(972): transl_table=12
atgaatgacacatttctaaacctaagcgatagccattgccattttaacccggaatgtactgctagtgacacagagaaatttgcagaaagactcaacgagcaatcaaaacagatcccagacaactactttcatctaatgactactcaacatttggatcttgaatttatggatacattactaaccaggttagagaatccaagagtattagttccatattttggtgtacacccttggttttctcatttgttttatattgaaggtacccccaccaaggaggaacattacaagaatgttttgaaaccagaaccttccaatgaattattggctacattacctgatcccattagtctacacaaacacaaagatagatttctagagatcattaacaaacataaccttgaaatatatggaattggcgaaattgggttggataaactattcagagttcctaataacggctactgtggtaatttgaatttcccactgtcgacagaaaataaattatctgcttgtagagttgatattaatcatcaattggatgtttttaaatttcaactaacattagctgaacaattaaagaaacaagtgtctttgcattgtgttaaagctcatggcttattgtttgatcaagtgaaaaagttttccaatattacagtcatccttcattcgtataccggatcaattgaacaagcacaggtgtggataaaatcgttaccccagaacagactctacttttcattttcaaattggatcaacggagaaaaaatagaggctctaaaagcacttgtaacggcacttcgaccaacgcaaatattgattgaatcagatattgacgttgacagaagtttcattgagcagaggcaaacaaaacactttgaccaccttgatggcatttacaaaaagattcatgagcacatttttatagattcattacaaattcacaacaacatgctaaattctataggcatatag

SEQ ID NO: 50359 - protein, 323 aa, Candida albicans SC5314
MNDTFLNLSDSHCHFNPECTASDTEKFAERLNEQSKQIPDNYFHLMTTQHLDLEFMDTLLTRLENPRVLVPYFGVHPWFSHLFYIEGTPTKEEHYKNVLKPEPSNELLATLPDPISLHKHKDRFLEIINKHNLEIYGIGEIGLDKLFRVPNNGYCGNLNFPSSTENKLSACRVDINHQLDVFKFQLTLAEQLKKQVSLHCVKAHGLLFDQVKKFSNITVILHSYTGSIEQAQVWIKSLPQNRLYFSFSNWINGEKIEALKALVTALRPTQILIESDIDVDRSFIEQRQTKHFDHLDGIYKKIHEHIFIDSLQIHNNMLNSIGI

SEQ ID NO: 50360 - DNA, 1386 bp, Aspergillus fumigatus Af293
  CDS (1)..(1386)
atgctgatacagctaatacacgagtggtcaatgttggtcactgaagccccaggcataacagtaattactgttatggtatcggtatttccagtatcttttcggtactattacatcacagcattcagttgtcaccctcaagggccgaaaacgatctctatcatactaccacgagatcaacacatatgggacgggaggaacatgcctgaatatgatcatgacaaggtccccgattttccttgggaacttggtgtctacgatgcccattgccaccccacggacgccatgtcgtcaatatctgatattccagggatgaaagcagcgacgctcacagtcatggccacaagagcggaagatcaggacctcgtatttcagatagctaaagaccttaacaatgcaaaattgactgttcaggacgccgagacggatcgcgtactgccatccttcggatggcatccatggttttcacaccaaatcatcgacgatcagaagtcatcatcagatataacccagggcgcctcagatctggagagcaagaagacacattatcataaagtcttaacaccagctccagaagatgaagacttcgtttcttctctacctgatcccaagcctctctcgcaattcatctccgaaacacgcgaacggctactatcttttcccaatgctctggttggcgaggtcggccttgatcgtgctttcagacttccaaaggcctggacccagcaggaggctgagaatcgtaatgcgcatataacacccggatctcgtgaaggccggaaactctcaccttacagggtgcatatggaacaccaaaaggctattctgaaggcccagcttcgcctcgccggagaacttcgacgaccagtctcagtacacagtgtccaagcacatggagcggtgttcgatgttttcaaggagctatggtccggccatgagcgcagagtaccatcgcgacgggagagacgaagacgtcttagcgttgaaggggctcacgcagagagcgacgcggaagacgagcaagtgcaaaagtcactaaagcgcgaaggttcacctctcccatacccaccccggatctgtatgcattcgtattcaggtcctgtggagcaattgaagcaatttctgaacccttcaaatccctcagacgtgtacttctccttttccaatgtcatcaatttcagcgggccatcgtctcagaaagtcattgcagttgtcaaagctttgccggaggacagagtgcttattgagagtgaccttcacactgctggacagcagatggacgacttgctcgaggaagttgctcggcagatatgtgagctccgtggctggtctttgcaggagggggtccaacgattggcagacaactggaaacggtttgtgtttgggtag

SEQ ID NO: 50361 - protein, 461 aa, Aspergillus fumigatus Af293
MLIQLIHEWSMLVTEAPGITVITVMVSVFPVSFRYYYITAFSCHPQGPKTISIILPRDQHIWDGRNMPEYDHDKVPDFPWELGVYDAHCHPTDAMSSISDIPGMKAATLTVMATRAEDQDLVFQIAKDLNNAKLTVQDAETDRVLPSFGWHPWFSHQIIDDQKSSSDITQGASDLESKKTHYHKVLTPAPEDEDFVSSLPDPKPLSQFISETRERLLSFPNALVGEVGLDRAFRLPKAWTQQEAENRNAHITPGSREGRKLSPYRVHMEHQKAILKAQLRLAGELRRPVSVHSVQAHGAVFDVFKELWSGHERRVPSRRERRRRLSVEGAHAESDAEDEQVQKSLKREGSPLPYPPRICMHSYSGPVEQLKQFLNPSNPSDVYFSFSNVINFSGPSSQKVIAVVKALPEDRVLIESDLHTAGQQMDDLLEEVARQICELRGWSLQEGVQRLADNWKRFVFG

SEQ ID NO: 50362 - DNA, 1380 bp, Cryptococcus neoformans var
  CDS (1)..(1380)
atgtgccacgacaagccccccacgcagaaacaagcacgggacgcacaggccgccgacgcgcccctcgcctgggagacgatcccgctgcctcccgcccatgtcctctcccaccgtacgccccccccccctccccccctctggctaatgagtacgacagtgacagacgcacactgccacccgacagacctcgcccatccccccgcggtatacgacatcctcgccctcggcggactcgcagccatggcgaccgcggcggacgaccaggcgaaagtggaggcgctgggccgggagaggcagtggttcaggggggacccgggccggaacgagggacgcggcagggggaaagggaaagggggggcaggggtgggcgtggtggcgtgcttcggataccatccctggttcacccatcgctataccctctctccgccgtccgccatcccttccaggcgggaccactatacctctctcttcctccaatccgcccctgccaagtccacctccagcgaccgcccagacgaaaacacgctcgaaaccctgttggaaaccctcctgcccttcctccccgacccaacccctctccagcccttgctccacaccctccgccaaaacctcgtcaagttcttggacgaagggagactgacaatgctgggagaggtggggctggatgcgagtgcgaggctgaggtggccggtcgaggcgagaggtatctgggaggagatgtatgggaaggggaggaaggaactggagcccgcgccaggggaaggagaagaatggaaacgcctgacaccgttcaaagtccccatcgcacatcaacgtgccgtccttgaagctcaaatggaaatcgcaatcgagctgggtgtcaacatttcattccattctgtcgcttgtgctggcccgacgatggatgttttaaacagtatgaaaaccaaacacggcccccactttatccggcgcgtaaacgttgatcttcattccgccgggggatggagtcctcagttctggacacaggctcaaaaatcccttcccaacctatacgcatccccctccatccccatcacttcccgctccccctccgccccatctctcatccgcgccatcgcccgcgatagaatgctggtagagtcggacagccatgatgcgaggttgagtacaaggtacgtttgggcagcgacagagtgggtgggcaggttgaaagggtggaaggtggagggtttggatcgcaatcaagattgtccaagggtggaggaagactgggaactagaaagcgaagaagaagcatacgaccatcgtggaaaacctatcgaccctgcaccagaagaaacatggaccgttcggacattggagaggaactgggcacggtttatgcgtcttttagattga

SEQ ID NO: 50363 - protein, 459 aa, Cryptococcus neoformans var
MCHDKPPTQKQARDAQAADAPLAWETIPLPPAHVLSHRTPPPPPPLWLMSTTVTDAHCHPTDLAHPPAVYDILALGGLAAMATAADDQAKVEALGRERQWFRGDPGRNEGRGRGKGKGGAGVGVVACFGYHPWFTHRYTLSPPSAIPSRRDHYTSLFLQSAPAKSTSSDRPDENTLETLLETLLPFLPDPTPLQPLLHTLRQNLVKFLDEGRLTMLGEVGLDASARLRWPVEARGIWEEMYGKGRKELEPAPGEGEEWKRLTPFKVPIAHQRAVLEAQMEIAIELGVNISFHSVACAGPTMDVLNSMKTKHGPHFIRRVNVDLHSAGGWSPQFWTQAQKSLPNLYASPSIPITSRSPSAPSLIRAIARDRMLVESDSHDARLSTRYVWAATEWVGRLKGWKVEGLDRNQDCPRVEEDWELESEEEAYDHRGKPIDPAPEETWTVRTLERNWARFMRLLD

SEQ ID NO: 50364 - DNA, 957 bp, Arabidopsis thaliana
  CDS (1)..(957)
atgaaactgttcgacgcgcactgtcaccttcaagacccgaggattatcaccaaagctcctcagataatctcctccgccgttgcttccggcgtctctgctttcgccgtcaatggagtctccgagaaagattggagtttggtcaaagagatgggagctaaatacccttctgttgttccttgctttgggatccatccatggtatgtagcagagaggagtcctcaatggtttgagacattaaagagtttctttgagaccactcctactgctgctgttggagaaattggtttggacaaagggtctaagggaagggagattgatttctcagaacaggttaccgtctttcgtcaacagcttgaacttgcaaaggaattgaagaaacctgcgtcagttcattgtgttcgtgcatttggggatctactcgagatattaaaatctgtagggccttttccttctggggtcatgcttcactcgtatttgggttctgctgagatggttcctgaatttgctaagctcggtgcatatttctccttctccggtttccttatgtccatgagtgagaaaaaagccaagaagatgttgaaagcagttccatctgataggatcttattggagacggattcaccagatgcactaccaaaggcagagtcaggttgtctctactttgtagacggagatccttctctacccgaagaaggaaattcagctcaggatcttgattctgcttcatatgataagcctaatgtgtctagtgactcgatgaagttaacaaaggaaacacttaatcacccggctaatattcatatcttgttggatatgaagaatgaagaactcgcggaactaagttatcaaaatgctgttcggttattctcttacgaaggttcaaagatacttcttgacagaggtactggtgatgtctctggtcacactcaaaaccagtcaacaacacatgtatcatga

SEQ ID NO: 50365 - protein, 318 aa, Arabidopsis thaliana
MKLFDAHCHLQDPRIITKAPQIISSAVASGVSAFAVNGVSEKDWSLVKEMGAKYPSVVPCFGIHPWYVAERSPQWFETLKSFFETTPTAAVGEIGLDKGSKGREIDFSEQVTVFRQQLELAKELKKPASVHCVRAFGDLLEILKSVGPFPSGVMLHSYLGSAEMVPEFAKLGAYFSFSGFLMSMSEKKAKKMLKAVPSDRILLETDSPDALPKAESGCLYFVDGDPSLPEEGNSAQDLDSASYDKPNVSSDSMKLTKETLNHPANIHILLDMKNEELAELSYQNAVRLFSYEGSKILLDRGTGDVSGHTQNQSTTHVS

SEQ ID NO: 50366 - DNA, 1008 bp, Schizosaccharomyces pombe
  CDS (1)..(1008)
atggaatctatcattgacgctcattgccatccaactgatgcaccgcaagaattacatttggttgctaatctttctgttggtaaattaatagtaatgggaacccggccgacagatcaaaagtatgtcgaacaacttgcgaaagaataccctggtaaagtaatacctagttttgggatacatccatggttttcttattatttgtacgatgatttggataaagatttgcaaagtagtgaaacgagaaaaaagaagcattacgaaaaaatattgactccaatacctgatgaagattttatcaatgctcttcccaacccagtcccgatttcagaatttttggaggacgctcgtcgacatcttaaacagtacccaaacgctctcattggcgaaatcggcttggataagccatttcgattgccagttggcccatatgatgcaaggtcctcacttcctcaaggacctctatcaccattttacgtaaaaatggaacatcaatgtaaagtgtttgaagcacaagtgcgtcttgctgcagaattccaacgtgctgttagtgttcactgcgttcagacgtatgctcttttgtatagcagtttagctaaattttgggatggtcgctggattccttccaaaacgaaaatacgaaagatgaagaaagaagagtacgaaaattctcttgctgaagaacgaaagcattaccctcccaaaatttgccttcatagctactctggtagcattgagcaaatttctcagttttcagcccataaagttccgaccgagttttactactctttttcaataggtataaatagtcgttataaaaattttattcaaacacttaaaggcgttcccgacgataagctattggcagagagtgatcatcacagtgctagccaaatcgatgaattagttcgacaatctttgaacgttatgtcagaagctaagtcctggacttttgaggatactattacaaaaatttcaagtaactctaaagcatttttgaaagtaacttga

SEQ ID NO: 50367 - protein, 335 aa, Schizosaccharomyces pombe
MESIIDAHCHPTDAPQELHLVANLSVGKLIVMGTRPTDQKYVEQLAKEYPGKVIPSFGIHPWFSYYLYDDLDKDLQSSETRKKKHYEKILTPIPDEDFINALPNPVPISEFLEDARRHLKQYPNALIGEIGLDKPFRLPVGPYDARSSLPQGPLSPFYVKMEHQCKVFEAQVRLAAEFQRAVSVHCVQTYALLYSSLAKFWDGRWIPSKTKIRKMKKEEYENSLAEERKHYPPKICLHSYSGSIEQISQFSAHKVPTEFYYSFSIGINSRYKNFIQTLKGVPDDKLLAESDHHSASQIDELVRQSLNVMSEAKSWTFEDTITKISSNSKAFLKVT

SEQ ID NO: 50368 - DNA, 25 bp, Artificial sequence
  Primer sequence
atgaataaacttgttgatgcccact

SEQ ID NO: 50369 - DNA, 27 bp, Artificial sequence
  Primer sequence
tcacttgataaatttctgaaagttttc

SEQ ID NO: 50370 - protein, 495 aa, Artificial sequence
  Consensus
  Variant (2)..(2): Xaa in position 2 is any amino acid
  Variant (6)..(32): Xaa in position 6 to 32 is any amino acid
  Variant (33)..(43): Xaa in position 33 to 43 is any or no amino acid
  Variant (45)..(57): Xaa in position 45 to 57 is any amino acid
  Variant (58)..(84): Xaa in position 58 to 84 is any or no amino acid
  Variant (87)..(87): Xaa in position 87 is any amino acid
  Variant (91)..(96): Xaa in position 91 to 96 is any amino acid
  Variant (97)..(146): Xaa in position 97 to 146 is any or no amino acid
  Variant (148)..(164): Xaa in position 148 to 164 is any amino acid
  Variant (165)..(173): Xaa in position 165 to 173 is any or no amino acid
  Variant (176)..(176): Xaa in position 176 is any amino acid
  Variant (180)..(189): Xaa in position 180 to 189 is any amino acid
  Variant (190)..(227): Xaa in position 190 to 227 is any or no amino acid
  Variant (229)..(238): Xaa in position 229 to 238 is any amino acid
  Variant (240)..(246): Xaa in position 240 to 246 is any amino acid
  Variant (248)..(248): Xaa in position 248 is any amino acid
  Variant (250)..(250): Xaa in position 250 is any amino acid
  Variant (252)..(254): Xaa in position 252 to 254 is any amino acid
  Variant (256)..(270): Xaa in position 256 to 270 is any amino acid
  Variant (271)..(337): Xaa in position 271 to 337 is any or no amino acid
  Variant (341)..(342): Xaa in position 341 to 342 is any amino acid
  Variant (344)..(358): Xaa in position 344 to 358 is any amino acid
  Variant (359)..(368): Xaa in position 359 to 368 is any or no amino acid
  Variant (370)..(370): Xaa in position 370 is any amino acid
  Variant (372)..(393): Xaa in position 372 to 393 is any amino acid
  Variant (394)..(405): Xaa in position 394 to 405 is any or no amino acid
  Variant (407)..(407): Xaa in position 407 is any amino acid
  Variant (409)..(409): Xaa in position 409 is any amino acid
  Variant (411)..(445): Xaa in position 411 to 445 is any amino acid
  Variant (446)..(494): Xaa in position 446 to 494 is any or no amino acid
DXHCHXXXXXXXXXXXXXXXXXXXXXXXXXXXXXXXXXXXXXXDXXXXXXXXXXXXXXXXXXXXXXXXXXXXXXXXXXXXXXXXFGXHPWXXXXXXXXXXXXXXXXXXXXXXXXXXXXXXXXXXXXXXXXXXXXXXXXXXXXXXXXPXXXXXXXXXXXXXXXXXXXXXXXXXXGEXGLDXXXXXXXXXXXXXXXXXXXXXXXXXXXXXXXXXXXXXXXXXXXXXXXXQXXXXXXXXXXAXXXXXXXSXHXVXXXGXXXXXXXXXXXXXXXXXXXXXXXXXXXXXXXXXXXXXXXXXXXXXXXXXXXXXXXXXXXXXXXXXXXXXXXXXXXXXXXXXXLHSXXGXXXXXXXXXXXXXXXXXXXXXXXXXSXSXXXXXXXXXXXXXXXXXXXXXXXXXXXXXXXXXXLXEXDXXXXXXXXXXXXXXXXXXXXXXXXXXXXXXXXXXXXXXXXXXXXXXXXXXXXXXXXXXXXXXXXXXXXXXXXXXXXXXXXXXXXN

SEQ ID NO: 50371 - protein, 5 aa, Artificial sequence
  Consensus
  Variant (2)..(2): Xaa in position 2 is Ala or Ser
DXHCH

SEQ ID NO: 50372 - protein, 11 aa, Artificial sequence
  Consensus
  Variant (2)..(3): Xaa in position 2 to 3 is any amino acid
  Variant (4)..(4): Xaa in position 4 is any or no amino acid
  Variant (7)..(7): Xaa in position 7 is any amino acid
  Variant (11)..(11): Xaa in position 11 is Phe, Trp or Tyr
VXXXFGXHPWX

SEQ ID NO: 50373 - protein, 12 aa, Artificial sequence
  Consensus
  Variant (3)..(3): Xaa in position 3 is Ile or Val
  Variant (5)..(5): Xaa in position 5 is Ile or Leu
  Variant (7)..(9): Xaa in position 7 to 9 is any amino acid
  Variant (10)..(11): Xaa in position 10 to 11 is any or no amino acid
GEXGXDXXXXXR

SEQ ID NO: 50374 - protein, 37 aa, Artificial sequence
  Consensus
  Variant (2)..(3): Xaa in position 2 to 3 is any amino acid
  Variant (4)..(4): Xaa in position 4 is Ile or Val
  Variant (5)..(5): Xaa in position 5 is Phe or Leu
  Variant (6)..(10): Xaa in position 6 to 10 is any amino acid
  Variant (11)..(11): Xaa in position 11 is Ile or Leu
  Variant (13)..(18): Xaa in position 13 to 18 is any amino acid
  Variant (19)..(19): Xaa in position 19 is Ala, Ile, Leu or Val
  Variant (21)..(21): Xaa in position 21 is Phe, Ile, Leu or Val
  Variant (23)..(23): Xaa in position 23 is Cys, Asp, Gly or Ser
  Variant (25)..(27): Xaa in position 25 to 27 is any amino acid
  Variant (29)..(29): Xaa in position 29 is any amino acid
  Variant (30)..(36): Xaa in position 30 to 36 is any or no amino acid
QXXXXXXXXXXAXXXXXXXSXHXVXXXGXXXXXXXXL

SEQ ID NO: 50375 - protein, 10 aa, Artificial sequence
  Consensus
  Variant (2)..(2): Xaa in position 2 is any amino acid
  Variant (3)..(3): Xaa in position 3 is Asp, Glu, Gly, Asn, Gln or Thr
  Variant (4)..(4): Xaa in position 4 is any amino acid
  Variant (5)..(5): Xaa in position 5 is Ile, Leu or Val
  Variant (7)..(7): Xaa in position 7 is any amino acid
  Variant (9)..(9): Xaa in position 9 is Ser or Thr
PXXXXLXEXD

SEQ ID NO: 50376 - DNA, 1992 bp, Saccharomyces cerevisiae; identical to SEQ ID NO: 46090
  CDS (1)..(1992)

SEQ ID NO: 50377 - protein, 663 aa, Saccharomyces cerevisiae; identical to SEQ ID NO: 46091

SEQ ID NO: 50378 - DNA, 28 bp, Artificial sequence
  Primer sequence
atgaagttactttttaaaagatattcgt

SEQ ID NO: 50379 - DNA, 27 bp, Artificial sequence
  Primer sequence
ttatttttgttgcatttgcttagatct

SEQ ID NO: 50380 - DNA, 1203 bp, Escherichia coli; identical to SEQ ID NO: 13945
  CDS (1)..(1203)

SEQ ID NO: 50381 - protein, 400 aa, Escherichia coli; identical to SEQ ID NO: 13946

SEQ ID NO: 50382 - DNA, 1281 bp, Aquifex aeolicus VF5; identical to SEQ ID NO: 13947
  CDS (1)..(1281): transl_table=11

SEQ ID NO: 50383 - protein, 426 aa, Aquifex aeolicus VF5; identical to SEQ ID NO: 13948

SEQ ID NO: 50384 - DNA, 1260 bp, Neisseria meningitidis Z2491; identical to SEQ ID NO: 13949
  CDS (1)..(1260): transl_table=11

SEQ ID NO: 50385 - protein, 419 aa, Neisseria meningitidis Z2491; identical to SEQ ID NO: 13950

SEQ ID NO: 50386 - DNA, 1425 bp, Deinococcus radiodurans R1; identical to SEQ ID NO: 13951
  CDS (1)..(1425): transl_table=11

SEQ ID NO: 50387 - protein, 474 aa, Deinococcus radiodurans R1; identical to SEQ ID NO: 13952

SEQ ID NO: 50388 - DNA, 1392 bp, Mycobacterium tuberculosis CDC1551; identical to SEQ ID NO: 13953
  CDS (1)..(1392): transl_table=11

SEQ ID NO: 50389 - protein, 463 aa, Mycobacterium tuberculosis CDC1551; identical to SEQ ID NO: 13954

SEQ ID NO: 50390 - DNA, 1203 bp, Salmonella typhimurium LT2; identical to SEQ ID NO: 13955
  CDS (1)..(1203): transl_table=11

SEQ ID NO: 50391 - protein, 400 aa, Salmonella typhimurium LT2; identical to SEQ ID NO: 13956

SEQ ID NO: 50392 - DNA, 1320 bp, Agrobacterium tumefaciens str. C58; identical to SEQ ID NO: 13957
  CDS (1)..(1320): transl_table=11

SEQ ID NO: 50393 - protein, 439 aa, Agrobacterium tumefaciens str. C58; identical to SEQ ID NO: 13958

SEQ ID NO: 50394 - DNA, 1251 bp, Yersinia pestis KIM; identical to SEQ ID NO: 13959
  CDS (1)..(1251): transl_table=11

SEQ ID NO: 50395 - protein, 416 aa, Yersinia pestis KIM; identical to SEQ ID NO: 13960

SEQ ID NO: 50396 - DNA, 1314 bp, Thermosynechococcus elongatus BP-1; identical to SEQ ID NO: 13961
  CDS (1)..(1314): transl_table=11

SEQ ID NO: 50397 - protein, 437 aa, Thermosynechococcus elongatus BP-1; identical to SEQ ID NO: 13962

SEQ ID NO: 50398 - DNA, 1464 bp, Oceanobacillus iheyensis HTE831; identical to SEQ ID NO: 13963
  CDS (1)..(1464): transl_table=11

SEQ ID NO: 50399 - protein, 487 aa, Oceanobacillus iheyensis HTE831; identical to SEQ ID NO: 13964

SEQ ID NO: 50400 - DNA, 1209 bp, Pseudomonas putida KT2440; identical to SEQ ID NO: 13965
  CDS (1)..(1209): transl_table=11

SEQ ID NO: 50401 - protein, 402 aa, Pseudomonas putida KT2440; identical to SEQ ID NO: 13966

SEQ ID NO: 50402 - DNA, 1305 bp, Bradyrhizobium japonicum USDA 110; identical to SEQ ID NO: 13967
  CDS (1)..(1305)

SEQ ID NO: 50403 - protein, 434 aa, Bradyrhizobium japonicum USDA 110; identical to SEQ ID NO: 13968

SEQ ID NO: 50404 - DNA, 1434 bp, Lactobacillus plantarum WCFS1; identical to SEQ ID NO: 13969
  CDS (1)..(1434): transl_table=11

SEQ ID NO: 50405 - protein, 477 aa, Lactobacillus plantarum WCFS1; identical to SEQ ID NO: 13970

SEQ ID NO: 50406 - DNA, 1203 bp, Salmonella enterica subsp. enterica serovar Typhi Ty2; identical to SEQ ID NO: 13971
  CDS (1)..(1203): transl_table=11

SEQ ID NO: 50407 - protein, 400 aa, Salmonella enterica subsp. enterica serovar Typhi Ty2; identical to SEQ ID NO: 13972

SEQ ID NO: 50408 - DNA, 1170 bp, Bacteroides thetaiotaomicron VPI-5482; identical to SEQ ID NO: 13973
  CDS (1)..(1170): transl_table=11

SEQ ID NO: 50409 - protein, 389 aa, Bacteroides thetaiotaomicron VPI-5482; identical to SEQ ID NO: 13974

SEQ ID NO: 50410 - DNA, 1407 bp, Coxiella burnetii RSA 493; identical to SEQ ID NO: 13975
  CDS (1)..(1407): transl_table=11

SEQ ID NO: 50411 - protein, 468 aa, Coxiella burnetii RSA 493; identical to SEQ ID NO: 13976

SEQ ID NO: 50412 - DNA, 1185 bp, Porphyromonas gingivalis W83; identical to SEQ ID NO: 13977
  CDS (1)..(1185): transl_table=11

SEQ ID NO: 50413 - protein, 394 aa, Porphyromonas gingivalis W83; identical to SEQ ID NO: 13978

SEQ ID NO: 50414 - DNA, 1608 bp, Oryza sativa (japonica cultivar-group); identical to SEQ ID NO: 13979
  CDS (1)..(1608)

SEQ ID NO: 50415 - protein, 535 aa, Oryza sativa (japonica cultivar-group); identical to SEQ ID NO: 13980

SEQ ID NO: 50416 - DNA, 1446 bp, Geobacter sulfurreducens PCA; identical to SEQ ID NO: 13981
  CDS (1)..(1446): transl_table=11

SEQ ID NO: 50417 - protein, 481 aa, Geobacter sulfurreducens PCA; identical to SEQ ID NO: 13982

SEQ ID NO: 50418 - DNA, 1437 bp, Treponema denticola ATCC 35405; identical to SEQ ID NO: 13983
  CDS (1)..(1437): transl_table=11

SEQ ID NO: 50419 - protein, 478 aa, Treponema denticola ATCC 35405; identical to SEQ ID NO: 13984

SEQ ID NO: 50420 - DNA, 1293 bp, Eremothecium gossypii; identical to SEQ ID NO: 13985
  CDS (1)..(1293)

SEQ ID NO: 50421 - protein, 430 aa, Eremothecium gossypii; identical to SEQ ID NO: 13986

SEQ ID NO: 50422 - DNA, 1434 bp, Neurospora crassa; identical to SEQ ID NO: 13987
  CDS (1)..(1434)

SEQ ID NO: 50423 - protein, 477 aa, Neurospora crassa; identical to SEQ ID NO: 13988

SEQ ID NO: 50424 - DNA, 5916 bp, Magnaporthe grisea 70-15; identical to SEQ ID NO: 13989
  CDS (1)..(5916)

SEQ ID NO: 50425 - protein, 1971 aa, Magnaporthe grisea 70-15; identical to SEQ ID NO: 13990

SEQ ID NO: 50426 - DNA, 1380 bp, Gibberella zeae PH-1; identical to SEQ ID NO: 13991
  CDS (1)..(1380)

SEQ ID NO: 50427 - protein, 459 aa, Gibberella zeae PH-1; identical to SEQ ID NO: 13992

SEQ ID NO: 50428 - DNA, 1839 bp, Ustilago maydis 521; identical to SEQ ID NO: 13993
  CDS (1)..(1839)

SEQ ID NO: 50429 - protein, 612 aa, Ustilago maydis 521; identical to SEQ ID NO: 13994

SEQ ID NO: 50430 - DNA, 1464 bp, Aspergillus nidulans FGSC A4; identical to SEQ ID NO: 13995
  CDS (1)..(1464)

SEQ ID NO: 50431 - protein, 487 aa, Aspergillus nidulans FGSC A4; identical to SEQ ID NO: 13996

SEQ ID NO: 50432 - DNA, 1296 bp, Candida glabrata CBS138; identical to SEQ ID NO: 13997
  CDS (1)..(1296)

SEQ ID NO: 50433 - protein, 431 aa, Candida glabrata CBS138; identical to SEQ ID NO: 13998

SEQ ID NO: 50434 - DNA, 1284 bp, Kluyveromyces lactis NRRL Y-1140; identical to SEQ ID NO: 13999
  CDS (1)..(1284)

SEQ ID NO: 50435 - protein, 427 aa, Kluyveromyces lactis NRRL Y-1140; identical to SEQ ID NO: 14000

SEQ ID NO: 50436 - DNA, 1269 bp, Debaryomyces hansenii CBS767; identical to SEQ ID NO: 14001
  CDS (1)..(1269)

SEQ ID NO: 50437 - protein, 422 aa, Debaryomyces hansenii CBS767; identical to SEQ ID NO: 14002

SEQ ID NO: 50438 - DNA, 1245 bp, Yarrowia lipolytica CLIB99; identical to SEQ ID NO: 14003
  CDS (1)..(1245)

SEQ ID NO: 50439 - protein, 414 aa, Yarrowia lipolytica CLIB99; identical to SEQ ID NO: 14004

SEQ ID NO: 50440 - DNA, 1362 bp, Cryptococcus neoformans var. neoformans JEC21; identical to SEQ ID NO: 14005
  CDS (1)..(1362)

SEQ ID NO: 50441 - protein, 453 aa, Cryptococcus neoformans var. neoformans JEC21; identical to SEQ ID NO: 14006

SEQ ID NO: 50442 - DNA, 1173 bp, Entamoeba histolytica HM-1:IMSS; identical to SEQ ID NO: 14007
  CDS (1)..(1173)

SEQ ID NO: 50443 - protein, 390 aa, Entamoeba histolytica HM-1:IMSS; identical to SEQ ID NO: 14008

SEQ ID NO: 50444 - DNA, 1266 bp, Candida albicans SC5314; identical to SEQ ID NO: 14009
  CDS (1)..(1266): transl_table=12

SEQ ID NO: 50445 - protein, 421 aa, Candida albicans SC5314; identical to SEQ ID NO: 14010

SEQ ID NO: 50446 - DNA, 1305 bp, Bartonella quintana str. Toulouse; identical to SEQ ID NO: 14011
  CDS (1)..(1305): transl_table=11

SEQ ID NO: 50447 - protein, 434 aa, Bartonella quintana str. Toulouse; identical to SEQ ID NO: 14012

SEQ ID NO: 50448 - DNA, 1305 bp, Bartonella henselae str. Houston-1; identical to SEQ ID NO: 14013
  CDS (1)..(1305): transl_table=11

SEQ ID NO: 50449 - protein, 434 aa, Bartonella henselae str. Houston-1; identical to SEQ ID NO: 14014

SEQ ID NO: 50450 - DNA, 1470 bp, Bacillus licheniformis ATCC 14580; identical to SEQ ID NO: 14015
  CDS (1)..(1470): transl_table=11

SEQ ID NO: 50451 - protein, 489 aa, Bacillus licheniformis ATCC 14580; identical to SEQ ID NO: 14016

SEQ ID NO: 50452 - DNA, 1167 bp, Bacteroides fragilis YCH46; identical to SEQ ID NO: 14017
  CDS (1)..(1167): transl_table=11

SEQ ID NO: 50453 - protein, 388 aa, Bacteroides fragilis YCH46; identical to SEQ ID NO: 14018

SEQ ID NO: 50454 - DNA, 1350 bp, Methylococcus capsulatus str. Bath; identical to SEQ ID NO: 14019
  CDS (1)..(1350): transl_table=11

SEQ ID NO: 50455 - protein, 449 aa, Methylococcus capsulatus str. Bath; identical to SEQ ID NO: 14020

SEQ ID NO: 50456 - DNA, 1317 bp, Nocardia farcinica IFM 10152; identical to SEQ ID NO: 14021
  CDS (1)..(1317): transl_table=11

SEQ ID NO: 50457 - protein, 438 aa, Nocardia farcinica IFM 10152; identical to SEQ ID NO: 14022

SEQ ID NO: 50458 - DNA, 1404 bp, Legionella pneumophila str. Paris; identical to SEQ ID NO: 14023
  CDS (1)..(1404): transl_table=11

SEQ ID NO: 50459 - protein, 467 aa, Legionella pneumophila str. Paris; identical to SEQ ID NO: 14024

SEQ ID NO: 50460 - DNA, 1404 bp, Legionella pneumophila str. Lens; identical to SEQ ID NO: 14025
  CDS (1)..(1404): transl_table=11

SEQ ID NO: 50461 - protein, 467 aa, Legionella pneumophila str. Lens; identical to SEQ ID NO: 14026

SEQ ID NO: 50462 - DNA, 1473 bp, Geobacillus kaustophilus HTA426; identical to SEQ ID NO: 14027
  CDS (1)..(1473): transl_table=11

SEQ ID NO: 50463 - protein, 490 aa, Geobacillus kaustophilus HTA426; identical to SEQ ID NO: 14028

SEQ ID NO: 50464 - DNA, 1347 bp, Idiomarina loihiensis L2TR; identical to SEQ ID NO: 14029
  CDS (1)..(1347): transl_table=11

SEQ ID NO: 50465 - protein, 448 aa, Idiomarina loihiensis L2TR; identical to SEQ ID NO: 14030

SEQ ID NO: 50466 - DNA, 1344 bp, Silicibacter pomeroyi DSS-3; identical to SEQ ID NO: 14031
  CDS (1)..(1344): transl_table=11

SEQ ID NO: 50467 - protein, 447 aa, Silicibacter pomeroyi DSS-3; identical to SEQ ID NO: 14032

SEQ ID NO: 50468 - DNA, 1260 bp, Neisseria gonorrhoeae FA 1090; identical to SEQ ID NO: 14033
  CDS (1)..(1260): transl_table=11

SEQ ID NO: 50469 - protein, 419 aa, Neisseria gonorrhoeae FA 1090; identical to SEQ ID NO: 14034

SEQ ID NO: 50470 - DNA, 1167 bp, Bacteroides fragilis NCTC 9343; identical to SEQ ID NO: 14035
  CDS (1)..(1167): transl_table=11

SEQ ID NO: 50471 - protein, 388 aa, Bacteroides fragilis NCTC 9343; identical to SEQ ID NO: 14036

SEQ ID NO: 50472 - DNA, 1251 bp, Salmonella enterica subsp. enterica serovar Choleraesuis str; identical to SEQ ID NO: 14037
  CDS (1)..(1251): transl_table=11

SEQ ID NO: 50473 - protein, 416 aa, Salmonella enterica subsp. enterica serovar Choleraesuis str; identical to SEQ ID NO: 14038

SEQ ID NO: 50474 - DNA, 1224 bp, Pseudomonas syringae pv. syringae B728a; identical to SEQ ID NO: 14039
  CDS (1)..(1224)

SEQ ID NO: 50475 - protein, 407 aa, Pseudomonas syringae pv. syringae B728a; identical to SEQ ID NO: 14040

SEQ ID NO: 50476 - DNA, 1326 bp, Corynebacterium jeikeium K411; identical to SEQ ID NO: 14041
  CDS (1)..(1326): transl_table=11

SEQ ID NO: 50477 - protein, 441 aa, Corynebacterium jeikeium K411; identical to SEQ ID NO: 14042

SEQ ID NO: 50478 - DNA, 1293 bp, Rhodobacter sphaeroides 2.4.1; identical to SEQ ID NO: 14043
  CDS (1)..(1293)

SEQ ID NO: 50479 - protein, 430 aa, Rhodobacter sphaeroides 2.4.1; identical to SEQ ID NO: 14044

SEQ ID NO: 50480 - DNA, 1134 bp, Xylella fastidiosa Ann-1; identical to SEQ ID NO: 14045
  CDS (1)..(1134)

SEQ ID NO: 50481 - protein, 377 aa, Xylella fastidiosa Ann-1; identical to SEQ ID NO: 14046

SEQ ID NO: 50482 - DNA, 1464 bp, Leuconostoc mesenteroides subsp. mesenteroides ATCC 8293; identical to SEQ ID NO: 14047
  CDS (1)..(1464)

SEQ ID NO: 50483 - protein, 487 aa, Leuconostoc mesenteroides subsp. mesenteroides ATCC 8293; identical to SEQ ID NO: 14048

SEQ ID NO: 50484 - DNA, 1242 bp, Psychrobacter sp. 273-4; identical to SEQ ID NO: 14049
  CDS (1)..(1242)

SEQ ID NO: 50485 - protein, 413 aa, Psychrobacter sp. 273-4; identical to SEQ ID NO: 14050

SEQ ID NO: 50486 - DNA, 1179 bp, Ralstonia eutropha JMP134; identical to SEQ ID NO: 14051
  CDS (1)..(1179)

SEQ ID NO: 50487 - protein, 392 aa, Ralstonia eutropha JMP134; identical to SEQ ID NO: 14052

SEQ ID NO: 50488 - DNA, 1200 bp, Burkholderia cepacia R18194; identical to SEQ ID NO: 14053
  CDS (1)..(1200)

SEQ ID NO: 50489 - protein, 399 aa, Burkholderia cepacia R18194; identical to SEQ ID NO: 14054

SEQ ID NO: 50490 - DNA, 1224 bp, Pseudomonas fluorescens PfO-1; identical to SEQ ID NO: 14055
  CDS (1)..(1224)

SEQ ID NO: 50491 - protein, 407 aa, Pseudomonas fluorescens PfO-1; identical to SEQ ID NO: 14056

SEQ ID NO: 50492 - DNA, 1197 bp, Burkholderia fungorum LB400; identical to SEQ ID NO: 14057
  CDS (1)..(1197)

SEQ ID NO: 50493 - protein, 398 aa, Burkholderia fungorum LB400; identical to SEQ ID NO: 14058

SEQ ID NO: 50494 - DNA, 1428 bp, Oenococcus oeni PSU-1; identical to SEQ ID NO: 14059
  CDS (1)..(1428)

SEQ ID NO: 50495 - protein, 475 aa, Oenococcus oeni PSU-1; identical to SEQ ID NO: 14060

SEQ ID NO: 50496 - DNA, 1380 bp, Trichodesmium erythraeum IMS101; identical to SEQ ID NO: 14061
  CDS (1)..(1380)

SEQ ID NO: 50497 - protein, 459 aa, Trichodesmium erythraeum IMS101; identical to SEQ ID NO: 14062

SEQ ID NO: 50498 - DNA, 1434 bp, Campylobacter upsaliensis RM3195; identical to SEQ ID NO: 14063
  CDS (1)..(1434): transl_table=11

SEQ ID NO: 50499 - protein, 477 aa, Campylobacter upsaliensis RM3195; identical to SEQ ID NO: 14064

SEQ ID NO: 50500 - DNA, 1488 bp, Lactococcus lactis subsp. cremoris SK11; identical to SEQ ID NO: 14065
  CDS (1)..(1488)

SEQ ID NO: 50501 - protein, 495 aa, Lactococcus lactis subsp. cremoris SK11; identical to SEQ ID NO: 14066

SEQ ID NO: 50502 - DNA, 1461 bp, Deinococcus geothermalis DSM 11300; identical to SEQ ID NO: 14067
  CDS (1)..(1461): transl_table=11

SEQ ID NO: 50503 - protein, 486 aa, Deinococcus geothermalis DSM 11300; identical to SEQ ID NO: 14068

SEQ ID NO: 50504 - DNA, 1359 bp, Azotobacter vinelandii AvOP; identical to SEQ ID NO: 14069
  CDS (1)..(1359): transl_table=11

SEQ ID NO: 50505 - protein, 452 aa, Azotobacter vinelandii AvOP; identical to SEQ ID NO: 14070

SEQ ID NO: 50506 - DNA, 1356 bp, Burkholderia vietnamiensis G4; identical to SEQ ID NO: 14071
  CDS (1)..(1356): transl_table=11

SEQ ID NO: 50507 - protein, 451 aa, Burkholderia vietnamiensis G4; identical to SEQ ID NO: 14072

SEQ ID NO: 50508 - DNA, 1200 bp, Burkholderia mallei 10229; identical to SEQ ID NO: 14073
  CDS (1)..(1200)

SEQ ID NO: 50509 - protein, 399 aa, Burkholderia mallei 10229; identical to SEQ ID NO: 14074

SEQ ID NO: 50510 - DNA, 1200 bp, Burkholderia cenocepacia AU 1054; identical to SEQ ID NO: 14075
  CDS (1)..(1200): transl_table=11

SEQ ID NO: 50511 - protein, 399 aa, Burkholderia cenocepacia AU 1054; identical to SEQ ID NO: 14076

SEQ ID NO: 50512 - DNA, 1356 bp, Burkholderia pseudomallei 1655; identical to SEQ ID NO: 14077
  CDS (1)..(1356)

SEQ ID NO: 50513 - protein, 451 aa, Burkholderia pseudomallei 1655; identical to SEQ ID NO: 14078

SEQ ID NO: 50514 - DNA, 1173 bp, Chromohalobacter salexigens DSM 3043; identical to SEQ ID NO: 14079
  CDS (1)..(1173): transl_table=11

SEQ ID NO: 50515 - protein, 390 aa, Chromohalobacter salexigens DSM 3043; identical to SEQ ID NO: 14080

SEQ ID NO: 50516 - DNA, 1356 bp, Burkholderia pseudomallei 668; identical to SEQ ID NO: 14081
  CDS (1)..(1356)

SEQ ID NO: 50517 - protein, 451 aa, Burkholderia pseudomallei 668; identical to SEQ ID NO: 14082

SEQ ID NO: 50518 - DNA, 1269 bp, Polaromonas sp. JS666; identical to SEQ ID NO: 14083
  CDS (1)..(1269): transl_table=11

SEQ ID NO: 50519 - protein, 422 aa, Polaromonas sp. JS666; identical to SEQ ID NO: 14084

SEQ ID NO: 50520 - DNA, 1341 bp, Crocosphaera watsonii WH 8501; identical to SEQ ID NO: 14085
  CDS (1)..(1341): transl_table=11

SEQ ID NO: 50521 - protein, 446 aa, Crocosphaera watsonii WH 8501; identical to SEQ ID NO: 14086

SEQ ID NO: 50522 - DNA, 1431 bp, Geobacter metallireducens GS-15; identical to SEQ ID NO: 14087
  CDS (1)..(1431): transl_table=11

SEQ ID NO: 50523 - protein, 476 aa, Geobacter metallireducens GS-15; identical to SEQ ID NO: 14088

SEQ ID NO: 50524 - DNA, 1206 bp, Methanosarcina barkeri str. fusaro; identical to SEQ ID NO: 14089
  CDS (1)..(1206): transl_table=11

SEQ ID NO: 50525 - protein, 401 aa, Methanosarcina barkeri str. fusaro; identical to SEQ ID NO: 14090

SEQ ID NO: 50526 - DNA, 1206 bp, Desulfuromonas acetoxidans DSM 684; identical to SEQ ID NO: 14091
  CDS (1)..(1206): transl_table=11

SEQ ID NO: 50527 - protein, 401 aa, Desulfuromonas acetoxidans DSM 684; identical to SEQ ID NO: 14092

SEQ ID NO: 50528 - DNA, 1293 bp, Jannaschia sp. CCS1; identical to SEQ ID NO: 14093
  CDS (1)..(1293): transl_table=11

SEQ ID NO: 50529 - protein, 430 aa, Jannaschia sp. CCS1; identical to SEQ ID NO: 14094

SEQ ID NO: 50530 - DNA, 1458 bp, Desulfitobacterium hafniense DCB-2; identical to SEQ ID NO: 14095
  CDS (1)..(1458): transl_table=11

SEQ ID NO: 50531 - protein, 485 aa, Desulfitobacterium hafniense DCB-2; identical to SEQ ID NO: 14096

SEQ ID NO: 50532 - DNA, 1218 bp, Methanococcoides burtonii DSM 6242; identical to SEQ ID NO: 14097
  CDS (1)..(1218): transl_table=11

SEQ ID NO: 50533 - protein, 405 aa, Methanococcoides burtonii DSM 6242; identical to SEQ ID NO: 14098

SEQ ID NO: 50534 - DNA, 1575 bp, Frankia sp. EAN1pec; identical to SEQ ID NO: 14099
  CDS (1)..(1575): transl_table=11

SEQ ID NO: 50535 - protein, 524 aa, Frankia sp. EAN1pec; identical to SEQ ID NO: 14100

SEQ ID NO: 50536 - DNA, 1200 bp, Ralstonia metallidurans CH34; identical to SEQ ID NO: 14101
  CDS (1)..(1200): transl_table=11

SEQ ID NO: 50537 - protein, 399 aa, Ralstonia metallidurans CH34; identical to SEQ ID NO: 14102

SEQ ID NO: 50538 - DNA, 1341 bp, Magnetococcus sp. MC-1; identical to SEQ ID NO: 14103
  CDS (1)..(1341): transl_table=11

SEQ ID NO: 50539 - protein, 446 aa, Magnetococcus sp. MC-1; identical to SEQ ID NO: 14104

SEQ ID NO: 50540 - DNA, 1305 bp, Mesorhizobium sp. BNC1; identical to SEQ ID NO: 14105
  CDS (1)..(1305): transl_table=11

SEQ ID NO: 50541 - protein, 434 aa, Mesorhizobium sp. BNC1; identical to SEQ ID NO: 14106

SEQ ID NO: 50542 - DNA, 1290 bp, Silicibacter sp. TM1040; identical to SEQ ID NO: 14107
  CDS (1)..(1290): transl_table=11

SEQ ID NO: 50543 - protein, 429 aa, Silicibacter sp. TM1040; identical to SEQ ID NO: 14108

SEQ ID NO: 50544 - DNA, 1305 bp, Nitrobacter hamburgensis X14; identical to SEQ ID NO: 14109
  CDS (1)..(1305): transl_table=11

SEQ ID NO: 50545 - protein, 434 aa, Nitrobacter hamburgensis X14; identical to SEQ ID NO: 14110

SEQ ID NO: 50546 - DNA, 1308 bp, Paracoccus denitrificans PD1222; identical to SEQ ID NO: 14111
  CDS (1)..(1308): transl_table=11

SEQ ID NO: 50547 - protein, 435 aa, Paracoccus denitrificans PD1222; identical to SEQ ID NO: 14112

SEQ ID NO: 50548 - DNA, 1230 bp, Pseudomonas fluorescens; identical to SEQ ID NO: 14113
  CDS (1)..(1230): transl_table=11

SEQ ID NO: 50549 - protein, 409 aa, Pseudomonas fluorescens; identical to SEQ ID NO: 14114

SEQ ID NO: 50550 - DNA, 1215 bp, Pseudomonas fluorescens; identical to SEQ ID NO: 14115
  CDS (1)..(1215): transl_table=11

SEQ ID NO: 50551 - protein, 404 aa, Pseudomonas fluorescens; identical to SEQ ID NO: 14116

SEQ ID NO: 50552 - DNA, 1443 bp, Staphylococcus haemolyticus; identical to SEQ ID NO: 14117
  CDS (1)..(1443): transl_table=11

SEQ ID NO: 50553 - protein, 480 aa, Staphylococcus haemolyticus; identical to SEQ ID NO: 14118

SEQ ID NO: 50554 - DNA, 1245 bp, Leishmania major; identical to SEQ ID NO: 14119
  CDS (1)..(1245)

SEQ ID NO: 50555 - protein, 414 aa, Leishmania major; identical to SEQ ID NO: 14120

SEQ ID NO: 50556 - DNA, 1380 bp, Gibberella moniliformis; identical to SEQ ID NO: 14121
  CDS (1)..(1380)

SEQ ID NO: 50557 - protein, 459 aa, Gibberella moniliformis; identical to SEQ ID NO: 14122

SEQ ID NO: 50558 - DNA, 1233 bp, Schizosaccharomyces pombe; identical to SEQ ID NO: 14123
  CDS (1)..(1233)

SEQ ID NO: 50559 - protein, 410 aa, Schizosaccharomyces pombe; identical to SEQ ID NO: 14124

SEQ ID NO: 50560 - DNA, 1290 bp, Saccharomyces cerevisiae; identical to SEQ ID NO: 14125
  CDS (1)..(1290)

SEQ ID NO: 50561 - protein, 429 aa, Saccharomyces cerevisiae; identical to SEQ ID NO: 14126

SEQ ID NO: 50562 - DNA, 1200 bp, Pseudomonas aeruginosa; identical to SEQ ID NO: 14127
  CDS (1)..(1200): transl_table=11

SEQ ID NO: 50563 - protein, 399 aa, Pseudomonas aeruginosa; identical to SEQ ID NO: 14128

SEQ ID NO: 50564 - DNA, 1197 bp, Pseudomonas aeruginosa; identical to SEQ ID NO: 14129
  CDS (1)..(1197): transl_table=11

SEQ ID NO: 50565 - protein, 398 aa, Pseudomonas aeruginosa; identical to SEQ ID NO: 14130

SEQ ID NO: 50566 - DNA, 1224 bp, Acinetobacter sp; identical to SEQ ID NO: 14131
  CDS (1)..(1224): transl_table=11

SEQ ID NO: 50567 - protein, 407 aa, Acinetobacter sp; identical to SEQ ID NO: 14132

SEQ ID NO: 50568 - DNA, 1218 bp, Bordetella pertussis; identical to SEQ ID NO: 14133
  CDS (1)..(1218): transl_table=11

SEQ ID NO: 50569 - protein, 405 aa, Bordetella pertussis; identical to SEQ ID NO: 14134

SEQ ID NO: 50570 - DNA, 1305 bp, Brucella melitensis; identical to SEQ ID NO: 14135
  CDS (1)..(1305): transl_table=11

SEQ ID NO: 50571 - protein, 434 aa, Brucella melitensis; identical to SEQ ID NO: 14136

SEQ ID NO: 50572 - DNA, 1305 bp, Brucella suis; identical to SEQ ID NO: 14137
  CDS (1)..(1305)

SEQ ID NO: 50573 - protein, 434 aa, Brucella suis; identical to SEQ ID NO: 14138

SEQ ID NO: 50574 - DNA, 1200 bp, Buchnera aphidicola; identical to SEQ ID NO: 14139
  CDS (1)..(1200): transl_table=11

SEQ ID NO: 50575 - protein, 399 aa, Buchnera aphidicola; identical to SEQ ID NO: 14140

SEQ ID NO: 50576 - DNA, 1197 bp, Buchnera aphidicola; identical to SEQ ID NO: 14141
  CDS (1)..(1197): transl_table=11

SEQ ID NO: 50577 - protein, 398 aa, Buchnera aphidicola; identical to SEQ ID NO: 14142

SEQ ID NO: 50578 - DNA, 1200 bp, Burkholderia mallei; identical to SEQ ID NO: 14143
  CDS (1)..(1200): transl_table=11

SEQ ID NO: 50579 - protein, 399 aa, Burkholderia mallei; identical to SEQ ID NO: 14144

SEQ ID NO: 50580 - DNA, 1209 bp, Chromobacterium violaceum; identical to SEQ ID NO: 14145
  CDS (1)..(1209): transl_table=11

SEQ ID NO: 50581 - protein, 402 aa, Chromobacterium violaceum; identical to SEQ ID NO: 14146

SEQ ID NO: 50582 - DNA, 1206 bp, Erwinia carotovora; identical to SEQ ID NO: 14147
  CDS (1)..(1206): transl_table=11

SEQ ID NO: 50583 - protein, 401 aa, Erwinia carotovora; identical to SEQ ID NO: 14148

SEQ ID NO: 50584 - DNA, 1215 bp, Methanosarcina acetivorans; identical to SEQ ID NO: 14149
  CDS (1)..(1215): transl_table=11

SEQ ID NO: 50585 - protein, 404 aa, Methanosarcina acetivorans; identical to SEQ ID NO: 14150

SEQ ID NO: 50586 - DNA, 1209 bp, Neisseria gonorrhoeae; identical to SEQ ID NO: 14151
  CDS (1)..(1209)

SEQ ID NO: 50587 - protein, 402 aa, Neisseria gonorrhoeae; identical to SEQ ID NO: 14152

SEQ ID NO: 50588 - DNA, 1209 bp, Neisseria meningitidis; identical to SEQ ID NO: 14153
  CDS (1)..(1209)

SEQ ID NO: 50589 - protein, 402 aa, Neisseria meningitidis; identical to SEQ ID NO: 14154

SEQ ID NO: 50590 - DNA, 1209 bp, Neisseria meningitidis; identical to SEQ ID NO: 14155
  CDS (1)..(1209): transl_table=11

SEQ ID NO: 50591 - protein, 402 aa, Neisseria meningitidis; identical to SEQ ID NO: 14156

SEQ ID NO: 50592 - DNA, 1215 bp, Photorhabdus luminescens; identical to SEQ ID NO: 14157
  CDS (1)..(1215): transl_table=11

SEQ ID NO: 50593 - protein, 404 aa, Photorhabdus luminescens; identical to SEQ ID NO: 14158

SEQ ID NO: 50594 - DNA, 1218 bp, Photobacterium profundum; identical to SEQ ID NO: 14159
  CDS (1)..(1218): transl_table=11

SEQ ID NO: 50595 - protein, 405 aa, Photobacterium profundum; identical to SEQ ID NO: 14160

SEQ ID NO: 50596 - DNA, 1170 bp, Ralstonia solanacearum; identical to SEQ ID NO: 14161
  CDS (1)..(1170)

SEQ ID NO: 50597 - protein, 389 aa, Ralstonia solanacearum; identical to SEQ ID NO: 14162

SEQ ID NO: 50598 - DNA, 1305 bp, Rhizobium loti; identical to SEQ ID NO: 14163
  CDS (1)..(1305): transl_table=11

SEQ ID NO: 50599 - protein, 434 aa, Rhizobium loti; identical to SEQ ID NO: 14164

SEQ ID NO: 50600 - DNA, 1305 bp, Rhizobium meliloti; identical to SEQ ID NO: 14165
  CDS (1)..(1305): transl_table=11

SEQ ID NO: 50601 - protein, 434 aa, Rhizobium meliloti; identical to SEQ ID NO: 14166

SEQ ID NO: 50602 - DNA, 1203 bp, Salmonella choleraesuis; identical to SEQ ID NO: 14167
  CDS (1)..(1203)

SEQ ID NO: 50603 - protein, 400 aa, Salmonella choleraesuis; identical to SEQ ID NO: 14168

SEQ ID NO: 50604 - DNA, 1203 bp, Salmonella paratyphi; identical to SEQ ID NO: 14169
  CDS (1)..(1203): transl_table=11

SEQ ID NO: 50605 - protein, 400 aa, Salmonella paratyphi; identical to SEQ ID NO: 14170

SEQ ID NO: 50606 - DNA, 1308 bp, Vibrio cholerae; identical to SEQ ID NO: 14171
  CDS (1)..(1308): transl_table=11

SEQ ID NO: 50607 - protein, 435 aa, Vibrio cholerae; identical to SEQ ID NO: 14172

SEQ ID NO: 50608 - DNA, 1311 bp, Vibrio parahaemolyticus; identical to SEQ ID NO: 14173
  CDS (1)..(1311): transl_table=11

SEQ ID NO: 50609 - protein, 436 aa, Vibrio parahaemolyticus; identical to SEQ ID NO: 14174

SEQ ID NO: 50610 - DNA, 1314 bp, Vibrio vulnificus; identical to SEQ ID NO: 14175
  CDS (1)..(1314): transl_table=11

SEQ ID NO: 50611 - protein, 437 aa, Vibrio vulnificus; identical to SEQ ID NO: 14176

SEQ ID NO: 50612 - DNA, 1314 bp, Vibrio vulnificus; identical to SEQ ID NO: 14177
  CDS (1)..(1314): transl_table=11

SEQ ID NO: 50613 - protein, 437 aa, Vibrio vulnificus; identical to SEQ ID NO: 14178

SEQ ID NO: 50614 - DNA, 1179 bp, Xanthomonas axonopodis; identical to SEQ ID NO: 14179
  CDS (1)..(1179): transl_table=11

SEQ ID NO: 50615 - protein, 392 aa, Xanthomonas axonopodis; identical to SEQ ID NO: 14180

SEQ ID NO: 50616 - DNA, 1197 bp, Xanthomonas campestris; identical to SEQ ID NO: 14181
  CDS (1)..(1197): transl_table=11

SEQ ID NO: 50617 - protein, 398 aa, Xanthomonas campestris; identical to SEQ ID NO: 14182

SEQ ID NO: 50618 - DNA, 1185 bp, Xylella fastidiosa; identical to SEQ ID NO: 14183
  CDS (1)..(1185): transl_table=11

SEQ ID NO: 50619 - protein, 394 aa, Xylella fastidiosa; identical to SEQ ID NO: 14184

SEQ ID NO: 50620 - DNA, 1185 bp, Xylella fastidiosa; identical to SEQ ID NO: 14185
  CDS (1)..(1185): transl_table=11

SEQ ID NO: 50621 - protein, 394 aa, Xylella fastidiosa; identical to SEQ ID NO: 14186

SEQ ID NO: 50622 - DNA, 24 bp, Artificial sequence
  Primer sequence
atgacacaattcgcttctcctgtt

SEQ ID NO: 50623 - DNA, 26 bp, Artificial sequence
  Primer sequence
ttaactggcttttttaatatgcggaa

SEQ ID NO: 50624 - protein, 581 aa, Artificial sequence; identical to SEQ ID NO: 14189
  Consensus
  Variant (3)..(3): Xaa in position 3 is any amino acid
  Variant (20)..(22): Xaa in position 20 to 22 is any amino acid
  Variant (23)..(24): Xaa in position 23 to 24 is any or no amino acid
  Variant (27)..(29): Xaa in position 27 to 29 is any amino acid
  Variant (31)..(31): Xaa in position 31 is any amino acid
  Variant (33)..(33): Xaa in position 33 is any amino acid
  Variant (35)..(36): Xaa in position 35 to 36 is any amino acid
  Variant (38)..(42): Xaa in position 38 to 42 is any amino acid
  Variant (43)..(53): Xaa in position 43 to 53 is any or no amino acid
  Variant (56)..(57): Xaa in position 56 to 57 is any amino acid
  Variant (60)..(60): Xaa in position 60 is any amino acid
  Variant (62)..(63): Xaa in position 62 to 63 is any amino acid
  Variant (68)..(68): Xaa in position 68 is any amino acid
  Variant (72)..(72): Xaa in position 72 is any amino acid
  Variant (75)..(76): Xaa in position 75 to 76 is any amino acid
  Variant (78)..(78): Xaa in position 78 is any amino acid
  Variant (80)..(88): Xaa in position 80 to 88 is any or no amino acid
  Variant (95)..(96): Xaa in position 95 to 96 is any amino acid
  Variant (100)..(103): Xaa in position 100 to 103 is any amino acid
  Variant (105)..(105): Xaa in position 105 is any amino acid
  Variant (107)..(109): Xaa in position 107 to 109 is any amino acid
  Variant (110)..(126): Xaa in position 110 to 126 is any or no amino acid
  Variant (128)..(128): Xaa in position 128 is any or no amino acid
  Variant (130)..(130): Xaa in position 130 is any or no amino acid
  Variant (132)..(132): Xaa in position 132 is any or no amino acid
  Variant (134)..(134): Xaa in position 134 is any or no amino acid
  Variant (136)..(137): Xaa in position 136 to 137 is any amino acid
  Variant (138)..(138): Xaa in position 138 is any or no amino acid
  Variant (153)..(154): Xaa in position 153 to 154 is any amino acid
  Variant (156)..(156): Xaa in position 156 is any amino acid
  Variant (158)..(161): Xaa in position 158 to 161 is any amino acid
  Variant (162)..(162): Xaa in position 162 is any or no amino acid
  Variant (164)..(172): Xaa in position 164 to 172 is any amino acid
  Variant (174)..(176): Xaa in position 174 to 176 is any amino acid
  Variant (178)..(183): Xaa in position 178 to 183 is any amino acid
  Variant (184)..(198): Xaa in position 184 to 198 is any or no amino acid
  Variant (208)..(208): Xaa in position 208 is any amino acid
  Variant (210)..(212): Xaa in position 210 to 212 is any amino acid
  Variant (214)..(215): Xaa in position 214 to 215 is any amino acid
  Variant (218)..(218): Xaa in position 218 is any amino acid
  Variant (221)..(222): Xaa in position 221 to 222 is any amino acid
  Variant (224)..(224): Xaa in position 224 is any amino acid
  Variant (225)..(236): Xaa in position 225 to 236 is any or no amino acid
  Variant (238)..(238): Xaa in position 238 is any or no amino acid
  Variant (244)..(245): Xaa in position 244 to 245 is any amino acid
  Variant (250)..(250): Xaa in position 250 is any amino acid
  Variant (252)..(252): Xaa in position 252 is any amino acid
  Variant (263)..(263): Xaa in position 263 is any amino acid
  Variant (265)..(266): Xaa in position 265 to 266 is any amino acid
  Variant (269)..(270): Xaa in position 269 to 270 is any amino acid
  Variant (271)..(288): Xaa in position 271 to 288 is any or no amino acid
  Variant (290)..(291): Xaa in position 290 to 291 is any amino acid
  Variant (294)..(295): Xaa in position 294 to 295 is any amino acid
  Variant (298)..(299): Xaa in position 298 to 299 is any amino acid
  Variant (302)..(303): Xaa in position 302 to 303 is any amino acid
  Variant (305)..(305): Xaa in position 305 is any amino acid
  Variant (306)..(316): Xaa in position 306 to 316 is any or no amino acid
  Variant (318)..(318): Xaa in position 318 is any amino acid
  Variant (326)..(329): Xaa in position 326 to 329 is any amino acid
  Variant (334)..(334): Xaa in position 334 is any amino acid
  Variant (337)..(337): Xaa in position 337 is any amino acid
  Variant (338)..(391): Xaa in position 338 to 391 is any or no amino acid
  Variant (394)..(394): Xaa in position 394 is any amino acid
  Variant (397)..(397): Xaa in position 397 is any amino acid
  Variant (401)..(401): Xaa in position 401 is any amino acid
  Variant (407)..(408): Xaa in position 407 to 408 is any amino acid
  Variant (416)..(416): Xaa in position 416 is any amino acid
  Variant (418)..(418): Xaa in position 418 is any amino acid
  Variant (419)..(427): Xaa in position 419 to 427 is any or no amino acid
  Variant (430)..(430): Xaa in position 430 is any amino acid
  Variant (433)..(442): Xaa in position 433 to 442 is any or no amino acid
  Variant (453)..(453): Xaa in position 453 is any amino acid
  Variant (455)..(455): Xaa in position 455 is any amino acid
  Variant (457)..(457): Xaa in position 457 is any amino acid
  Variant (459)..(459): Xaa in position 459 is any amino acid
  Variant (461)..(466): Xaa in position 461 to 466 is any amino acid
  Variant (468)..(474): Xaa in position 468 to 474 is any or no amino acid
  Variant (484)..(484): Xaa in position 484 is any amino acid
  Variant (489)..(491): Xaa in position 489 to 491 is any amino acid
  Variant (492)..(531): Xaa in position 492 to 531 is any or no amino acid
  Variant (541)..(542): Xaa in position 541 to 542 is any amino acid
  Variant (545)..(545): Xaa in position 545 is any amino acid
  Variant (553)..(553): Xaa in position 553 is any amino acid
  Variant (557)..(557): Xaa in position 557 is any amino acid
  Variant (559)..(560): Xaa in position 559 to 560 is any amino acid
  Variant (561)..(575): Xaa in position 561 to 575 is any or no amino acid
  Variant (578)..(579): Xaa in position 578 to 579 is any amino acid

SEQ ID NO: 50625 - protein, 10 aa, Artificial sequence
  Consensus
  Variant (2)..(2): Xaa in position 2 is any amino acid
  Variant (3)..(3): Xaa in position 3 is Asn or Thr
  Variant (5)..(5): Xaa in position 5 is any amino acid
  Variant (7)..(7): Xaa in position 7 is any amino acid
  Variant (8)..(8): Xaa in position 8 is Phe, Ile, Leu or Val
  Variant (9)..(9): Xaa in position 9 is any amino acid
LXXDXYXXXM

SEQ ID NO: 50626 - protein, 25 aa, Artificial sequence
  Consensus
  Variant (2)..(4): Xaa in position 2 to 4 is any or no amino acid
  Variant (8)..(10): Xaa in position 8 to 10 is any amino acid
  Variant (11)..(11): Xaa in position 11 is Ala or Gly
  Variant (12)..(14): Xaa in position 12 to 14 is any amino acid
  Variant (15)..(15): Xaa in position 15 is Ala, Asp, Glu, Gly, Asn, Gln or Ser
  Variant (16)..(19): Xaa in position 16 to 19 is any amino acid
  Variant (22)..(22): Xaa in position 22 is any amino acid
  Variant (25)..(25): Xaa in position 25 is Ala, Glu, Gln or Ser
GXXXTSNXXXXXXXXXXXXGTXAHX

SEQ ID NO: 50627 - DNA, 291 bp, Escherichia coli K12; identical to SEQ ID NO: 18608
  CDS (1)..(291): transl_table=11

SEQ ID NO: 50628 - protein, 96 aa, Escherichia coli K12; identical to SEQ ID NO: 18609

SEQ ID NO: 50629 - DNA, 216 bp, Bacteriophage 933W; identical to SEQ ID NO: 18610
  CDS (1)..(216): transl_table=11

SEQ ID NO: 50630 - protein, 71 aa, Bacteriophage 933W; identical to SEQ ID NO: 18611

SEQ ID NO: 50631 - DNA, 291 bp, Bacteriophage VT2-Sa; identical to SEQ ID NO: 18612
  CDS (1)..(291): transl_table=11

SEQ ID NO: 50632 - protein, 96 aa, Bacteriophage VT2-Sa; identical to SEQ ID NO: 18613

SEQ ID NO: 50633 - DNA, 315 bp, Escherichia coli O157:H7 EDL933; identical to SEQ ID NO: 18614
  CDS (1)..(315): transl_table=11

SEQ ID NO: 50634 - protein, 104 aa, Escherichia coli O157:H7 EDL933; identical to SEQ ID NO: 18615

SEQ ID NO: 50635 - DNA, 315 bp, Escherichia coli O157:H7 EDL933; identical to SEQ ID NO: 18616
  CDS (1)..(315): transl_table=11

SEQ ID NO: 50636 - protein, 104 aa, Escherichia coli O157:H7 EDL933; identical to SEQ ID NO: 18617

SEQ ID NO: 50637 - DNA, 273 bp, Escherichia coli O157:H7 EDL933; identical to SEQ ID NO: 18618
  CDS (1)..(273): transl_table=11

SEQ ID NO: 50638 - protein, 90 aa, Escherichia coli O157:H7 EDL933; identical to SEQ ID NO: 18619

SEQ ID NO: 50639 - DNA, 216 bp, Escherichia coli O157:H7; identical to SEQ ID NO: 18620
  CDS (1)..(216): transl_table=11

SEQ ID NO: 50640 - protein, 71 aa, Escherichia coli O157:H7; identical to SEQ ID NO: 18621

SEQ ID NO: 50641 - DNA, 207 bp, Escherichia coli O157:H7; identical to SEQ ID NO: 18622
  CDS (1)..(207): transl_table=11

SEQ ID NO: 50642 - protein, 68 aa, Escherichia coli O157:H7; identical to SEQ ID NO: 18623

SEQ ID NO: 50643 - DNA, 216 bp, Escherichia coli O157:H7; identical to SEQ ID NO: 18624
  CDS (1)..(216): transl_table=11

SEQ ID NO: 50644 - protein, 71 aa, Escherichia coli O157:H7; identical to SEQ ID NO: 18625

SEQ ID NO: 50645 - DNA, 216 bp, Escherichia coli O157:H7; identical to SEQ ID NO: 18626
  CDS (1)..(216): transl_table=11

SEQ ID NO: 50646 - protein, 71 aa, Escherichia coli O157:H7; identical to SEQ ID NO: 18627

SEQ ID NO: 50647 - DNA, 216 bp, Escherichia coli O157:H7; identical to SEQ ID NO: 18628
  CDS (1)..(216): transl_table=11

SEQ ID NO: 50648 - protein, 71 aa, Escherichia coli O157:H7; identical to SEQ ID NO: 18629

SEQ ID NO: 50649 - DNA, 207 bp, Escherichia coli O157:H7; identical to SEQ ID NO: 18630
  CDS (1)..(207): transl_table=11

SEQ ID NO: 50650 - protein, 68 aa, Escherichia coli O157:H7; identical to SEQ ID NO: 18631

SEQ ID NO: 50651 - DNA, 207 bp, Escherichia coli O157:H7; identical to SEQ ID NO: 18632
  CDS (1)..(207): transl_table=11

SEQ ID NO: 50652 - protein, 68 aa, Escherichia coli O157:H7; identical to SEQ ID NO: 18633

SEQ ID NO: 50653 - DNA, 216 bp, Shigella flexneri 2a str. 301; identical to SEQ ID NO: 18634
  CDS (1)..(216): transl_table=11

SEQ ID NO: 50654 - protein, 71 aa, Shigella flexneri 2a str. 301; identical to SEQ ID NO: 18635

SEQ ID NO: 50655 - DNA, 216 bp, Shigella flexneri 2a str. 301; identical to SEQ ID NO: 18636
  CDS (1)..(216): transl_table=11

SEQ ID NO: 50656 - protein, 71 aa, Shigella flexneri 2a str. 301; identical to SEQ ID NO: 18637

SEQ ID NO: 50657 - DNA, 321 bp, Escherichia coli CFT073; identical to SEQ ID NO: 18638
  CDS (1)..(321): transl_table=11

SEQ ID NO: 50658 - protein, 106 aa, Escherichia coli CFT073; identical to SEQ ID NO: 18639

SEQ ID NO: 50659 - DNA, 216 bp, Escherichia coli CFT073; identical to SEQ ID NO: 18640
  CDS (1)..(216): transl_table=11

SEQ ID NO: 50660 - protein, 71 aa, Escherichia coli CFT073; identical to SEQ ID NO: 18641

SEQ ID NO: 50661 - DNA, 216 bp, Shigella flexneri 2a str. 2457T; identical to SEQ ID NO: 18642
  CDS (1)..(216): transl_table=11

SEQ ID NO: 50662 - protein, 71 aa, Shigella flexneri 2a str. 2457T; identical to SEQ ID NO: 18643

SEQ ID NO: 50663 - DNA, 180 bp, Shigella flexneri 2a str. 2457T; identical to SEQ ID NO: 18644
  CDS (1)..(180): transl_table=11

SEQ ID NO: 50664 - protein, 59 aa, Shigella flexneri 2a str. 2457T; identical to SEQ ID NO: 18645

SEQ ID NO: 50665 - DNA, 213 bp, Yersinia pseudotuberculosis IP 32953; identical to SEQ ID NO: 18646
  CDS (1)..(213): transl_table=11

SEQ ID NO: 50666 - protein, 70 aa, Yersinia pseudotuberculosis IP 32953; identical to SEQ ID NO: 18647

SEQ ID NO: 50667 - DNA, 216 bp, Shigella sonnei Ss046; identical to SEQ ID NO: 18648
  CDS (1)..(216): transl_table=11

SEQ ID NO: 50668 - protein, 71 aa, Shigella sonnei Ss046; identical to SEQ ID NO: 18649

SEQ ID NO: 50669 - DNA, 216 bp, Shigella sonnei Ss046; identical to SEQ ID NO: 18650
  CDS (1)..(216): transl_table=11

SEQ ID NO: 50670 - protein, 71 aa, Shigella sonnei Ss046; identical to SEQ ID NO: 18651

SEQ ID NO: 50671 - DNA, 207 bp, Bacteriophage H19B; identical to SEQ ID NO: 18652
  CDS (1)..(207): transl_table=11

SEQ ID NO: 50672 - protein, 68 aa, Bacteriophage H19B; identical to SEQ ID NO: 18653

SEQ ID NO: 50673 - DNA, 291 bp, Stx1; identical to SEQ ID NO: 18654
  CDS (1)..(291): transl_table=11

SEQ ID NO: 50674 - protein, 96 aa, Stx1; identical to SEQ ID NO: 18655

SEQ ID NO: 50675 - DNA, 150 bp, Escherichia coli; identical to SEQ ID NO: 18656
  CDS (1)..(150): transl_table=11

SEQ ID NO: 50676 - protein, 49 aa, Escherichia coli; identical to SEQ ID NO: 18657

SEQ ID NO: 50677 - DNA, 216 bp, Escherichia coli; identical to SEQ ID NO: 18658
  CDS (1)..(216): transl_table=11

SEQ ID NO: 50678 - protein, 71 aa, Escherichia coli; identical to SEQ ID NO: 18659

SEQ ID NO: 50679 - DNA, 216 bp, Shigella dysenteriae; identical to SEQ ID NO: 18660
  CDS (1)..(216): transl_table=11

SEQ ID NO: 50680 - protein, 71 aa, Shigella dysenteriae; identical to SEQ ID NO: 18661

SEQ ID NO: 50681 - DNA, 216 bp, Escherichia coli O6; identical to SEQ ID NO: 18662
  CDS (1)..(216): transl_table=11

SEQ ID NO: 50682 - protein, 71 aa, Escherichia coli O6; identical to SEQ ID NO: 18663

SEQ ID NO: 50683 - DNA, 216 bp, Bacteriophage P21; identical to SEQ ID NO: 18664
  CDS (1)..(216): transl_table=11

SEQ ID NO: 50684 - protein, 71 aa, Bacteriophage P21; identical to SEQ ID NO: 18665

SEQ ID NO: 50685 - DNA, 24 bp, Artificial sequence
  Primer sequence
atgctgtcaaaactaccccgtaga

SEQ ID NO: 50686 - DNA, 23 bp, Artificial sequence
  Primer sequence
ttactctcctctcgcagccttac

SEQ ID NO: 50687 - protein, 71 aa, Artificial sequence; identical to SEQ ID NO: 18668
  Consensus
  Variant (2)..(3): Xaa in position 2 to 3 is any amino acid
  Variant (14)..(14): Xaa in position 14 is any amino acid
  Variant (18)..(20): Xaa in position 18 to 20 is any amino acid
  Variant (24)..(24): Xaa in position 24 is any amino acid
  Variant (27)..(27): Xaa in position 27 is any amino acid
  Variant (30)..(30): Xaa in position 30 is any amino acid
  Variant (37)..(37): Xaa in position 37 is any amino acid
  Variant (47)..(47): Xaa in position 47 is any amino acid
  Variant (49)..(49): Xaa in position 49 is any amino acid
  Variant (67)..(67): Xaa in position 67 is any amino acid

SEQ ID NO: 50688 - protein, 10 aa, Artificial sequence
  Consensus
  Variant (2)..(2): Xaa in position 2 is Asp or Glu
  Variant (5)..(5): Xaa in position 5 is Ser or Thr
  Variant (7)..(7): Xaa in position 7 is Gly or Ser
  Variant (8)..(8): Xaa in position 8 is Ile or Val
  Variant (9)..(9): Xaa in position 9 is Ala or Ser
MXKIXTXXXY

SEQ ID NO: 50689 - protein, 6 aa, Artificial sequence
  Consensus
  Variant (2)..(2): Xaa in position 2 is Phe or Leu
  Variant (5)..(5): Xaa in position 5 is any amino acid
WXLQXL

SEQ ID NO: 50690 - protein, 14 aa, Artificial sequence
  Consensus
  Variant (5)..(5): Xaa in position 5 is any or no amino acid
  Variant (7)..(7): Xaa in position 7 is any or no amino acid
PSQWXAXIGVLGSL

SEQ ID NO: 50691 - DNA, 360 bp, Escherichia coli
  CDS (1)..(360)
atgctgcaaatcccacagaattatattcatacgcgctcaacgcctttctggaataaacaaactgcgcctgccggaatattcgaacgtcatcttgataaaggaacgcgcccgggggtttacccacgcctttccgttatgcatggggcggtcaaatatctcggctacgctgatgaacacagtgcagagcctgatcaggtgatccttatcgaagcggggcagtttgcggtgttccctccagaaaagtggcacaacattgaagccatgactgacgatacttatttcaacattgacttcttcgtggctcctgaagtcctgatggaaggtgcgcaacaacggaaagtcattcataacgggaaatga

SEQ ID NO: 50692 - protein, 119 aa, Escherichia coli
MLQIPQNYIHTRSTPFWNKQTAPAGIFERHLDKGTRPGVYPRLSVMHGAVKYLGYADEHSAEPDQVILIEAGQFAVFPPEKWHNIEAMTDDTYFNIDFFVAPEVLMEGAQQRKVIHNGK

SEQ ID NO: 50693 - DNA, 861 bp, Streptococcus pneumoniae TIGR4
  CDS (1)..(861): transl_table=11
atggaaaaattagttgcctataaacgcatgcctttgtggaataaacaaacaatgcctgaagctgttcagcaaaagcacaatacaaaagttgggacttgggggaaaattactgtcttgaagggagctctcaagtttattgaattgacagaagaaggggaagttctagctgaacacctctttgaagcaggggcagacaatccaatggcccaacctcaagcctggcaccgagtggaagctgccacagatgatgtggaatggtacttggaattttattgtaaacctgaggattattttgctaaaaaatacaataccaatcctgttcattcagaggtcctagaggccatgcagacagtgaaacaagggaaagctttggatttgggttgtggtcaggggcgtaattctctttttctagcccagcaagattttgatgtgacggctgtagatcaaaatggactagctcttgaaatcttgcaaagcattgtggagcaggaagatttggacatgcctgttggcctttacgatatcaattcagctagcattgaacaagaatatgattttatcgtttcaacagttgttctcatgtttctacaagcggaccgcattccagctattattcaaaatatgcaggagaaaaccagtgttggtggttacaaccttatcgtttgtgccatggacacggaggattatccttgctcggttaacttcccattcacctttaaagaaggagaactggcagactattacaaggattgggaattggttaagtacaatgaaaatccaggccatttgcaccgtcgcgatgagaatggcaatcgtattcaactacgctttgcgaccttactagctaagaaaatcaagtaa

SEQ ID NO: 50694 - protein, 286 aa, Streptococcus pneumoniae TIGR4
MEKLVAYKRMPLWNKQTMPEAVQQKHNTKVGTWGKITVLKGALKFIELTEEGEVLAEHLFEAGADNPMAQPQAWHRVEAATDDVEWYLEFYCKPEDYFAKKYNTNPVHSEVLEAMQTVKQGKALDLGCGQGRNSLFLAQQDFDVTAVDQNGLALEILQSIVEQEDLDMPVGLYDINSASIEQEYDFIVSTVVLMFLQADRIPAIIQNMQEKTSVGGYNLIVCAMDTEDYPCSVNFPFTFKEGELADYYKDWELVKYNENPGHLHRRDENGNRIQLRFATLLAKKIK

SEQ ID NO: 50695 - DNA, 867 bp, Streptococcus pneumoniae R6
  CDS (1)..(867): transl_table=11
ttgaaaatggaaaaattagttgcctataaacgcatgcctttgtggaataaacaaacaatgcctgaagctgttcagcaaaagcacaatacaaaagttgggacttgggggaaaattactgtcttgaagggagctctcaagtttattgaattgacagaagaaggggaagttctagctgaacacctctttgaagcaggggcagacaatccaatggcccaacctcaagcctggcaccgagtggaagctgccacagatgatgtggaatggtacttggaattttattgtaaacctgaggattattttgctaaaaaatacaataccaatcctgttcattcagaggtcctagaggccatgcagacagtgaaacaagggaaagctttggatttgggttgtggtcaggggcgtaattctctttttctagcccagcaagattttgatgtgacggctgtagatcaaaatggactagctcttgaaatcttgcaaagcattgtggagcaggaagatttggacatgcctgttggcctttacgatatcaattcagctagcattgaacaagaatatgattttatcgtttcaacagttgttctcatgtttctacaagcggaccgcattccagctattattcaaaatatgcaggagaaaaccagtgttggtggttacaaccttatcgtttgtgccatggacacggaggattatccttgctcggttaacttcccattcacctttaaagaaggagaactggcagactattacaaggattgggaattggttaagtacaatgaaaatccaggccatttgcaccgtcgcgatgagaatggcaatcgtattcaactacgctttgcgaccttactagctaagaaaatcaagtaa

SEQ ID NO: 50696 - protein, 288 aa, Streptococcus pneumoniae R6
MKMEKLVAYKRMPLWNKQTMPEAVQQKHNTKVGTWGKITVLKGALKFIELTEEGEVLAEHLFEAGADNPMAQPQAWHRVEAATDDVEWYLEFYCKPEDYFAKKYNTNPVHSEVLEAMQTVKQGKALDLGCGQGRNSLFLAQQDFDVTAVDQNGLALEILQSIVEQEDLDMPVGLYDINSASIEQEYDFIVSTVVLMFLQADRIPAIIQNMQEKTSVGGYNLIVCAMDTEDYPCSVNFPFTFKEGELADYYKDWELVKYNENPGHLHRRDENGNRIQLRFATLLAKKIK

SEQ ID NO: 50697 - DNA, 363 bp, Salmonella typhimurium LT2
  CDS (1)..(363): transl_table=11
atgcggcaaattccacaaaatcatattcatacacgttccacgccattctggaacaaagagacggcgcctgccggaattttcgaacgccaccttgataagggaacgcgacccgacgtttatcctcgtctctcggtgatgcagggggcggtcaaatatctcggatacgctgatgaacattgctctgagccggaagagatcatggtgatcaatgccggcgagtttggcgtgtttcctccggaaaagtggcacaatattgaggtcatgacggatgatacctattttaacatcgacttttttgtcgcgccggaagtactgatggaaggggcgacctcacgaaaagtcattcatgccgggagagaataa

SEQ ID NO: 50698 - protein, 120 aa, Salmonella typhimurium LT2
MRQIPQNHIHTRSTPFWNKETAPAGIFERHLDKGTRPDVYPRLSVMQGAVKYLGYADEHCSEPEEIMVINAGEFGVFPPEKWHNIEVMTDDTYFNIDFFVAPEVLMEGATSRKVIHAGRE

SEQ ID NO: 50699 - DNA, 333 bp, Vibrio vulnificus CMCP6
  CDS (1)..(333): transl_table=11
atgcgcattccaaaagagtggacgattcaacgctccaccccattttttaccaaacaaaccgtgccagcagcgctgctgacacaccacaataccgcgcaaggggtatttggccagctgtgcgtgatggaagggacggtcacgtactatggttttgccaacgaagaggcaacggaagcagagcaagtggtggtgatcaccgcggggcagtttgcgaccagtccgccacaatattggcatcgtatcgagatgagcgacgatgcgcagttcaatatcaacttctggtcggatcgtgataaacgaagtgaggtgatgttccacgcgaaaacggagtga

SEQ ID NO: 50700 - protein, 110 aa, Vibrio vulnificus CMCP6
MRIPKEWTIQRSTPFFTKQTVPAALLTHHNTAQGVFGQLCVMEGTVTYYGFANEEATEAEQVVVITAGQFATSPPQYWHRIEMSDDAQFNINFWSDRDKRSEVMFHAKTE

SEQ ID NO: 50701 - DNA, 342 bp, Salmonella enterica subsp. enterica serovar Typhi Ty2
  CDS (1)..(342): transl_table=11
atgtcccacttacgcatcccggcaaactggaaagttaaacgctctacccccttttacaccaaagagaatgttccggcggcactgctctctcatcacaacacagcggcaggcgttttcggacaactctgcgtgatggaaggcaccgtgacctactatggctttgcgaatgaaaccgcgacagaaccagaagtgaaagtggtgattaatgccgggcaattcgccaccagtccgccgcaatactggcatcgggtagagctgagcgatgatgcgcggttcaacattcatttttgggtagaggaagaccatcagggcgaggaaatgtatcaacagaaaaaagcctga

SEQ ID NO: 50702 - protein, 113 aa, Salmonella enterica subsp. enterica serovar Typhi Ty2
MSHLRIPANWKVKRSTPFYTKENVPAALLSHHNTAAGVFGQLCVMEGTVTYYGFANETATEPEVKVVINAGQFATSPPQYWHRVELSDDARFNIHFWVEEDHQGEEMYQQKKA

SEQ ID NO: 50703 - DNA, 342 bp, Vibrio vulnificus YJ016
  CDS (1)..(342): transl_table=11
atgtcacatatgcgcattccaaaagagtggacgattcaacgctccaccccattttttaccaaacaaaccgtgccagcagcgctgctgacacaccacaataccgcgcaaggggtctttggccagctgtgcgtgatggaagggacggtcacgtactatggttttgccaacgaagaggctacggaagcagagcaagtggtggtgatcaccgcggggcagtttgcgaccagtccgccacaatattggcatcgtatcgagatgagcgacgatgcgcagttcaacatcaacttctggtcggatcgtgataaacgaaatgaggtgatgttccacgcgaaaacggagtga

SEQ ID NO: 50704 - protein, 113 aa, Vibrio vulnificus YJ016
MSHMRIPKEWTIQRSTPFFTKQTVPAALLTHHNTAQGVFGQLCVMEGTVTYYGFANEEATEAEQVVVITAGQFATSPPQYWHRIEMSDDAQFNINFWSDRDKRNEVMFHAKTE

SEQ ID NO: 50705 - DNA, 861 bp, Erwinia carotovora subsp. atroseptica SCRI1043
  CDS (1)..(861): transl_table=11
atgcaagatctcatttgttataagaagatgccacagtggaacagccagacgctacctgccgcgtttcaggaaaagcacaacacacaagaaggcacttgggcaaaactgaccgtgttgaaaggggaaatgaccttttccatgctgaccgaagatggcgatacgctggagacgttccacttctctgagcaaaatcagccgccgtttgtggagccgcaggcgtggcatcgcatcgtctcgttctctgacgatctggaatgtcagcttagctttttctgttcggcggaagatttctaccataaaaaatacggtctgacgcaaacccattccgaagtgatcaacgcagtacagcacattaagccgggcaaaacgctggatttaggctgcggtggcgggcgcaactcgctgtatctaaacctgcgcgggtttgacgtaactgcctgtgacaagcacgagcaaagcattgattcgctgaataacatcatccagagcgaagcactggaaaacatccgggcgggcgtttacaacatcaatctggcagaaatcaaagagcagtacgatttcatcctgtcgaccgttgtgctgatgttcctagaacgtgaccgtattccgcacatcatcagtaatatgcaaggcagcaccgttgacggtggctataaccttattatcgcagcgatgtcgacggaagattgtccgtgcccgatgcccttctcgtttacctttaaagaagacgagttgaagaactattacgccgattgggagatcctcaaatataacgaggatatgggcgaactacacaagacagatgcacagggtaatcgcatcaagctgcgtttcgctacgctgctggcaagaaagccctaa

SEQ ID NO: 50706 - protein, 286 aa, Erwinia carotovora subsp. atroseptica SCRI1043
MQDLICYKKMPQWNSQTLPAAFQEKHNTQEGTWAKLTVLKGEMTFSMLTEDGDTLETFHFSEQNQPPFVEPQAWHRIVSFSDDLECQLSFFCSAEDFYHKKYGLTQTHSEVINAVQHIKPGKTLDLGCGGGRNSLYLNLRGFDVTACDKHEQSIDSLNNIIQSEALENIRAGVYNINLAEIKEQYDFILSTVVLMFLERDRIPHIISNMQGSTVDGGYNLIIAAMSTEDCPCPMPFSFTFKEDELKNYYADWEILKYNEDMGELHKTDAQGNRIKLRFATLLARKP

SEQ ID NO: 50707 - DNA, 333 bp, Erwinia carotovora subsp. atroseptica SCRI1043
  CDS (1)..(333): transl_table=11
atggaacgaattgtcatgccagcgaattatgttcatacccgtacaacaccgttttggacaaaggagactgctcccgcgtctatctggcggcgccatttggatgcaggaacaagacaaggtgtttacccgcgtttgtgcgtgatgcaagggacaattcgttattacggttatgccgatgaaaccagtcctgagccagtcgaaacgctgaccattgaagcaggacaatttggcgtattccctccagagaaatggcacagaattgaagcgttatctgatgatacgttattcaacgtagatttttatgtcgatccaaaaattctgatagaaggttga

SEQ ID NO: 50708 - protein, 110 aa, Erwinia carotovora subsp. atroseptica SCRI1043
MERIVMPANYVHTRTTPFWTKETAPASIWRRHLDAGTRQGVYPRLCVMQGTIRYYGYADETSPEPVETLTIEAGQFGVFPPEKWHRIEALSDDTLFNVDFYVDPKILIEG

SEQ ID NO: 50709 - DNA, 864 bp, Mannheimia succiniciproducens MBEL55E
  CDS (1)..(864): transl_table=11
atgaaatccgagcttatttgctataaaaaaatgcctgtgtggaacaaaaattcactgccgaaaatgtttcaggaaaaacacaataccaaagcaggcacttggggaaaattaacggttttacaaggtaaattaaaattctatacgctgaatgaagacggctctatagtaaacgaacatattttctccgctaatacggataccccttttgttgagccgcaacaatggcacaaagttgaagcgctttccgacgatttagaatgctatttggaattttattgcacaaaagaagattatttcggcaaaaaatataatatgacggcaacccacagcgatgtactgaaaaccgctaaaataattacaccctgtaaagtgctggatttaggttgcggtcacggacgaaattcgctttatttggcactgaaaggctatgatgtgacatcttgggatcataatgcagccagtattgcctttttagccgatagcgccgcgaaagaaaatctgcaaattcagaccgcagtttacgatataaacaatgcaaatattcaagaaaattatgatcttattctctctacggtggtatttatgtttttagaccgggaagccgtaccagcgattattgataatatgcaaaaacacacgaatgcgggtggttataatttaattgttgcggcgatgtccactgaggatatgccttgcccgattcctttcgcttttacttttggcgaaaacgaattgaaaaattattatcagggctgggagtttgtggaatataacgaaaacataggtgaattacacaaaaccgataaaaacggcaatcgttataaaatgaagtttgtgaccatgttggcgaagaaagttaaataa

SEQ ID NO: 50710 - protein, 287 aa, Mannheimia succiniciproducens MBEL55E
MKSELICYKKMPVWNKNSLPKMFQEKHNTKAGTWGKLTVLQGKLKFYTLNEDGSIVNEHIFSANTDTPFVEPQQWHKVEALSDDLECYLEFYCTKEDYFGKKYNMTATHSDVLKTAKIITPCKVLDLGCGHGRNSLYLALKGYDVTSWDHNAASIAFLADSAAKENLQIQTAVYDINNANIQENYDLILSTVVFMFLDREAVPAIIDNMQKHTNAGGYNLIVAAMSTEDMPCPIPFAFTFGENELKNYYQGWEFVEYNENIGELHKTDKNGNRYKMKFVTMLAKKVK

SEQ ID NO: 50711 - DNA, 339 bp, Photobacterium profundum SS9
  CDS (1)..(339): transl_table=11
atgagccacttacgaattccgaataattggaaaatacaacgttcgactcctttctttaccaaagataatgtaccagccgctttgctctctcatcacaatacagctgaaggtgttttcggtcagctttgtgtaatggaaggcactgtcacatattatggttttgcggatgagaatgcgacagagccagaagccatcattgtcattaacgctgggcagtttgcgaccagccctcctgaatactggcatcgtgtcgaattatctgaggatgcccaattcaacattaatttttggtcagacaaagataaaaccgatcaagtgttatttaatgcaaagaagtag

SEQ ID NO: 50712 - protein, 112 aa, Photobacterium profundum SS9
MSHLRIPNNWKIQRSTPFFTKDNVPAALLSHHNTAEGVFGQLCVMEGTVTYYGFADENATEPEAIIVINAGQFATSPPEYWHRVELSEDAQFNINFWSDKDKTDQVLFNAKK

SEQ ID NO: 50713 - DNA, 342 bp, Salmonella enterica subsp. enterica serovar Paratyphi A str. ATCC
  CDS (1)..(342): transl_table=11
atgtcccacttacgcatcccggcaaactggaaagttaaacgctctaccccctttttcaccaaagaaaatgttccggcggcactgctctctcatcacaacacagcggcaggcgttttcggacaactctgcgtgatggaaggcaccgtgacctactatggctttgcgaatgaaaccgcgacagaaccagaagtgaaagtggtaattaatgccgggcaattcgccaccagtccgccgcaatactggcatcgggtagagctgagcgatgatgcgcggttcaacatccatttttgggtagaggaagaccatcagggcgaggaaatgtatcaacagaaaaaagcctga

SEQ ID NO: 50714 - protein, 113 aa, Salmonella enterica subsp. enterica serovar Paratyphi A str. ATCC
MSHLRIPANWKVKRSTPFFTKENVPAALLSHHNTAAGVFGQLCVMEGTVTYYGFANETATEPEVKVVINAGQFATSPPQYWHRVELSDDARFNIHFWVEEDHQGEEMYQQKKA

SEQ ID NO: 50715 - DNA, 363 bp, Salmonella enterica subsp. enterica serovar Paratyphi A str. ATCC
  CDS (1)..(363): transl_table=11
atgcggcaaattccacaaaatcatattcatacacgttccacgccattctggaacaaagagacggcgcctgccggaattttcgaacgccaccttgataagggaacgcgacccggcgtttatcctcgcctctcggtgatgcagggggcggtcaaatatctcggatacgctgatgaacattgctctgagccggaagagatcatggtgatcaatgccggcgagtttggcgtgtttcctccggaaaagtggcacaatattgaggtcatgacggatgatacctattttaacatcgacttttttgtcgcgccggaagtactgatggaaggggcgacctcacgaaaagtcattcatgccgggagagaataa

SEQ ID NO: 50716 - protein, 120 aa, Salmonella enterica subsp. enterica serovar Paratyphi A str. ATCC
MRQIPQNHIHTRSTPFWNKETAPAGIFERHLDKGTRPGVYPRLSVMQGAVKYLGYADEHCSEPEEIMVINAGEFGVFPPEKWHNIEVMTDDTYFNIDFFVAPEVLMEGATSRKVIHAGRE

SEQ ID NO: 50717 - DNA, 336 bp, Vibrio fischeri ES114
  CDS (1)..(336): transl_table=11
atgagtcatttacgtatcccaaaaaattggacaattcaacgttcaacgccattctttactaaagataatgtacctgaggcactactaactcatcataatacagctgtagatgtattcggacagatctgtgttatggaaggggttgtcacttattatggatttgcaaattcagaagcaacagaacctgagattaaagttgttattaatgcaggacagtttgctacaagcccacctcaatattggcatcgtattgagttaagtgacgatgctcaattcaatattaatttttggtctgatcaagataaaagcggtaaaaaaatgttcaatacgaaatag

SEQ ID NO: 50718 - protein, 111 aa, Vibrio fischeri ES114
MSHLRIPKNWTIQRSTPFFTKDNVPEALLTHHNTAVDVFGQICVMEGVVTYYGFANSEATEPEIKVVINAGQFATSPPQYWHRIELSDDAQFNINFWSDQDKSGKKMFNTK

SEQ ID NO: 50719 - DNA, 861 bp, Haemophilus influenzae 86-028NP
  CDS (1)..(861): transl_table=11
atgaaaaacgaattaatctgctataaacaaatgccagtgtggacaaaagacaaattgccacaaatgttccaagaaaagcacaacacaaaagtcggcacttggggaaaattaaccgtattaaaaggtaagcttaaattttatgagctaacagaaaatggcgatgttattgccgagcatatttttaccccagaaagccacattccttttgttgaacctcaagcatggcatcgtgttgaagctctttctgatgacctagaatgtaccctaggtttctattgcaaaaaagaagattatttcagtaaaaaatacaacatgactgccattcacggcgatgtggtggatgcagcaaaaattatctcgccttgtaaagtattagatttaggttgcggacaagggcgtaattcactttatttaagtttattaggctatgatgtaacctcttgggatcacaatgaaaacagcattgcctttttaaatgaaaccaaagagaaagaaaaccttaatatttctaccgcactttacgacattaacgccgccaacattcaagaaaactatgattttattgtttcaacggtggtgtttatgttcttaaatcgtgaacgtgtgccgtcaatcatcaaaaatatgcaagaacataccaatgttggcggatataatttaatcgttgccgcaatgtccacagatgatgtgccttgcccacttccattctcattcacttttgctgaaaacgaattgaaagaatattacaaagattgggaattcttagaatataacgaaaatatgggcgaattacacaaaaccgatgaaaacggcaatcgcattaaaatgaaatttgccaccatgttagcgagaaagaaataa

SEQ ID NO: 50720 - protein, 286 aa, Haemophilus influenzae 86-028NP
MKNELICYKQMPVWTKDKLPQMFQEKHNTKVGTWGKLTVLKGKLKFYELTENGDVIAEHIFTPESHIPFVEPQAWHRVEALSDDLECTLGFYCKKEDYFSKKYNMTAIHGDVVDAAKIISPCKVLDLGCGQGRNSLYLSLLGYDVTSWDHNENSIAFLNETKEKENLNISTALYDINAANIQENYDFIVSTVVFMFLNRERVPSIIKNMQEHTNVGGYNLIVAAMSTDDVPCPLPFSFTFAENELKEYYKDWEFLEYNENMGELHKTDENGNRIKMKFATMLARKK

SEQ ID NO: 50721 - DNA, 873 bp, Actinobacillus pleuropneumoniae serovar 1 str. 4074
  CDS (1)..(873)
atgcaaaacttaatttgctataaacaaatgccggtttggaccaaagacagcctgccacaaatgttccaagaaaaacacaatactaaggaaggtacttgggcaaaactgactatacttaaaggcgaattaaaattttatgaattgaccgaacaaggcgaagaagtcaatagcgtgatttttacccctgaaaatcagccgccgtttgtcgagccgcaactttggcataaagtcgaagcgctgtccgatgatttggaatgtcagctcgcattctattgcgaagcgaaagattactatgcgaaaaaatataatctcaccacgactcattccgaagtgttaaatgcggttaattatgtaaaaggtggtaaagcgttggatttaggttgcggacgcggacgcaattcgctctatctgaatttattaggttttgatgtaacggcggttgatcataatgtcgagagtatcgaattcttaaactatatgattgagaaagagaatctgcaaaatatcgaaaccggtgtttatgatattaaccaagccactatcggcagccaaagcggtgaatatgatctaattatttctacggttgtgatgatgttcttaaaccgtgaacgcattccggcaattattgaaaatatgcagaaaaacaccaaggtcggcggctataacttaattgtgtgtgcgatgagtaccgaagaatatccgtgtccgatgccgttctcatttaccttcggcgagcgagaattagcgaactattaccaaggttgggaattagtgaagtacaatgaagatttgggtgaattgcataaaaccgatgcgaacggcaaccgtattaaaatgcgtttcgcaaccatgttagccaagaaaacagcgtaa

SEQ ID NO: 50722 - protein, 290 aa, Actinobacillus pleuropneumoniae serovar 1 str. 4074
MQNLICYKQMPVWTKDSLPQMFQEKHNTKEGTWAKLTILKGELKFYELTEQGEEVNSVIFTPENQPPFVEPQLWHKVEALSDDLECQLAFYCEAKDYYAKKYNLTTTHSEVLNAVNYVKGGKALDLGCGRGRNSLYLNLLGFDVTAVDHNVESIEFLNYMIEKENLQNIETGVYDINQATIGSQSGEYDLIISTVVMMFLNRERIPAIIENMQKNTKVGGYNLIVCAMSTEEYPCPMPFSFTFGERELANYYQGWELVKYNEDLGELHKTDANGNRIKMRFATMLAKKTA

SEQ ID NO: 50723 - DNA, 861 bp, Haemophilus influenzae R2866
  CDS (1)..(861)
atgaaaaacgaattaatttgctataaacaaatgccagtgtggacaaaagacaacttgccacaaatgttccaagaaaagcacaatacaaaagtcggcacttggggaaaattaactgtattaaaaggcaaactcaaattttatgagctaaccgaaaatggcgatgttattgccgagcatatttttaccccagaaagcgagattccttttgtcgaacctcaagcatggcatcgtgtagaagcactttctgatgatttagaatgtaccctaggtttctattgcaaaaaagaagattatttcagtaaaaaatacaacatgactgccattcacggcgatgtggtggatgcagcaaaaattatctcgccttgtaaagtattagatttaggttgcggacaagggcgtaattcactttatttaagtttattaggctatgatgtaacctcttgggatcacaatgaaaacagcattgcctttttaaatgaaaccaaagagaaagaaaaccttaatatttctaccgcactttacgacattaacgccgccaacattcaagaaaactatgattttattgtttcaacggtggtgtttatgttcttaaatcgtgaacgtgtgccgtcaatcattaaaaatatgcaagaacataccaatgttggcggatataacttaatcgttgctgcaatatccactgatgatgtgccttgcccacttccattctctttcacttttgctgaaaacgaattgaaagaatattacaaagattgggaattcttagaatataacgaaaatatgggcgaattacacaaaaccgatgaaaacggcaatcgcattaaaatgaaatttgccaccatgttagcgagaaagaaataa

SEQ ID NO: 50724 - protein, 286 aa, Haemophilus influenzae R2866
MKNELICYKQMPVWTKDNLPQMFQEKHNTKVGTWGKLTVLKGKLKFYELTENGDVIAEHIFTPESEIPFVEPQAWHRVEALSDDLECTLGFYCKKEDYFSKKYNMTAIHGDVVDAAKIISPCKVLDLGCGQGRNSLYLSLLGYDVTSWDHNENSIAFLNETKEKENLNISTALYDINAANIQENYDFIVSTVVFMFLNRERVPSIIKNMQEHTNVGGYNLIVAAISTDDVPCPLPFSFTFAENELKEYYKDWEFLEYNENMGELHKTDENGNRIKMKFATMLARKK

SEQ ID NO: 50725 - DNA, 411 bp, Streptococcus pneumoniae TIGR4
  CDS (1)..(411)
atggaaaaattagttgcctataaacgcatgcctttgtggaataaacaaacaatgcctgaagctgttcagcaaaagcacaatacaaaagttgggacttgggggaaaattactgtcttgaagggagctctcaagtttattgaattgacagaagaaggggaagttctagctgaacacctctttgaagcaggggcagacaatccaatggcccaacctcaagcctggcaccgagtggaagctgccacagatgatgtggaatggtacttggaattttattgtaaacctgaggattattttgctaaaaaatacaataccaatcctgttcattcagaggtcctagaggccatgcagacagtgaaacaagggaaagctttggatttgggttgtggtcagggcgtaattctctttttctag

SEQ ID NO: 50726 - protein, 136 aa, Streptococcus pneumoniae TIGR4
MEKLVAYKRMPLWNKQTMPEAVQQKHNTKVGTWGKITVLKGALKFIELTEEGEVLAEHLFEAGADNPMAQPQAWHRVEAATDDVEWYLEFYCKPEDYFAKKYNTNPVHSEVLEAMQTVKQGKALDLGCGQGVILFF

SEQ ID NO: 50727 - DNA, 339 bp, Shewanella baltica OS155
  CDS (1)..(339): transl_table=11
atggccttagtccctaaagattttgttaattataaatcaacgccggttttcagccgtgacaacgtccctaaaatgttgttgcacatgcacaatactaaggctggcgtgtatgggcagatccaagtgctaacgggcagcttaaagttctatggctttacgggcagcagaggcgagttaggtaaagagatcatcattcgcgccggtgaaacggccatttctcatcccgagtattggcacaaagtggagctactgactgaagatacccagttcagactccatttttatgcccataaagattccgccatagcggcacagcagcaatccgagcgaagtgaatag

SEQ ID NO: 50728 - protein, 112 aa, Shewanella baltica OS155
MALVPKDFVNYKSTPVFSRDNVPKMLLHMHNTKAGVYGQIQVLTGSLKFYGFTGSRGELGKEIIIRAGETAISHPEYWHKVELLTEDTQFRLHFYAHKDSAIAAQQQSERSE

SEQ ID NO: 50729 - DNA, 423 bp, Shewanella amazonensis SB2B
  CDS (1)..(423): transl_table=11
atggcattgataccgaaaaattatgttccagtgggttccacccggatattcggcggtaatgatatacctgaaatgctgttgtcgcagcatcgtacccgaaatggcttttacagccagattgaggtcattgaaggtgagctcttatggcaaggttttggcgacacagatggcaagcccggtattgaggtgcacctgcgcgccaacgacagggccatgacccaccccggcaagtgttacagcgtgaagctgctcagcgatgagacccgtttcagactcaatgtgtttgcccatcaaagcctgcaggaaagcaatgtcgatgtcagcagcacagtggggctctttctcgaaccccttgctccggacctgacgcctgtggctaaacagactgaggatactgattgcgaacttcaggcagatcgctga

SEQ ID NO: 50730 - protein, 140 aa, Shewanella amazonensis SB2B
MALIPKNYVPVGSTRIFGGNDIPEMLLSQHRTRNGFYSQIEVIEGELLWQGFGDTDGKPGIEVHLRANDRAMTHPGKCYSVKLLSDETRFRLNVFAHQSLQESNVDVSSTVGLFLEPLAPDLTPVAKQTEDTDCELQADR

SEQ ID NO: 50731 - DNA, 336 bp, Shewanella frigidimarina NCIMB 400
  CDS (1)..(336): transl_table=11
atgtctcatcaacgtatcccagcaaattggactattcagcgttctacgccatttttcaccactaaaaatgtgcctgatgcactactgactcatcacaataccgccgaaggagtatttgggcagttatgtgtaatggaaggtgtagtcacgtattttggttttgctaacagcgaagcaactgagcctgaagtgaaagtggtgattaatgccggacaatttgccaccagcccaccagagtactggcaccgtattgaattaagccctgatgcccagttcaatattaatttctggtctgaaaaagataaaaccggccaagcgatgtttaataagaaataa

SEQ ID NO: 50732 - protein, 111 aa, Shewanella frigidimarina NCIMB 400
MSHQRIPANWTIQRSTPFFTTKNVPDALLTHHNTAEGVFGQLCVMEGVVTYFGFANSEATEPEVKVVINAGQFATSPPEYWHRIELSPDAQFNINFWSEKDKTGQAMFNKK

SEQ ID NO: 50733 - DNA, 1326 bp, Streptococcus pneumoniae
  CDS (1)..(1326): transl_table=11
atggcaaagggcgagggaaaggtcgtcgcacaaaataaaaaggcacgccacgactatacaatcgtagatacgctagaggcagggatggtcctgactggaactgaaatcaagagtgtacgagctgctcgaattaatctcaaggatggctttgctcaagtgaaaaatggagaagtttggctgagtaatgttcatatcgcgccttacgaagagggcaatatctggaaccaggaaccagaacgtcgtcgtaaactcctgctccataaaaagcaaattcaaaaattggaacaagagaccaaagggacaggaatgaccttagttccccttaaggtctatataaaagatggctacgctaagcttcttttaggacttgccaaagggaagcatgactatgacaaacgggagtctatcaaacgtcgtgagcaaaatcgagatatcgcgcgtgtgatgaaagctgttaatcagcgattaaaagaggaattgaaaatggaaaaattagttgcctataaacgcatgcctttgtggaataaacaaacaatgcctgaagctgttcagcaaaagcacaatacaaaagttgggacttgggggaaaattactgtcttgaagggagctctcaagtttattgaattgacagaagaaggggaagttctagctgaacacctctttgaagcaggggcagacaatccaatggcccaacctcaagcctggcaccgagtggaagctgccacagatgatgtggaatggtacttggaattttattgtaaacctgaggattattttgctaaaaaatacaataccaatcctgttcattcagaggtcctagaggccatgcagacagtgaaacaagggaaagctttggatttgggttgtggtcaggggcgtaattctctttttctagcccagcaagattttgatgtgacggctgtagatcaaaatggactagctcttgaaatcttgcaaagcattgtggagcaggaagatttggacatgcctgttggcctttacgatatcaattcagctagcattgaacaagaatatgattttatcgtttcaacagttgttctcatgtttctacaagcggaccgcattccagctattattcaaaatatgcaggagaaaaccagtgttggtggttacaacctatcgtttgtgccatggacacggaggattatccttgctcggttaacttcccattcacctttaaagaaggagaactggcagactattacaaggattgggaattggttaagtacaatgaaaatccaggccatttgcaccgtcgcgatgagaatggcaatcgtattcaactacgctttgcgaccttactag

SEQ ID NO: 50734 - protein, 441 aa, Streptococcus pneumoniae
MAKGEGKVVAQNKKARHDYTIVDTLEAGMVLTGTEIKSVRAARINLKDGFAQVKNGEVWLSNVHIAPYEEGNIWNQEPERRRKLLLHKKQIQKLEQETKGTGMTLVPLKVYIKDGYAKLLLGLAKGKHDYDKRESIKRREQNRDIARVMKAVNQRLKEELKMEKLVAYKRMPLWNKQTMPEAVQQKHNTKVGTWGKITVLKGALKFIELTEEGEVLAEHLFEAGADNPMAQPQAWHRVEAATDDVEWYLEFYCKPEDYFAKKYNTNPVHSEVLEAMQTVKQGKALDLGCGQGRNSLFLAQQDFDVTAVDQNGLALEILQSIVEQEDLDMPVGLYDINSASIEQEYDFIVSTVVLMFLQADRIPAIIQNMQEKTSVGGYNLSFVPWTRRIILARLTSHSPLKKENWQTITRIGNWLSTMKIQAICTVAMRMAIVFNYALRPY

SEQ ID NO: 50735 - DNA, 864 bp, Eikenella corrodens
  CDS (1)..(864): transl_table=11
atgaatccagaactcatctgctacaaaaccatgccggtatgggataaagccactattccggcggcagttttgtcgcagcacaacacacaggttggcacatatggcaagctgcgcgtattgcgtgggcggctgaagttttatgaattgcaagaagatggcgtggtactcgcggaacatgtgttgcagccggaaagtgggctgtggacgatttacccgcaggcttggcataaagtggaaccactggatgatgattttgccgtgcagctggaatttcattgcgaaaaagccgactttttccacaaaaaatacggcatgactgctacccattccgccatccgcgaagcagtgcagactgtgccgccgtgtaaaacgttggatttaggctgtgggcaagggcgtaatgcgctgtttttgagcttggccggatacgatgtgcatgctgtggatcacagcccggcggcagtagcttcagtgctggatatggctgcgcgcgaacagttgccgctgcgggcagatgcttacgatattaatgctgccgctttgagtgaagattacgattttatcttctccactgtggtgtttatgtttctccaagccaaccgtgtgtcggagattattgccgatatgcaggtacatacccgatccggtggctataacctgattgtgtcggcaatggatacggcagactacccctgccatatgccgttttcgttcacatttaaagaagacgaattgcggcagtattacgccggctgggaattgctgaaatacgaagaagcggtgggttcgatgcacgctaccgatgcgcaaggtcgaccgattcaattgaagtttgtgacgatgttggcgaaaaagcccggttga

SEQ ID NO: 50736 - protein, 287 aa, Eikenella corrodens
MNPELICYKTMPVWDKATIPAAVLSQHNTQVGTYGKLRVLRGRLKFYELQEDGVVLAEHVLQPESGLWTIYPQAWHKVEPLDDDFAVQLEFHCEKADFFHKKYGMTATHSAIREAVQTVPPCKTLDLGCGQGRNALFLSLAGYDVHAVDHSPAAVASVLDMAAREQLPLRADAYDINAAALSEDYDFIFSTVVFMFLQANRVSEIIADMQVHTRSGGYNLIVSAMDTADYPCHMPFSFTFKEDELRQYYAGWELLKYEEAVGSMHATDAQGRPIQLKFVTMLAKKPG

SEQ ID NO: 50737 - DNA, 861 bp, Actinobacillus succinogenes 130Z
  CDS (1)..(861)
atgaaaacagaattaatcagctacaaaaaaatgccgatatggaccaaaaacagcctgccccgaatgtttcaggaaaaacacaacactaaaagcggaacttggggcaaaatcaccgttttaaaaggccaattaaaattctatgtattagcggaaaacggcgaagtaatcagcgaccacctctttacgccggcgaatgacacgccattcgtcgaaccgcaagtatggcaccgcgtagaagcggcgtccgacgatttagaatgttatctggaattctattgtactaaagcggattacttcagcaaaaaatacaatatgacggcaacccattccgaagtgaaagctgcggcagaacggattcgaccgtgtaaaacattggatttaggctgcggacaagggcgcaattcgttatttttaagtctgttgggatacgatgtgacttctcgggatcacaacgaaaccagtctggcatttttgcaggaaactgcggaaaaagaaaatcttcctgtttccaccgcgctttatgacattaactcggcgaatattcaggaaaactacgattttattttatctactgtggtttttatgtttttaaaccgcgacgccgtgccgtcaatcattcaaaatatgcagacccacaccaacagcggcggttataatctgattgtcgccgccatggatacggccgatacgccttgtccgattccgttttctttcaccttcaaagaaggagaattgagccgttattaccgggactgggaattaataaaatataatgaaaaaccgggcgagctgcataagaccgatgacaacggcaaccggattaaaatgaaattcgtgaccatgttggcgcgcaaaaaataa

SEQ ID NO: 50738 - protein, 286 aa, Actinobacillus succinogenes 130Z
MKTELISYKKMPIWTKNSLPRMFQEKHNTKSGTWGKITVLKGQLKFYVLAENGEVISDHLFTPANDTPFVEPQVWHRVEAASDDLECYLEFYCTKADYFSKKYNMTATHSEVKAAAERIRPCKTLDLGCGQGRNSLFLSLLGYDVTSRDHNETSLAFLQETAEKENLPVSTALYDINSANIQENYDFILSTVVFMFLNRDAVPSIIQNMQTHTNSGGYNLIVAAMDTADTPCPIPFSFTFKEGELSRYYRDWELIKYNEKPGELHKTDDNGNRIKMKFVTMLARKK

SEQ ID NO: 50739 - DNA, 363 bp, Pseudoalteromonas haloplanktis TAC125
  CDS (1)..(363): transl_table=11
atgagtcacttaactataccaagtcactggaaaataaaacgctccactcacttttttactaaagataacattccaaaagcgttacttactcaccacaacacagccgagggtgtgtttggccaaatttgcgttatgcaaggcactgttaccttttacggatttgcaaatgaagccgccacagagcctgagcaaactattgtaattaacgcggggcaatttgctaccagcccgccacaatactggcataaagtagagctaagcgacggcgcgcaatttaatatcaacttttgggccgaagccgatacaggcaataaagccctgtttaaaagttcacgtattcatagcaaacctattttagattaa

SEQ ID NO: 50740 - protein, 120 aa, Pseudoalteromonas haloplanktis TAC125
MSHLTIPSHWKIKRSTHFFTKDNIPKALLTHHNTAEGVFGQICVMQGTVTFYGFANEAATEPEQTIVINAGQFATSPPQYWHKVELSDGAQFNINFWAEADTGNKALFKSSRIHSKPILD

SEQ ID NO: 50741 - DNA, 342 bp, Salmonella enterica VII
  CDS (1)..(342): transl_table=11
atgtcccacctatgcatcccggtaaactggaaagttaaacgctccactccctttttcaccaaagagaatgtcccggcggcattgctctctcatcacaatacggcggcaggcgttttcggacaactttgcgtgatggagggtaccgtgacctactatggctttgcgaatgaagctgcgacagaaccagaagtaaaagtggtgattaatgccgggcaattcgccaccagcccgccgcaatactggcatcgggtagaacttagcgatgatgcgcggttcaacattcatttttgggtagaggaaggccatcagggcgaagagttgtatcaacaaaaaaaagcctga

SEQ ID NO: 50742 - protein, 113 aa, Salmonella enterica VII
MSHLCIPVNWKVKRSTPFFTKENVPAALLSHHNTAAGVFGQLCVMEGTVTYYGFANEAATEPEVKVVINAGQFATSPPQYWHRVELSDDARFNIHFWVEEGHQGEELYQQKKA

SEQ ID NO: 50743 - DNA, 861 bp, Streptococcus pneumoniae
  CDS (1)..(861): transl_table=11
atggaaaaattagttgcctataaacgcatgcctttgtggaataaacaaacaatgcctgaagctgttcagcaaaagcacaatacaaaagttgggacttgggggaaaattactgtcttgaagggagctctcaagtttattgaattgacagaagaaggggaagttctagctgaacacctctttgaagcaggggcagacaatccaatggcccaacctcaagcctggcaccgagtggaagctgccacagatgatgtggaatggtacttggaattttattgtaaacctgaggattattttgctaaaaaatacaataccaatcctgttcattcagaggtcctagaggccatggagacagtgaaacaagggaaagctttggatttgggttgtggtcaggggcgtaattctctttttctagcccagcaagattttgatgtgacggctgtagatcaaaatggactagctcttgaaatcttgcaaagcattgtggagcaggaagatttggacatgcctgttggcctttacgatatcaattcagctagcattgaacaagaatatgattttatcgtttcaacagttgttctcatgtttctacaagcggaccgcattccagctattattcaaaatatgcaggagaaaaccagtgttggtggttacaaccttatcgtttgtgccatggacacggaggattatccttgctcggttaacttcccattcacctttaaagaaggagaactggcagactattacaaggattgggaattggttaagtacaatgaaaatccaggccatttgcaccgtcgcgatgagaatggcaatcgtattcaactacgctttgcgaccttactagctaagaaaatcaagtaa

SEQ ID NO: 50744 - protein, 286 aa, Streptococcus pneumoniae
MEKLVAYKRMPLWNKQTMPEAVQQKHNTKVGTWGKITVLKGALKFIELTEEGEVLAEHLFEAGADNPMAQPQAWHRVEAATDDVEWYLEFYCKPEDYFAKKYNTNPVHSEVLEAMETVKQGKALDLGCGQGRNSLFLAQQDFDVTAVDQNGLALEILQSIVEQEDLDMPVGLYDINSASIEQEYDFIVSTVVLMFLQADRIPAIIQNMQEKTSVGGYNLIVCAMDTEDYPCSVNFPFTFKEGELADYYKDWELVKYNENPGHLHRRDENGNRIQLRFATLLAKKIK

SEQ ID NO: 50745 - DNA, 861 bp, Haemophilus influenzae
  CDS (1)..(861): transl_table=11
atgaaaaacgaattaatttgctataaacaaatgccagtgtggacaaaagacaacttgccacaaatgttccaagaaaagcacaatacaaaagtcggcacttggggaaaattaactgtattaaaaggtaagcttaaattttatgagctaaccgaaaatggcgatgttattgccgagcatatttttaccccagaaagccacattccttttgttgaacctcaagcatggcatcgtgtagaagcactttctgatgacctagaatgtaccctaggtttctattgcaaaaaagaagattatttcagtaaaaaatacaacacgactgccattcacggcgatgtggtggatgctgcaaaaattatctcgccttgtaaagtattagatttaggttgcggacaagggcgtaattcactttatttaagtttattaggctatgatgtgacctcttgggatcacaatgaaaacagcattgcctttttaaatgaaactaaagagaaagaaaatcttaatatttctaccgcactttacgacattaacgccgccaacattcaagaaaactatgattttattgtttcaacggtggtatttatgttcttaaatcgtgaacgtgtgccatcaatcattaaaaatatgaaagaacataccaatgttggcgggtataacttaatcgttgccgccatgtccacagatgatgtgccttgcccacttccattctctttcacttttgctgaaaacgaattgaaagaatattacaaagattgggaattcttagaatataacgaaaatatgggcgaattacacaaaaccgatgaaaacggcaatcgcattaaaatgaaatttgccaccatgttagcgagaaagaaataa

SEQ ID NO: 50746 - protein, 286 aa, Haemophilus influenzae
MKNELICYKQMPVWTKDNLPQMFQEKHNTKVGTWGKLTVLKGKLKFYELTENGDVIAEHIFTPESHIPFVEPQAWHRVEALSDDLECTLGFYCKKEDYFSKKYNTTAIHGDVVDAAKIISPCKVLDLGCGQGRNSLYLSLLGYDVTSWDHNENSIAFLNETKEKENLNISTALYDINAANIQENYDFIVSTVVFMFLNRERVPSIIKNMKEHTNVGGYNLIVAAMSTDDVPCPLPFSFTFAENELKEYYKDWEFLEYNENMGELHKTDENGNRIKMKFATMLARKK

SEQ ID NO: 50747 - DNA, 26 bp, Artificial sequence
  Primer sequence
atgcttcaaatcccacagaattatat

SEQ ID NO: 50748 - DNA, 27 bp, Artificial sequence
  Primer sequence
ttatttcccgttatgaatgactttccg

SEQ ID NO: 50749 - protein, 88 aa, Artificial sequence
  Consensus
  Variant (2)..(3): Xaa in position 2 to 3 is any amino acid
  Variant (5)..(5): Xaa in position 5 is any amino acid
  Variant (7)..(7): Xaa in position 7 is any amino acid
  Variant (9)..(10): Xaa in position 9 to 10 is any amino acid
  Variant (13)..(18): Xaa in position 13 to 18 is any amino acid
  Variant (21)..(23): Xaa in position 21 to 23 is any or no amino acid
  Variant (25)..(26): Xaa in position 25 to 26 is any amino acid
  Variant (28)..(28): Xaa in position 28 is any amino acid
  Variant (31)..(31): Xaa in position 31 is any amino acid
  Variant (33)..(33): Xaa in position 33 is any amino acid
  Variant (36)..(36): Xaa in position 36 is any amino acid
  Variant (38)..(38): Xaa in position 38 is any amino acid
  Variant (40)..(40): Xaa in position 40 is any amino acid
  Variant (42)..(47): Xaa in position 42 to 47 is any amino acid
  Variant (48)..(48): Xaa in position 48 is any or no amino acid
  Variant (50)..(54): Xaa in position 50 to 54 is any amino acid
  Variant (55)..(55): Xaa in position 55 is any or no amino acid
  Variant (57)..(67): Xaa in position 57 to 67 is any amino acid
  Variant (69)..(70): Xaa in position 69 to 70 is any amino acid
  Variant (76)..(77): Xaa in position 76 to 77 is any amino acid
  Variant (78)..(78): Xaa in position 78 is any or no amino acid
  Variant (81)..(84): Xaa in position 81 to 84 is any amino acid
  Variant (86)..(86): Xaa in position 86 is any amino acid
KXXPXWXKXXVPXXXXXXHNXXXTXXGXWGXLXVLXGXLXFXXXXXXXGXXXXXXIXXXXXXXXXXXPXXWHRVEXXXDDXXXXLXFY

SEQ ID NO: 50750 - protein, 34 aa, Artificial sequence
  Consensus
  Variant (2)..(2): Xaa in position 2 is Phe, Ile, Leu or Val
  Variant (3)..(3): Xaa in position 3 is Phe, Trp or Tyr
  Variant (4)..(4): Xaa in position 4 is Asp, Asn or Thr
  Variant (6)..(6): Xaa in position 6 is Ala, Asp, Glu, Asn or Gln
  Variant (7)..(8): Xaa in position 7 to 8 is any amino acid
  Variant (10)..(11): Xaa in position 10 to 11 is any amino acid
  Variant (12)..(12): Xaa in position 12 is Phe, Ile, Leu or Val
  Variant (13)..(15): Xaa in position 13 to 15 is any amino acid
  Variant (17)..(17): Xaa in position 17 is any amino acid
  Variant (18)..(20): Xaa in position 18 to 20 is any or no amino acid
  Variant (22)..(23): Xaa in position 22 to 23 is any amino acid
  Variant (24)..(24): Xaa in position 24 is Asp or Gly
  Variant (25)..(25): Xaa in position 25 is Thr or Val
  Variant (26)..(26): Xaa in position 26 is Phe, Trp or Tyr
  Variant (27)..(27): Xaa in position 27 is Ala, Gly or Pro
  Variant (28)..(28): Xaa in position 28 is any amino acid
  Variant (29)..(29): Xaa in position 29 is Ile or Leu
  Variant (30)..(30): Xaa in position 30 is any amino acid
  Variant (31)..(31): Xaa in position 31 is Ile or Val
  Variant (32)..(32): Xaa in position 32 is Leu or Met
  Variant (33)..(33): Xaa in position 33 is any amino acid
PXXXKXXXPXXXXXXHXXXXTXXXXXXXXXXXXG

SEQ ID NO: 50751 - protein, 20 aa, Artificial sequence
  Consensus
  Variant (2)..(2): Xaa in position 2 is Glu or Gln
  Variant (3)..(3): Xaa in position 3 is any amino acid
  Variant (6)..(6): Xaa in position 6 is any amino acid
  Variant (7)..(7): Xaa in position 7 is Ile or Val
  Variant (9)..(10): Xaa in position 9 to 10 is any amino acid
  Variant (11)..(11): Xaa in position 11 is Asp, Glu, Ser or Thr
  Variant (13)..(14): Xaa in position 13 to 14 is any amino acid
  Variant (15)..(19): Xaa in position 15 to 19 is any or no amino acid
PXXWHXXEXXXDXXXXXXXF

SEQ ID NO: 50752 - DNA, 1113 bp, Saccharomyces cerevisiae; identical to SEQ ID NO: 1363
  CDS (1)..(1113)

SEQ ID NO: 50753 - protein, 370 aa, Saccharomyces cerevisiae; identical to SEQ ID NO: 1364

SEQ ID NO: 50754 - DNA, 1086 bp, Deinococcus radiodurans; identical to SEQ ID NO: 1327
  CDS (1)..(1086)

SEQ ID NO: 50755 - protein, 361 aa, Deinococcus radiodurans; identical to SEQ ID NO: 1328

SEQ ID NO: 50756 - DNA, 1071 bp, Salmonella enterica subsp. enterica serovar Typhi; identical to SEQ ID NO: 2245
  CDS (1)..(1071)

SEQ ID NO: 50757 - protein, 356 aa, Salmonella enterica subsp. enterica serovar Typhi; identical to SEQ ID NO: 2246

SEQ ID NO: 50758 - DNA, 1071 bp, Yersinia pestis; identical to SEQ ID NO: 2247
  CDS (1)..(1071)

SEQ ID NO: 50759 - protein, 356 aa, Yersinia pestis; identical to SEQ ID NO: 2248

SEQ ID NO: 50760 - DNA, 1047 bp, Yersinia pestis; identical to SEQ ID NO: 1331
  CDS (1)..(1047)

SEQ ID NO: 50761 - protein, 348 aa, Yersinia pestis; identical to SEQ ID NO: 1332

SEQ ID NO: 50762 - DNA, 1053 bp, Escherichia coli; identical to SEQ ID NO: 2251
  CDS (1)..(1053)

SEQ ID NO: 50763 - protein, 350 aa, Escherichia coli; identical to SEQ ID NO: 1580

SEQ ID NO: 50764 - DNA, 1071 bp, Escherichia coli; identical to SEQ ID NO: 1333
  CDS (1)..(1071)

SEQ ID NO: 50765 - protein, 356 aa, Escherichia coli; identical to SEQ ID NO: 1334

SEQ ID NO: 50766 - DNA, 1131 bp, Nostoc sp. PCC 7120; identical to SEQ ID NO: 1335
  CDS (1)..(1131)

SEQ ID NO: 50767 - protein, 376 aa, Nostoc sp. PCC 7120; identical to SEQ ID NO: 1336

SEQ ID NO: 50768 - DNA, 1053 bp, Salmonella enterica subsp. enterica serovar Typhi; identical to SEQ ID NO: 1337
  CDS (1)..(1053)

SEQ ID NO: 50769 - protein, 350 aa, Salmonella enterica subsp. enterica serovar Typhi; identical to SEQ ID NO: 1338

SEQ ID NO: 50770 - DNA, 1077 bp, Pseudomonas aeruginosa; identical to SEQ ID NO: 1339
  CDS (1)..(1077)

SEQ ID NO: 50771 - protein, 358 aa, Pseudomonas aeruginosa; identical to SEQ ID NO: 1340

SEQ ID NO: 50772 - DNA, 1074 bp, Vibrio cholerae; identical to SEQ ID NO: 1343
  CDS (1)..(1074)

SEQ ID NO: 50773 - protein, 357 aa, Vibrio cholerae; identical to SEQ ID NO: 1344

SEQ ID NO: 50774 - DNA, 1038 bp, Lactococcus lactis subsp. lactis; identical to SEQ ID NO: 1345
  CDS (1)..(1038)

SEQ ID NO: 50775 - protein, 345 aa, Lactococcus lactis subsp. lactis; identical to SEQ ID NO: 1346

SEQ ID NO: 50776 - DNA, 1023 bp, Lactococcus lactis subsp. lactis; identical to SEQ ID NO: 1347
  CDS (1)..(1023)

SEQ ID NO: 50777 - protein, 340 aa, Lactococcus lactis subsp. lactis; identical to SEQ ID NO: 1348

SEQ ID NO: 50778 - DNA, 1032 bp, Streptococcus pneumoniae; identical to SEQ ID NO: 1349
  CDS (1)..(1032)

SEQ ID NO: 50779 - protein, 343 aa, Streptococcus pneumoniae; identical to SEQ ID NO: 1350

SEQ ID NO: 50780 - DNA, 1056 bp, Neisseria meningitidis; identical to SEQ ID NO: 2269
  CDS (1)..(1056)

SEQ ID NO: 50781 - protein, 351 aa, Neisseria meningitidis; identical to SEQ ID NO: 2270

SEQ ID NO: 50782 - DNA, 1095 bp, Pseudomonas aeruginosa; identical to SEQ ID NO: 1351
  CDS (1)..(1095)

SEQ ID NO: 50783 - protein, 364 aa, Pseudomonas aeruginosa; identical to SEQ ID NO: 1352

SEQ ID NO: 50784 - DNA, 1032 bp, Streptococcus pneumoniae; identical to SEQ ID NO: 1355
  CDS (1)..(1032)

SEQ ID NO: 50785 - protein, 343 aa, Streptococcus pneumoniae; identical to SEQ ID NO: 1356

SEQ ID NO: 50786 - DNA, 1143 bp, Xylella fastidiosa; identical to SEQ ID NO: 1603
  CDS (1)..(1143)

SEQ ID NO: 50787 - protein, 380 aa, Xylella fastidiosa; identical to SEQ ID NO: 1604

SEQ ID NO: 50788 - DNA, 1047 bp, Buchnera aphidicola; identical to SEQ ID NO: 1357
  CDS (1)..(1047)

SEQ ID NO: 50789 - protein, 348 aa, Buchnera aphidicola; identical to SEQ ID NO: 1358

SEQ ID NO: 50790 - DNA, 1104 bp, Corynebacterium glutamicum; identical to SEQ ID NO: 2279
  CDS (1)..(1104)

SEQ ID NO: 50791 - protein, 367 aa, Corynebacterium glutamicum; identical to SEQ ID NO: 2280

SEQ ID NO: 50792 - DNA, 1089 bp, Haemophilus influenzae; identical to SEQ ID NO: 1359
  CDS (1)..(1089)

SEQ ID NO: 50793 - protein, 362 aa, Haemophilus influenzae; identical to SEQ ID NO: 1360

SEQ ID NO: 50794 - DNA, 1502 bp, Candida albicans; identical to SEQ ID NO: 1361
  CDS (336)..(1442)

SEQ ID NO: 50795 - protein, 368 aa, Candida albicans; identical to SEQ ID NO: 1362

SEQ ID NO: 50796 - DNA, 2048 bp, Saccharomyces cerevisiae; identical to SEQ ID NO: 1365
  CDS (619)..(1731)

SEQ ID NO: 50797 - protein, 370 aa, Saccharomyces cerevisiae; identical to SEQ ID NO: 1366

SEQ ID NO: 50798 - DNA, 1107 bp, Schizosaccharomyces pombe; identical to SEQ ID NO: 1367
  CDS (1)..(1107)

SEQ ID NO: 50799 - protein, 368 aa, Schizosaccharomyces pombe; identical to SEQ ID NO: 1368

SEQ ID NO: 50800 - DNA, 1089 bp, Amycolatopsis orientalis; identical to SEQ ID NO: 1369
  CDS (1)..(1089)

SEQ ID NO: 50801 - protein, 362 aa, Amycolatopsis orientalis; identical to SEQ ID NO: 1370

SEQ ID NO: 50802 - DNA, 1119 bp, Schizosaccharomyces pombe; identical to SEQ ID NO: 1371
  CDS (1)..(1119)

SEQ ID NO: 50803 - protein, 372 aa, Schizosaccharomyces pombe; identical to SEQ ID NO: 1372

SEQ ID NO: 50804 - DNA, 1083 bp, Methylophilus methylotrophus; identical to SEQ ID NO: 1375
  CDS (1)..(1083)

SEQ ID NO: 50805 - protein, 360 aa, Methylophilus methylotrophus; identical to SEQ ID NO: 1376

SEQ ID NO: 50806 - DNA, 1770 bp, Debaryomyces hansenii; identical to SEQ ID NO: 2295
  CDS (1)..(1770)

SEQ ID NO: 50807 - protein, 589 aa, Debaryomyces hansenii; identical to SEQ ID NO: 2296

SEQ ID NO: 50808 - DNA, 1107 bp, Debaryomyces hansenii; identical to SEQ ID NO: 1377
  CDS (1)..(1107)

SEQ ID NO: 50809 - protein, 368 aa, Debaryomyces hansenii; identical to SEQ ID NO: 1378

SEQ ID NO: 50810 - DNA, 1074 bp, Yarrowia lipolytica; identical to SEQ ID NO: 1379
  CDS (1)..(1074)

SEQ ID NO: 50811 - protein, 357 aa, Yarrowia lipolytica; identical to SEQ ID NO: 1380

SEQ ID NO: 50812 - DNA, 1089 bp, Yarrowia lipolytica; identical to SEQ ID NO: 1381
  CDS (1)..(1089)

SEQ ID NO: 50813 - protein, 362 aa, Yarrowia lipolytica; identical to SEQ ID NO: 1382

SEQ ID NO: 50814 - DNA, 1119 bp, Kluyveromyces lactis; identical to SEQ ID NO: 1383
  CDS (1)..(1119)

SEQ ID NO: 50815 - protein, 372 aa, Kluyveromyces lactis; identical to SEQ ID NO: 1384

SEQ ID NO: 50816 - DNA, 1095 bp, Kluyveromyces lactis; identical to SEQ ID NO: 1385
  CDS (1)..(1095)

SEQ ID NO: 50817 - protein, 364 aa, Kluyveromyces lactis; identical to SEQ ID NO: 1386

SEQ ID NO: 50818 - DNA, 1074 bp, Erwinia carotovora subsp; identical to SEQ ID NO: 1387
  CDS (1)..(1074)

SEQ ID NO: 50819 - protein, 357 aa, Erwinia carotovora subsp; identical to SEQ ID NO: 1388

SEQ ID NO: 50820 - DNA, 1047 bp, Erwinia carotovora subsp; identical to SEQ ID NO: 1389
  CDS (1)..(1047)

SEQ ID NO: 50821 - protein, 348 aa, Erwinia carotovora subsp; identical to SEQ ID NO: 1390

SEQ ID NO: 50822 - DNA, 1056 bp, Erwinia carotovora subsp; identical to SEQ ID NO: 1391
  CDS (1)..(1056)

SEQ ID NO: 50823 - protein, 351 aa, Erwinia carotovora subsp; identical to SEQ ID NO: 1392

SEQ ID NO: 50824 - DNA, 1113 bp, Acinetobacter sp; identical to SEQ ID NO: 1393
  CDS (1)..(1113)

SEQ ID NO: 50825 - protein, 370 aa, Acinetobacter sp; identical to SEQ ID NO: 1394

SEQ ID NO: 50826 - DNA, 1056 bp, Acinetobacter sp; identical to SEQ ID NO: 1395
  CDS (1)..(1056)

SEQ ID NO: 50827 - protein, 351 aa, Acinetobacter sp; identical to SEQ ID NO: 1396

SEQ ID NO: 50828 - DNA, 1119 bp, Candida glabrata; identical to SEQ ID NO: 1397
  CDS (1)..(1119)

SEQ ID NO: 50829 - protein, 372 aa, Candida glabrata; identical to SEQ ID NO: 1398

SEQ ID NO: 50830 - DNA, 1071 bp, Candida glabrata; identical to SEQ ID NO: 1399
  CDS (1)..(1071)

SEQ ID NO: 50831 - protein, 356 aa, Candida glabrata; identical to SEQ ID NO: 1400

SEQ ID NO: 50832 - DNA, 1083 bp, Photobacterium profundum; identical to SEQ ID NO: 1401
  CDS (1)..(1083)

SEQ ID NO: 50833 - protein, 360 aa, Photobacterium profundum; identical to SEQ ID NO: 1402

SEQ ID NO: 50834 - DNA, 1053 bp, Photobacterium profundum; identical to SEQ ID NO: 1403
  CDS (1)..(1053)

SEQ ID NO: 50835 - protein, 350 aa, Photobacterium profundum; identical to SEQ ID NO: 1404

SEQ ID NO: 50836 - DNA, 1113 bp, Photobacterium profundum; identical to SEQ ID NO: 1405
  CDS (1)..(1113)

SEQ ID NO: 50837 - protein, 370 aa, Photobacterium profundum; identical to SEQ ID NO: 1406

SEQ ID NO: 50838 - DNA, 1056 bp, Photobacterium profundum; identical to SEQ ID NO: 1407
  CDS (1)..(1056)

SEQ ID NO: 50839 - protein, 351 aa, Photobacterium profundum; identical to SEQ ID NO: 1408

SEQ ID NO: 50840 - DNA, 1092 bp, Parachlamydia sp; identical to SEQ ID NO: 1409
  CDS (1)..(1092)

SEQ ID NO: 50841 - protein, 363 aa, Parachlamydia sp; identical to SEQ ID NO: 1410

SEQ ID NO: 50842 - DNA, 1095 bp, Rhodopseudomonas palustris; identical to SEQ ID NO: 1411
  CDS (1)..(1095)

SEQ ID NO: 50843 - protein, 364 aa, Rhodopseudomonas palustris; identical to SEQ ID NO: 1412

SEQ ID NO: 50844 - DNA, 1100 bp, Amycolatopsis methanolica; identical to SEQ ID NO: 1413
  CDS (1)..(1086)

SEQ ID NO: 50845 - protein, 361 aa, Amycolatopsis methanolica; identical to SEQ ID NO: 1414

SEQ ID NO: 50846 - DNA, 1071 bp, Treponema denticola; identical to SEQ ID NO: 1415
  CDS (1)..(1071)

SEQ ID NO: 50847 - protein, 356 aa, Treponema denticola; identical to SEQ ID NO: 1416

SEQ ID NO: 50848 - DNA, 1068 bp, Geobacter sulfurreducens; identical to SEQ ID NO: 1417
  CDS (1)..(1068)

SEQ ID NO: 50849 - protein, 355 aa, Geobacter sulfurreducens; identical to SEQ ID NO: 1418

SEQ ID NO: 50850 - DNA, 1095 bp, Ashbya gossypii; identical to SEQ ID NO: 1419
  CDS (1)..(1095)

SEQ ID NO: 50851 - protein, 364 aa, Ashbya gossypii; identical to SEQ ID NO: 1420

SEQ ID NO: 50852 - DNA, 1122 bp, Ashbya gossypii; identical to SEQ ID NO: 1421
  CDS (1)..(1122)

SEQ ID NO: 50853 - protein, 373 aa, Ashbya gossypii; identical to SEQ ID NO: 1422

SEQ ID NO: 50854 - DNA, 1098 bp, Amycolatopsis balhimycina; identical to SEQ ID NO: 1423
  CDS (1)..(1098)

SEQ ID NO: 50855 - protein, 365 aa, Amycolatopsis balhimycina; identical to SEQ ID NO: 1424

SEQ ID NO: 50856 - DNA, 1053 bp, Vibrio vulnificus; identical to SEQ ID NO: 2345
  CDS (1)..(1053)

SEQ ID NO: 50857 - protein, 350 aa, Vibrio vulnificus; identical to SEQ ID NO: 2346

SEQ ID NO: 50858 - DNA, 1047 bp, Photorhabdus luminescens; identical to SEQ ID NO: 1427
  CDS (1)..(1047)

SEQ ID NO: 50859 - protein, 348 aa, Photorhabdus luminescens; identical to SEQ ID NO: 1428

SEQ ID NO: 50860 - DNA, 1053 bp, Photorhabdus luminescens; identical to SEQ ID NO: 1429
  CDS (1)..(1053)

SEQ ID NO: 50861 - protein, 350 aa, Photorhabdus luminescens; identical to SEQ ID NO: 1430

SEQ ID NO: 50862 - DNA, 1095 bp, Photorhabdus luminescens; identical to SEQ ID NO: 1431
  CDS (1)..(1095)

SEQ ID NO: 50863 - protein, 364 aa, Photorhabdus luminescens; identical to SEQ ID NO: 1432

SEQ ID NO: 50864 - DNA, 1119 bp, Gloeobacter violaceus; identical to SEQ ID NO: 1433
  CDS (1)..(1119)

SEQ ID NO: 50865 - protein, 372 aa, Gloeobacter violaceus; identical to SEQ ID NO: 1434

SEQ ID NO: 50866 - DNA, 1107 bp, Chromobacterium violaceum; identical to SEQ ID NO: 1435
  CDS (1)..(1107)

SEQ ID NO: 50867 - protein, 368 aa, Chromobacterium violaceum; identical to SEQ ID NO: 1436

SEQ ID NO: 50868 - DNA, 1059 bp, Chromobacterium violaceum; identical to SEQ ID NO: 1437
  CDS (1)..(1059)

SEQ ID NO: 50869 - protein, 352 aa, Chromobacterium violaceum; identical to SEQ ID NO: 1438

SEQ ID NO: 50870 - DNA, 1140 bp, Neurospora crassa; identical to SEQ ID NO: 1439
  CDS (1)..(1140)

SEQ ID NO: 50871 - protein, 379 aa, Neurospora crassa; identical to SEQ ID NO: 1440

SEQ ID NO: 50872 - DNA, 1092 bp, Neurospora crassa; identical to SEQ ID NO: 1441
  CDS (1)..(1092)

SEQ ID NO: 50873 - protein, 363 aa, Neurospora crassa; identical to SEQ ID NO: 1442

SEQ ID NO: 50874 - DNA, 1068 bp, Synechococcus sp; identical to SEQ ID NO: 1443
  CDS (1)..(1068)

SEQ ID NO: 50875 - protein, 355 aa, Synechococcus sp; identical to SEQ ID NO: 1444

SEQ ID NO: 50876 - DNA, 1053 bp, Rhodopirellula baltica; identical to SEQ ID NO: 1445
  CDS (1)..(1053)

SEQ ID NO: 50877 - protein, 350 aa, Rhodopirellula baltica; identical to SEQ ID NO: 1446

SEQ ID NO: 50878 - DNA, 1068 bp, Prochlorococcus marinus subsp; identical to SEQ ID NO: 1447
  CDS (1)..(1068)

SEQ ID NO: 50879 - protein, 355 aa, Prochlorococcus marinus subsp; identical to SEQ ID NO: 1448

SEQ ID NO: 50880 - DNA, 1083 bp, Prochlorococcus marinus; identical to SEQ ID NO: 1449
  CDS (1)..(1083)

SEQ ID NO: 50881 - protein, 360 aa, Prochlorococcus marinus; identical to SEQ ID NO: 1450

SEQ ID NO: 50882 - DNA, 1074 bp, Prochlorococcus marinus; identical to SEQ ID NO: 1451
  CDS (1)..(1074)

SEQ ID NO: 50883 - protein, 357 aa, Prochlorococcus marinus; identical to SEQ ID NO: 1452

SEQ ID NO: 50884 - DNA, 1113 bp, Haemophilus ducreyi; identical to SEQ ID NO: 1453
  CDS (1)..(1113)

SEQ ID NO: 50885 - protein, 370 aa, Haemophilus ducreyi; identical to SEQ ID NO: 1454

SEQ ID NO: 50886 - DNA, 1080 bp, Haemophilus ducreyi; identical to SEQ ID NO: 1455
  CDS (1)..(1080)

SEQ ID NO: 50887 - protein, 359 aa, Haemophilus ducreyi; identical to SEQ ID NO: 1456

SEQ ID NO: 50888 - DNA, 1086 bp, Candidatus Blochmannia floridanus; identical to SEQ ID NO: 1457
  CDS (1)..(1086)

SEQ ID NO: 50889 - protein, 361 aa, Candidatus Blochmannia floridanus; identical to SEQ ID NO: 1458

SEQ ID NO: 50890 - DNA, 1074 bp, Bordetella pertussis; identical to SEQ ID NO: 2379
  CDS (1)..(1074)

SEQ ID NO: 50891 - protein, 357 aa, Bordetella pertussis; identical to SEQ ID NO: 1460

SEQ ID NO: 50892 - DNA, 1119 bp, Bordetella bronchiseptica; identical to SEQ ID NO: 1461
  CDS (1)..(1119)

SEQ ID NO: 50893 - protein, 372 aa, Bordetella bronchiseptica; identical to SEQ ID NO: 1462

SEQ ID NO: 50894 - DNA, 1179 bp, Nitrosomonas europaea; identical to SEQ ID NO: 1463
  CDS (1)..(1179)

SEQ ID NO: 50895 - protein, 392 aa, Nitrosomonas europaea; identical to SEQ ID NO: 1464

SEQ ID NO: 50896 - DNA, 1083 bp, Coxiella burnetii; identical to SEQ ID NO: 1465
  CDS (1)..(1083)

SEQ ID NO: 50897 - protein, 360 aa, Coxiella burnetii; identical to SEQ ID NO: 1466

SEQ ID NO: 50898 - DNA, 1053 bp, Vibrio parahaemolyticus; identical to SEQ ID NO: 1471
  CDS (1)..(1053)

SEQ ID NO: 50899 - protein, 350 aa, Vibrio parahaemolyticus; identical to SEQ ID NO: 1472

SEQ ID NO: 50900 - DNA, 1053 bp, Vibrio parahaemolyticus; identical to SEQ ID NO: 1473
  CDS (1)..(1053)

SEQ ID NO: 50901 - protein, 350 aa, Vibrio parahaemolyticus; identical to SEQ ID NO: 1474

SEQ ID NO: 50902 - DNA, 1074 bp, Vibrio parahaemolyticus; identical to SEQ ID NO: 1475
  CDS (1)..(1074)

SEQ ID NO: 50903 - protein, 357 aa, Vibrio parahaemolyticus; identical to SEQ ID NO: 1476

SEQ ID NO: 50904 - DNA, 1083 bp, Pseudomonas syringae; identical to SEQ ID NO: 1477
  CDS (1)..(1083)

SEQ ID NO: 50905 - protein, 360 aa, Pseudomonas syringae; identical to SEQ ID NO: 1478

SEQ ID NO: 50906 - DNA, 1077 bp, Pseudomonas syringae; identical to SEQ ID NO: 1479
  CDS (1)..(1077)

SEQ ID NO: 50907 - protein, 358 aa, Pseudomonas syringae; identical to SEQ ID NO: 1480

SEQ ID NO: 50908 - DNA, 1062 bp, Pseudomonas putida; identical to SEQ ID NO: 1481
  CDS (1)..(1062)

SEQ ID NO: 50909 - protein, 353 aa, Pseudomonas putida; identical to SEQ ID NO: 1482

SEQ ID NO: 50910 - DNA, 1113 bp, Pseudomonas putida; identical to SEQ ID NO: 1483
  CDS (1)..(1113)

SEQ ID NO: 50911 - protein, 370 aa, Pseudomonas putida; identical to SEQ ID NO: 1484

SEQ ID NO: 50912 - DNA, 1086 bp, Bradyrhizobium japonicum; identical to SEQ ID NO: 1485
  CDS (1)..(1086)

SEQ ID NO: 50913 - protein, 361 aa, Bradyrhizobium japonicum; identical to SEQ ID NO: 1486

SEQ ID NO: 50914 - DNA, 1053 bp, Yersinia pestis; identical to SEQ ID NO: 1487
  CDS (1)..(1053)

SEQ ID NO: 50915 - protein, 350 aa, Yersinia pestis; identical to SEQ ID NO: 1488

SEQ ID NO: 50916 - DNA, 1038 bp, Wigglesworthia glossinidia brevipalpis; identical to SEQ ID NO: 1491
  CDS (1)..(1038)

SEQ ID NO: 50917 - protein, 345 aa, Wigglesworthia glossinidia brevipalpis; identical to SEQ ID NO: 1492

SEQ ID NO: 50918 - DNA, 1071 bp, Vibrio vulnificus; identical to SEQ ID NO: 1739
  CDS (1)..(1071)

SEQ ID NO: 50919 - protein, 356 aa, Vibrio vulnificus; identical to SEQ ID NO: 1740

SEQ ID NO: 50920 - DNA, 1053 bp, Vibrio vulnificus; identical to SEQ ID NO: 1493
  CDS (1)..(1053)

SEQ ID NO: 50921 - protein, 350 aa, Vibrio vulnificus; identical to SEQ ID NO: 1494

SEQ ID NO: 50922 - DNA, 1071 bp, Vibrio vulnificus; identical to SEQ ID NO: 1497
  CDS (1)..(1071)

SEQ ID NO: 50923 - protein, 356 aa, Vibrio vulnificus; identical to SEQ ID NO: 1498

SEQ ID NO: 50924 - DNA, 1062 bp, Synechococcus elongatus; identical to SEQ ID NO: 1499
  CDS (1)..(1062)

SEQ ID NO: 50925 - protein, 353 aa, Synechococcus elongatus; identical to SEQ ID NO: 1500

SEQ ID NO: 50926 - DNA, 1032 bp, Streptococcus mutans; identical to SEQ ID NO: 1501
  CDS (1)..(1032)

SEQ ID NO: 50927 - protein, 343 aa, Streptococcus mutans; identical to SEQ ID NO: 1502

SEQ ID NO: 50928 - DNA, 1035 bp, Streptococcus mutans; identical to SEQ ID NO: 1503
  CDS (1)..(1035)

SEQ ID NO: 50929 - protein, 344 aa, Streptococcus mutans; identical to SEQ ID NO: 1504

SEQ ID NO: 50930 - DNA, 1008 bp, Streptococcus agalactiae; identical to SEQ ID NO: 1505
  CDS (1)..(1008)

SEQ ID NO: 50931 - protein, 335 aa, Streptococcus agalactiae; identical to SEQ ID NO: 1506

SEQ ID NO: 50932 - DNA, 1065 bp, Shewanella oneidensis; identical to SEQ ID NO: 1507
  CDS (1)..(1065)

SEQ ID NO: 50933 - protein, 354 aa, Shewanella oneidensis; identical to SEQ ID NO: 1508

SEQ ID NO: 50934 - DNA, 1092 bp, Shewanella oneidensis; identical to SEQ ID NO: 1509
  CDS (1)..(1092)

SEQ ID NO: 50935 - protein, 363 aa, Shewanella oneidensis; identical to SEQ ID NO: 1510

SEQ ID NO: 50936 - DNA, 1059 bp, Shewanella oneidensis; identical to SEQ ID NO: 1511
  CDS (1)..(1059)

SEQ ID NO: 50937 - protein, 352 aa, Shewanella oneidensis; identical to SEQ ID NO: 1512

SEQ ID NO: 50938 - DNA, 1170 bp, Corynebacterium efficiens; identical to SEQ ID NO: 1515
  CDS (1)..(1170)

SEQ ID NO: 50939 - protein, 389 aa, Corynebacterium efficiens; identical to SEQ ID NO: 1516

SEQ ID NO: 50940 - DNA, 1134 bp, Bifidobacterium longum; identical to SEQ ID NO: 1517
  CDS (1)..(1134)

SEQ ID NO: 50941 - protein, 377 aa, Bifidobacterium longum; identical to SEQ ID NO: 1518

SEQ ID NO: 50942 - DNA, 1233 bp, Bifidobacterium longum; identical to SEQ ID NO: 1519
  CDS (1)..(1233)

SEQ ID NO: 50943 - protein, 410 aa, Bifidobacterium longum; identical to SEQ ID NO: 1520

SEQ ID NO: 50944 - DNA, 1221 bp, Phytophthora infestans; identical to SEQ ID NO: 1521
  CDS (20)..(1153)

SEQ ID NO: 50945 - protein, 377 aa, Phytophthora infestans; identical to SEQ ID NO: 1522

SEQ ID NO: 50946 - DNA, 1062 bp, Chlorobium tepidum; identical to SEQ ID NO: 1523
  CDS (1)..(1062)

SEQ ID NO: 50947 - protein, 353 aa, Chlorobium tepidum; identical to SEQ ID NO: 1524

SEQ ID NO: 50948 - DNA, 1074 bp, Xanthomonas campestris; identical to SEQ ID NO: 1525
  CDS (1)..(1074)

SEQ ID NO: 50949 - protein, 357 aa, Xanthomonas campestris; identical to SEQ ID NO: 1526

SEQ ID NO: 50950 - DNA, 1074 bp, Xanthomonas axonopodis; identical to SEQ ID NO: 1527
  CDS (1)..(1074)

SEQ ID NO: 50951 - protein, 357 aa, Xanthomonas axonopodis; identical to SEQ ID NO: 1528

SEQ ID NO: 50952 - DNA, 1080 bp, Ralstonia solanacearum; identical to SEQ ID NO: 1529
  CDS (1)..(1080)

SEQ ID NO: 50953 - protein, 359 aa, Ralstonia solanacearum; identical to SEQ ID NO: 1530

SEQ ID NO: 50954 - DNA, 1179 bp, Ralstonia solanacearum; identical to SEQ ID NO: 1531
  CDS (1)..(1179)

SEQ ID NO: 50955 - protein, 392 aa, Ralstonia solanacearum; identical to SEQ ID NO: 1532

SEQ ID NO: 50956 - DNA, 1065 bp, Synechococcus sp; identical to SEQ ID NO: 1533
  CDS (1)..(1065)

SEQ ID NO: 50957 - protein, 354 aa, Synechococcus sp; identical to SEQ ID NO: 1534

SEQ ID NO: 50958 - DNA, 1035 bp, Escherichia coli; identical to SEQ ID NO: 1535
  CDS (1)..(1035)

SEQ ID NO: 50959 - protein, 344 aa, Escherichia coli; identical to SEQ ID NO: 1536

SEQ ID NO: 50960 - DNA, 1200 bp, Stigmatella aurantiaca; identical to SEQ ID NO: 1537
  CDS (62)..(1147)

SEQ ID NO: 50961 - protein, 361 aa, Stigmatella aurantiaca; identical to SEQ ID NO: 1538

SEQ ID NO: 50962 - DNA, 1083 bp, Amycolatopsis mediterranei; identical to SEQ ID NO: 1541
  CDS (1)..(1083)

SEQ ID NO: 50963 - protein, 360 aa, Amycolatopsis mediterranei; identical to SEQ ID NO: 1542

SEQ ID NO: 50964 - DNA, 1053 bp, Pasteurella multocida; identical to SEQ ID NO: 1543
  CDS (1)..(1053)

SEQ ID NO: 50965 - protein, 350 aa, Pasteurella multocida; identical to SEQ ID NO: 1544

SEQ ID NO: 50966 - DNA, 1086 bp, Pasteurella multocida; identical to SEQ ID NO: 1545
  CDS (1)..(1086)

SEQ ID NO: 50967 - protein, 361 aa, Pasteurella multocida; identical to SEQ ID NO: 1546

SEQ ID NO: 50968 - DNA, 1125 bp, Emericella nidulans; identical to SEQ ID NO: 1547
  CDS (1)..(1125)

SEQ ID NO: 50969 - protein, 374 aa, Emericella nidulans; identical to SEQ ID NO: 1548

SEQ ID NO: 50970 - DNA, 1089 bp, Emericella nidulans; identical to SEQ ID NO: 1549
  CDS (1)..(1089)

SEQ ID NO: 50971 - protein, 362 aa, Emericella nidulans; identical to SEQ ID NO: 1550

SEQ ID NO: 50972 - DNA, 1239 bp, Vibrio cholerae; identical to SEQ ID NO: 1551
  CDS (114)..(1175)

SEQ ID NO: 50973 - protein, 353 aa, Vibrio cholerae; identical to SEQ ID NO: 1552

SEQ ID NO: 50974 - DNA, 2184 bp, Candida albicans; identical to SEQ ID NO: 1553
  CDS (461)..(1573)

SEQ ID NO: 50975 - protein, 370 aa, Candida albicans; identical to SEQ ID NO: 1554

SEQ ID NO: 50976 - DNA, 1047 bp, Buchnera aphidicola; identical to SEQ ID NO: 1555
  CDS (1)..(1047)

SEQ ID NO: 50977 - protein, 348 aa, Buchnera aphidicola; identical to SEQ ID NO: 1556

SEQ ID NO: 50978 - DNA, 1047 bp, Buchnera aphidicola; identical to SEQ ID NO: 1557
  CDS (1)..(1047)

SEQ ID NO: 50979 - protein, 348 aa, Buchnera aphidicola; identical to SEQ ID NO: 1558

SEQ ID NO: 50980 - DNA, 1047 bp, Erwinia herbicola; identical to SEQ ID NO: 1559
  CDS (1)..(1047)

SEQ ID NO: 50981 - protein, 348 aa, Erwinia herbicola; identical to SEQ ID NO: 1560

SEQ ID NO: 50982 - DNA, 1047 bp, Salmonella typhimurium; identical to SEQ ID NO: 1561
  CDS (1)..(1047)

SEQ ID NO: 50983 - protein, 348 aa, Salmonella typhimurium; identical to SEQ ID NO: 1562

SEQ ID NO: 50984 - DNA, 1047 bp, Shigella flexneri; identical to SEQ ID NO: 2473
  CDS (1)..(1047)

SEQ ID NO: 50985 - protein, 348 aa, Shigella flexneri; identical to SEQ ID NO: 2474

SEQ ID NO: 50986 - DNA, 25 bp, Artificial sequence
  Primer sequence
atgttcattaaaaacgatcacgccg

SEQ ID NO: 50987 - DNA, 25 bp, Artificial sequence
  Primer sequence
ctattttttcaaggcctttcttctg

SEQ ID NO: 50988 - protein, 353 aa, Artificial sequence; identical to SEQ ID NO: 24922
  Consensus
  Variant (2)..(3): Xaa in position 2 to 3 is any amino acid
  Variant (5)..(11): Xaa in position 5 to 11 is any amino acid
  Variant (13)..(24): Xaa in position 13 to 24 is any amino acid
  Variant (26)..(30): Xaa in position 26 to 30 is any amino acid
  Variant (32)..(33): Xaa in position 32 to 33 is any amino acid
  Variant (35)..(35): Xaa in position 35 is any amino acid
  Variant (37)..(37): Xaa in position 37 is any amino acid
  Variant (39)..(46): Xaa in position 39 to 46 is any amino acid
  Variant (51)..(51): Xaa in position 51 is any amino acid
  Variant (54)..(56): Xaa in position 54 to 56 is any amino acid
  Variant (58)..(59): Xaa in position 58 to 59 is any amino acid
  Variant (62)..(63): Xaa in position 62 to 63 is any amino acid
  Variant (65)..(76): Xaa in position 65 to 76 is any amino acid
  Variant (78)..(80): Xaa in position 78 to 80 is any amino acid
  Variant (83)..(83): Xaa in position 83 is any amino acid
  Variant (85)..(85): Xaa in position 85 is any amino acid
  Variant (91)..(93): Xaa in position 91 to 93 is any amino acid
  Variant (100)..(100): Xaa in position 100 is any amino acid
  Variant (103)..(112): Xaa in position 103 to 112 is any amino acid
  Variant (115)..(117): Xaa in position 115 to 117 is any amino acid
  Variant (119)..(119): Xaa in position 119 is any amino acid
  Variant (121)..(130): Xaa in position 121 to 130 is any amino acid
  Variant (132)..(132): Xaa in position 132 is any amino acid
  Variant (134)..(134): Xaa in position 134 is any amino acid
  Variant (136)..(136): Xaa in position 136 is any amino acid
  Variant (139)..(142): Xaa in position 139 to 142 is any amino acid
  Variant (144)..(146): Xaa in position 144 to 146 is any amino acid
  Variant (148)..(152): Xaa in position 148 to 152 is any amino acid
  Variant (163)..(163): Xaa in position 163 is any amino acid
  Variant (166)..(168): Xaa in position 166 to 168 is any amino acid
  Variant (171)..(171): Xaa in position 171 is any amino acid
  Variant (174)..(174): Xaa in position 174 is any amino acid
  Variant (176)..(176): Xaa in position 176 is any amino acid
  Variant (181)..(181): Xaa in position 181 is any amino acid
  Variant (183)..(183): Xaa in position 183 is any amino acid
  Variant (185)..(188): Xaa in position 185 to 188 is any amino acid
  Variant (190)..(191): Xaa in position 190 to 191 is any amino acid
  Variant (193)..(195): Xaa in position 193 to 195 is any amino acid
  Variant (197)..(199): Xaa in position 197 to 199 is any amino acid
  Variant (201)..(201): Xaa in position 201 is any amino acid
  Variant (203)..(208): Xaa in position 203 to 208 is any amino acid
  Variant (210)..(215): Xaa in position 210 to 215 is any amino acid
  Variant (217)..(217): Xaa in position 217 is any amino acid
  Variant (220)..(222): Xaa in position 220 to 222 is any amino acid
  Variant (224)..(225): Xaa in position 224 to 225 is any amino acid
  Variant (230)..(238): Xaa in position 230 to 238 is any amino acid
  Variant (241)..(269): Xaa in position 241 to 269 is any amino acid
  Variant (271)..(271): Xaa in position 271 is any amino acid
  Variant (274)..(274): Xaa in position 274 is any amino acid
  Variant (277)..(277): Xaa in position 277 is any amino acid
  Variant (279)..(282): Xaa in position 279 to 282 is any amino acid
  Variant (284)..(285): Xaa in position 284 to 285 is any amino acid
  Variant (287)..(292): Xaa in position 287 to 292 is any amino acid
  Variant (294)..(296): Xaa in position 294 to 296 is any amino acid
  Variant (298)..(305): Xaa in position 298 to 305 is any amino acid
  Variant (307)..(307): Xaa in position 307 is any amino acid
  Variant (309)..(309): Xaa in position 309 is any amino acid
  Variant (312)..(315): Xaa in position 312 to 315 is any amino acid
  Variant (317)..(317): Xaa in position 317 is any amino acid
  Variant (319)..(334): Xaa in position 319 to 334 is any amino acid
  Variant (337)..(337): Xaa in position 337 is any amino acid
  Variant (339)..(339): Xaa in position 339 is any amino acid
  Variant (342)..(342): Xaa in position 342 is any amino acid
  Variant (344)..(345): Xaa in position 344 to 345 is any amino acid
  Variant (347)..(348): Xaa in position 347 to 348 is any amino acid
  Variant (350)..(352): Xaa in position 350 to 352 is any amino acid

SEQ ID NO: 50989 - protein, 72 aa, Artificial sequence; identical to SEQ ID NO: 2906
  Consensus
  Variant (5)..(5): Xaa in position 5 is Ile, Val, Ser or Leu
  Variant (6)..(6): Xaa in position 6 is His or Asp
  Variant (7)..(7): Xaa in position 7 is Asp or Asn
  Variant (8)..(10): Xaa in position 8 to 10 is any amino acid
  Variant (11)..(11): Xaa in position 11 is Ala, Val or Gly
  Variant (12)..(12): Xaa in position 12 is any amino acid
  Variant (13)..(13): Xaa in position 13 is Glu, Asp, Ala or Gln
  Variant (15)..(15): Xaa in position 15 is Ala, Gly or Cys
  Variant (16)..(17): Xaa in position 16 to 17 is any amino acid
  Variant (18)..(18): Xaa in position 18 is Leu, Ile or Phe
  Variant (19)..(28): Xaa in position 19 to 28 is any amino acid
  Variant (29)..(30): Xaa in position 29 to 30 is any or no amino acid
  Variant (31)..(31): Xaa in position 31 is Leu, Ile, Phe or Met
  Variant (32)..(32): Xaa in position 32 is any amino acid
  Variant (33)..(33): Xaa in position 33 is Ile, Val, Leu or Met
  Variant (34)..(34): Xaa in position 34 is Val, Ile or Leu
  Variant (37)..(37): Xaa in position 37 is Val, Ala or Thr
  Variant (39)..(39): Xaa in position 39 is Phe, Leu, Thr or Val
  Variant (40)..(40): Xaa in position 40 is Glu or Ala
  Variant (45)..(46): Xaa in position 45 to 46 is any amino acid
  Variant (47)..(47): Xaa in position 47 is any or no amino acid
  Variant (49)..(49): Xaa in position 49 is Trp or Tyr
  Variant (50)..(50): Xaa in position 50 is Lys or Arg
  Variant (52)..(52): Xaa in position 52 is Leu, Phe, Met or Tyr
  Variant (53)..(53): Xaa in position 53 is Ile, Val, Ala or Leu
  Variant (54)..(54): Xaa in position 54 is any amino acid
  Variant (55)..(55): Xaa in position 55 is Asp, Glu or Gln
  Variant (57)..(57): Xaa in position 57 is any amino acid
  Variant (58)..(58): Xaa in position 58 is Leu, Met, Ile, Val, Ala or Thr
  Variant (59)..(59): Xaa in position 59 is Asp, Asn or Ser
  Variant (60)..(63): Xaa in position 60 to 63 is any amino acid
  Variant (64)..(64): Xaa in position 64 is Ile, Val, Leu or Met
  Variant (65)..(66): Xaa in position 65 to 66 is any amino acid
  Variant (68)..(68): Xaa in position 68 is Leu, Ile, Met or Val
  Variant (69)..(70): Xaa in position 69 to 70 is any amino acid
  Variant (71)..(71): Xaa in position 71 is Ala, Ser, Gly, Val or Thr

SEQ ID NO: 50990 - protein, 76 aa, Artificial sequence; identical to SEQ ID NO: 2907
  Consensus
  Variant (1)..(1): Xaa in position 1 is Ala or Ser
  Variant (2)..(2): Xaa in position 2 is Ile or Val
  Variant (6)..(6): Xaa in position 6 is Thr, Ser or Asn
  Variant (7)..(7): Xaa in position 7 is Thr, Val, Ala, Ser or Ile
  Variant (8)..(8): Xaa in position 8 is Glu or Ala
  Variant (9)..(9): Xaa in position 9 is Ser, Asp or Asn
  Variant (11)..(11): Xaa in position 11 is any amino acid
  Variant (14)..(14): Xaa in position 14 is Glu, Gln, Phe or Met
  Variant (15)..(15): Xaa in position 15 is Leu, Met, Val, Phe or Ile
  Variant (16)..(16): Xaa in position 16 is Ala, Ser, Thr, Cys or Val
  Variant (18)..(18): Xaa in position 18 is Gly, Ala or Asn
  Variant (19)..(21): Xaa in position 19 to 21 is any amino acid
  Variant (22)..(22): Xaa in position 22 is Pro or Ala
  Variant (23)..(23): Xaa in position 23 is Val, Ile, Thr or Leu
  Variant (25)..(25): Xaa in position 25 is Phe, Met, Tyr or Ile
  Variant (28)..(28): Xaa in position 28 is any amino acid
  Variant (29)..(29): Xaa in position 29 is Thr, Ser or Arg
  Variant (30)..(30): Xaa in position 30 is any amino acid
  Variant (32)..(35): Xaa in position 32 to 35 is any amino acid
  Variant (36)..(36): Xaa in position 36 is Ala or Met
  Variant (37)..(37): Xaa in position 37 is any amino acid
  Variant (38)..(38): Xaa in position 38 is Asp, Asn or Glu
  Variant (39)..(39): Xaa in position 39 is Ala or Gly
  Variant (40)..(41): Xaa in position 40 to 41 is any amino acid
  Variant (42)..(42): Xaa in position 42 is Ala or Ser
  Variant (43)..(43): Xaa in position 43 is Ala, Ser, Val or Thr
  Variant (44)..(46): Xaa in position 44 to 46 is any amino acid
  Variant (47)..(47): Xaa in position 47 is His or Gln
  Variant (48)..(48): Xaa in position 48 is any amino acid
  Variant (49)..(49): Xaa in position 49 is Phe, Tyr, His or Val
  Variant (50)..(51): Xaa in position 50 to 51 is any amino acid
  Variant (52)..(55): Xaa in position 52 to 55 is any or no amino acid
  Variant (57)..(60): Xaa in position 57 to 60 is any amino acid
  Variant (61)..(62): Xaa in position 61 to 62 is any or no amino acid
  Variant (63)..(63): Xaa in position 63 is Thr or Ser
  Variant (64)..(64): Xaa in position 64 is any amino acid
  Variant (67)..(69): Xaa in position 67 to 69 is any amino acid
  Variant (70)..(70): Xaa in position 70 is His or Phe
  Variant (71)..(71): Xaa in position 71 is Val, Ile, Leu or Ala
  Variant (72)..(72): Xaa in position 72 is Ile or Val
  Variant (73)..(73): Xaa in position 73 is Leu or Met
  Variant (76)..(76): Xaa in position 76 is Gly, Ala or Ser

SEQ ID NO: 50991 - protein, 83 aa, Artificial sequence; identical to SEQ ID NO: 2908
  Consensus
  Variant (1)..(1): Xaa in position 1 is Leu, Ile or Val
  Variant (2)..(2): Xaa in position 2 is Met, Val, Ile or Leu
  Variant (3)..(3): Xaa in position 3 is Ile or Val
  Variant (5)..(5): Xaa in position 5 is Cys, Phe, Ala, Thr or Tyr
  Variant (6)..(6): Xaa in position 6 is Ser, Asn or Ala
  Variant (8)..(8): Xaa in position 8 is Gly, Ala or Asp
  Variant (10)..(10): Xaa in position 10 is Ser or Cys
  Variant (11)..(11): Xaa in position 11 is any amino acid
  Variant (13)..(15): Xaa in position 13 to 15 is any amino acid
  Variant (16)..(16): Xaa in position 16 is Arg, Asn, Lys, Leu or Glu
  Variant (18)..(19): Xaa in position 18 to 19 is any amino acid
  Variant (20)..(20): Xaa in position 20 is Val or Ile
  Variant (21)..(26): Xaa in position 21 to 26 is any amino acid
  Variant (27)..(27): Xaa in position 27 is Gln, Asn or Arg
  Variant (28)..(28): Xaa in position 28 is Ile, Leu, Val, Arg or Met
  Variant (29)..(30): Xaa in position 29 to 30 is any amino acid
  Variant (31)..(31): Xaa in position 31 is Gly, Asn or Asp
  Variant (32)..(32): Xaa in position 32 is any amino acid
  Variant (33)..(37): Xaa in position 33 to 37 is any or no amino acid
  Variant (38)..(38): Xaa in position 38 is Ile, Val or Leu
  Variant (39)..(39): Xaa in position 39 is any amino acid
  Variant (41)..(41): Xaa in position 41 is any amino acid
  Variant (43)..(43): Xaa in position 43 is Ile, Leu, Val, Ala or Met
  Variant (46)..(46): Xaa in position 46 is His, Phe, Asn or Tyr
  Variant (47)..(47): Xaa in position 47 is Leu or Ile
  Variant (48)..(49): Xaa in position 48 to 49 is any amino acid
  Variant (51)..(51): Xaa in position 51 is any amino acid
  Variant (53)..(57): Xaa in position 53 to 57 is any amino acid
  Variant (58)..(69): Xaa in position 58 to 69 is any or no amino acid
  Variant (71)..(71): Xaa in position 71 is any amino acid
  Variant (73)..(73): Xaa in position 73 is Ile or Val
  Variant (76)..(76): Xaa in position 76 is any amino acid
  Variant (78)..(78): Xaa in position 78 is Ile, Leu or Val
  Variant (79)..(79): Xaa in position 79 is any amino acid
  Variant (80)..(80): Xaa in position 80 is Trp, Ile, Leu or Phe
  Variant (81)..(82): Xaa in position 81 to 82 is any amino acid
  Variant (83)..(83): Xaa in position 83 is Thr or Ser

SEQ ID NO: 50992 - DNA, 1392 bp, Escherichia coli K12; identical to SEQ ID NO: 28298
  CDS (1)..(1392): transl_table=11

SEQ ID NO: 50993 - protein, 463 aa, Escherichia coli K12; identical to SEQ ID NO: 28299

SEQ ID NO: 50994 - DNA, 1428 bp, Aquifex aeolicus VF5; identical to SEQ ID NO: 28300
  CDS (1)..(1428): transl_table=11

SEQ ID NO: 50995 - protein, 475 aa, Aquifex aeolicus VF5; identical to SEQ ID NO: 28301

SEQ ID NO: 50996 - DNA, 1212 bp, Pseudomonas aeruginosa PAO1; identical to SEQ ID NO: 28302
  CDS (1)..(1212): transl_table=11

SEQ ID NO: 50997 - protein, 403 aa, Pseudomonas aeruginosa PAO1; identical to SEQ ID NO: 28303

SEQ ID NO: 50998 - DNA, 1407 bp, Pseudomonas aeruginosa PAO1; identical to SEQ ID NO: 28304
  CDS (1)..(1407): transl_table=11

SEQ ID NO: 50999 - protein, 468 aa, Pseudomonas aeruginosa PAO1; identical to SEQ ID NO: 28305

SEQ ID NO: 51000 - DNA, 1296 bp, Pseudomonas aeruginosa PAO1; identical to SEQ ID NO: 28306
  CDS (1)..(1296): transl_table=11

SEQ ID NO: 51001 - protein, 431 aa, Pseudomonas aeruginosa PAO1; identical to SEQ ID NO: 28307

SEQ ID NO: 51002 - DNA, 1554 bp, Mycobacterium leprae TN; identical to SEQ ID NO: 28308
  CDS (1)..(1554): transl_table=11

SEQ ID NO: 51003 - protein, 517 aa, Mycobacterium leprae TN; identical to SEQ ID NO: 28309

SEQ ID NO: 51004 - DNA, 1389 bp, Escherichia coli O157:H7; identical to SEQ ID NO: 28310
  CDS (1)..(1389): transl_table=11

SEQ ID NO: 51005 - protein, 462 aa, Escherichia coli O157:H7; identical to SEQ ID NO: 28311

SEQ ID NO: 51006 - DNA, 1410 bp, Mycobacterium tuberculosis CDC1551; identical to SEQ ID NO: 28312
  CDS (1)..(1410): transl_table=11

SEQ ID NO: 51007 - protein, 469 aa, Mycobacterium tuberculosis CDC1551; identical to SEQ ID NO: 28313

SEQ ID NO: 51008 - DNA, 1392 bp, Mycobacterium tuberculosis CDC1551; identical to SEQ ID NO: 28314
  CDS (1)..(1392): transl_table=11

SEQ ID NO: 51009 - protein, 463 aa, Mycobacterium tuberculosis CDC1551; identical to SEQ ID NO: 28315

SEQ ID NO: 51010 - DNA, 1188 bp, Mycobacterium tuberculosis CDC1551; identical to SEQ ID NO: 28316
  CDS (1)..(1188): transl_table=11

SEQ ID NO: 51011 - protein, 395 aa, Mycobacterium tuberculosis CDC1551; identical to SEQ ID NO: 28317

SEQ ID NO: 51012 - DNA, 1548 bp, Mycobacterium tuberculosis CDC1551; identical to SEQ ID NO: 28318
  CDS (1)..(1548): transl_table=11

SEQ ID NO: 51013 - protein, 515 aa, Mycobacterium tuberculosis CDC1551; identical to SEQ ID NO: 28319

SEQ ID NO: 51014 - DNA, 1170 bp, Staphylococcus aureus subsp. aureus Mu50; identical to SEQ ID NO: 28320
  CDS (1)..(1170): transl_table=11

SEQ ID NO: 51015 - protein, 389 aa, Staphylococcus aureus subsp. aureus Mu50; identical to SEQ ID NO: 28321

SEQ ID NO: 51016 - DNA, 1422 bp, Caulobacter crescentus CB15; identical to SEQ ID NO: 28322
  CDS (1)..(1422): transl_table=11

SEQ ID NO: 51017 - protein, 473 aa, Caulobacter crescentus CB15; identical to SEQ ID NO: 28323

SEQ ID NO: 51018 - DNA, 1275 bp, Sinorhizobium meliloti 1021; identical to SEQ ID NO: 28324
  CDS (1)..(1275): transl_table=11

SEQ ID NO: 51019 - protein, 424 aa, Sinorhizobium meliloti 1021; identical to SEQ ID NO: 28325

SEQ ID NO: 51020 - DNA, 1398 bp, Salmonella typhimurium LT2; identical to SEQ ID NO: 28326
  CDS (1)..(1398): transl_table=11

SEQ ID NO: 51021 - protein, 465 aa, Salmonella typhimurium LT2; identical to SEQ ID NO: 28327

SEQ ID NO: 51022 - DNA, 1314 bp, Ralstonia solanacearum GMI1000; identical to SEQ ID NO: 28328
  CDS (1)..(1314): transl_table=11

SEQ ID NO: 51023 - protein, 437 aa, Ralstonia solanacearum GMI1000; identical to SEQ ID NO: 28329

SEQ ID NO: 51024 - DNA, 1386 bp, Ralstonia solanacearum GMI1000; identical to SEQ ID NO: 28330
  CDS (1)..(1386): transl_table=11

SEQ ID NO: 51025 - protein, 461 aa, Ralstonia solanacearum GMI1000; identical to SEQ ID NO: 28331

SEQ ID NO: 51026 - DNA, 2856 bp, Brucella melitensis 16M; identical to SEQ ID NO: 28332
  CDS (1)..(2856): transl_table=11

SEQ ID NO: 51027 - protein, 951 aa, Brucella melitensis 16M; identical to SEQ ID NO: 28333

SEQ ID NO: 51028 - DNA, 1293 bp, Clostridium perfringens str. 13; identical to SEQ ID NO: 28334
  CDS (1)..(1293): transl_table=11

SEQ ID NO: 51029 - protein, 430 aa, Clostridium perfringens str. 13; identical to SEQ ID NO: 28335

SEQ ID NO: 51030 - DNA, 1338 bp, Corynebacterium glutamicum ATCC 13032; identical to SEQ ID NO: 28336
  CDS (1)..(1338): transl_table=11

SEQ ID NO: 51031 - protein, 445 aa, Corynebacterium glutamicum ATCC 13032; identical to SEQ ID NO: 28337

SEQ ID NO: 51032 - DNA, 1239 bp, Streptomyces coelicolor A3(2); identical to SEQ ID NO: 28338
  CDS (1)..(1239): transl_table=11

SEQ ID NO: 51033 - protein, 412 aa, Streptomyces coelicolor A3(2); identical to SEQ ID NO: 28339

SEQ ID NO: 51034 - DNA, 1359 bp, Streptomyces coelicolor A3(2); identical to SEQ ID NO: 28340
  CDS (1)..(1359): transl_table=11

SEQ ID NO: 51035 - protein, 452 aa, Streptomyces coelicolor A3(2); identical to SEQ ID NO: 28341

SEQ ID NO: 51036 - DNA, 1236 bp, Xanthomonas campestris pv. campestris str. ATCC 33913; identical to SEQ ID NO: 28342
  CDS (1)..(1236): transl_table=11

SEQ ID NO: 51037 - protein, 411 aa, Xanthomonas campestris pv. campestris str. ATCC 33913; identical to SEQ ID NO: 28343

SEQ ID NO: 51038 - DNA, 2688 bp, Brucella suis 1330; identical to SEQ ID NO: 28344
  CDS (1)..(2688): transl_table=11

SEQ ID NO: 51039 - protein, 895 aa, Brucella suis 1330; identical to SEQ ID NO: 28345

SEQ ID NO: 51040 - DNA, 1389 bp, Shigella flexneri 2a str. 301; identical to SEQ ID NO: 28346
  CDS (1)..(1389): transl_table=11

SEQ ID NO: 51041 - protein, 462 aa, Shigella flexneri 2a str. 301; identical to SEQ ID NO: 28347

SEQ ID NO: 51042 - DNA, 1434 bp, Corynebacterium efficiens YS-314; identical to SEQ ID NO: 28348
  CDS (1)..(1434): transl_table=11

SEQ ID NO: 51043 - protein, 477 aa, Corynebacterium efficiens YS-314; identical to SEQ ID NO: 28349

SEQ ID NO: 51044 - DNA, 1302 bp, Corynebacterium efficiens YS-314; identical to SEQ ID NO: 28350
  CDS (1)..(1302): transl_table=11

SEQ ID NO: 51045 - protein, 433 aa, Corynebacterium efficiens YS-314; identical to SEQ ID NO: 28351

SEQ ID NO: 51046 - DNA, 1236 bp, Pseudomonas putida KT2440; identical to SEQ ID NO: 28352
  CDS (1)..(1236): transl_table=11

SEQ ID NO: 51047 - protein, 411 aa, Pseudomonas putida KT2440; identical to SEQ ID NO: 28353

SEQ ID NO: 51048 - DNA, 1164 bp, Staphylococcus epidermidis ATCC 12228; identical to SEQ ID NO: 28354
  CDS (1)..(1164): transl_table=11

SEQ ID NO: 51049 - protein, 387 aa, Staphylococcus epidermidis ATCC 12228; identical to SEQ ID NO: 28355

SEQ ID NO: 51050 - DNA, 1380 bp, Bradyrhizobium japonicum USDA 110; identical to SEQ ID NO: 28356
  CDS (1)..(1380): transl_table=11

SEQ ID NO: 51051 - protein, 459 aa, Bradyrhizobium japonicum USDA 110; identical to SEQ ID NO: 28357

SEQ ID NO: 51052 - DNA, 1191 bp, Lactobacillus plantarum WCFS1; identical to SEQ ID NO: 28358
  CDS (1)..(1191): transl_table=11

SEQ ID NO: 51053 - protein, 396 aa, Lactobacillus plantarum WCFS1; identical to SEQ ID NO: 28359

SEQ ID NO: 51054 - DNA, 1212 bp, Pseudomonas syringae pv. tomato str. DC3000; identical to SEQ ID NO: 28360
  CDS (1)..(1212): transl_table=11

SEQ ID NO: 51055 - protein, 403 aa, Pseudomonas syringae pv. tomato str. DC3000; identical to SEQ ID NO: 28361

SEQ ID NO: 51056 - DNA, 1389 bp, Salmonella enterica subsp. enterica serovar Typhi Ty2; identical to SEQ ID NO: 28362
  CDS (1)..(1389): transl_table=11

SEQ ID NO: 51057 - protein, 462 aa, Salmonella enterica subsp. enterica serovar Typhi Ty2; identical to SEQ ID NO: 28363

SEQ ID NO: 51058 - DNA, 1392 bp, Streptomyces avermitilis MA-4680; identical to SEQ ID NO: 28364
  CDS (1)..(1392): transl_table=11

SEQ ID NO: 51059 - protein, 463 aa, Streptomyces avermitilis MA-4680; identical to SEQ ID NO: 28365

SEQ ID NO: 51060 - DNA, 1170 bp, Bacillus cereus ATCC 14579; identical to SEQ ID NO: 28366
  CDS (1)..(1170): transl_table=11

SEQ ID NO: 51061 - protein, 389 aa, Bacillus cereus ATCC 14579; identical to SEQ ID NO: 28367

SEQ ID NO: 51062 - DNA, 1389 bp, Shigella flexneri 2a str. 2457T; identical to SEQ ID NO: 28368
  CDS (1)..(1389): transl_table=11

SEQ ID NO: 51063 - protein, 462 aa, Shigella flexneri 2a str. 2457T; identical to SEQ ID NO: 28369

SEQ ID NO: 51064 - DNA, 1203 bp, Chromobacterium violaceum ATCC 12472; identical to SEQ ID NO: 28370
  CDS (1)..(1203): transl_table=11

SEQ ID NO: 51065 - protein, 400 aa, Chromobacterium violaceum ATCC 12472; identical to SEQ ID NO: 28371

SEQ ID NO: 51066 - DNA, 1380 bp, Chromobacterium violaceum ATCC 12472; identical to SEQ ID NO: 28372
  CDS (1)..(1380): transl_table=11

SEQ ID NO: 51067 - protein, 459 aa, Chromobacterium violaceum ATCC 12472; identical to SEQ ID NO: 28373

SEQ ID NO: 51068 - DNA, 1284 bp, Chromobacterium violaceum ATCC 12472; identical to SEQ ID NO: 28374
  CDS (1)..(1284): transl_table=11

SEQ ID NO: 51069 - protein, 427 aa, Chromobacterium violaceum ATCC 12472; identical to SEQ ID NO: 28375

SEQ ID NO: 51070 - DNA, 1380 bp, Chromobacterium violaceum ATCC 12472; identical to SEQ ID NO: 28376
  CDS (1)..(1380): transl_table=11

SEQ ID NO: 51071 - protein, 459 aa, Chromobacterium violaceum ATCC 12472; identical to SEQ ID NO: 28377

SEQ ID NO: 51072 - DNA, 1332 bp, Corynebacterium diphtheriae NCTC 13129; identical to SEQ ID NO: 28378
  CDS (1)..(1332): transl_table=11

SEQ ID NO: 51073 - protein, 443 aa, Corynebacterium diphtheriae NCTC 13129; identical to SEQ ID NO: 28379

SEQ ID NO: 51074 - DNA, 1299 bp, Corynebacterium diphtheriae NCTC 13129; identical to SEQ ID NO: 28380
  CDS (1)..(1299): transl_table=11

SEQ ID NO: 51075 - protein, 432 aa, Corynebacterium diphtheriae NCTC 13129; identical to SEQ ID NO: 28381

SEQ ID NO: 51076 - DNA, 1281 bp, Cupriavidus necator; identical to SEQ ID NO: 28382
  CDS (1)..(1281): transl_table=11

SEQ ID NO: 51077 - protein, 426 aa, Cupriavidus necator; identical to SEQ ID NO: 28383

SEQ ID NO: 51078 - DNA, 1395 bp, Cupriavidus necator; identical to SEQ ID NO: 28384
  CDS (1)..(1395): transl_table=11

SEQ ID NO: 51079 - protein, 464 aa, Cupriavidus necator; identical to SEQ ID NO: 28385

SEQ ID NO: 51080 - DNA, 1458 bp, Mycobacterium avium subsp. paratuberculosis K-10; identical to SEQ ID NO: 28386
  CDS (1)..(1458): transl_table=11

SEQ ID NO: 51081 - protein, 485 aa, Mycobacterium avium subsp. paratuberculosis K-10; identical to SEQ ID NO: 28387

SEQ ID NO: 51082 - DNA, 1392 bp, Mycobacterium avium subsp. paratuberculosis K-10; identical to SEQ ID NO: 28388
  CDS (1)..(1392): transl_table=11

SEQ ID NO: 51083 - protein, 463 aa, Mycobacterium avium subsp. paratuberculosis K-10; identical to SEQ ID NO: 28389

SEQ ID NO: 51084 - DNA, 1392 bp, Mycobacterium avium subsp. paratuberculosis K-10; identical to SEQ ID NO: 28390
  CDS (1)..(1392): transl_table=11

SEQ ID NO: 51085 - protein, 463 aa, Mycobacterium avium subsp. paratuberculosis K-10; identical to SEQ ID NO: 28391

SEQ ID NO: 51086 - DNA, 1170 bp, Bacillus anthracis str. Sterne; identical to SEQ ID NO: 28392
  CDS (1)..(1170): transl_table=11

SEQ ID NO: 51087 - protein, 389 aa, Bacillus anthracis str. Sterne; identical to SEQ ID NO: 28393

SEQ ID NO: 51088 - DNA, 1170 bp, Bacillus thuringiensis serovar konkukian str. 97-27; identical to SEQ ID NO: 28394
  CDS (1)..(1170): transl_table=11

SEQ ID NO: 51089 - protein, 389 aa, Bacillus thuringiensis serovar konkukian str. 97-27; identical to SEQ ID NO: 28395

SEQ ID NO: 51090 - DNA, 1170 bp, Staphylococcus aureus subsp. aureus MRSA252; identical to SEQ ID NO: 28396
  CDS (1)..(1170): transl_table=11

SEQ ID NO: 51091 - protein, 389 aa, Staphylococcus aureus subsp. aureus MRSA252; identical to SEQ ID NO: 28397

SEQ ID NO: 51092 - DNA, 1170 bp, Staphylococcus aureus subsp. aureus MSSA476; identical to SEQ ID NO: 28398
  CDS (1)..(1170): transl_table=11

SEQ ID NO: 51093 - protein, 389 aa, Staphylococcus aureus subsp. aureus MSSA476; identical to SEQ ID NO: 28399

SEQ ID NO: 51094 - DNA, 1389 bp, Erwinia carotovora subsp. atroseptica SCRI1043; identical to SEQ ID NO: 28400
  CDS (1)..(1389): transl_table=11

SEQ ID NO: 51095 - protein, 462 aa, Erwinia carotovora subsp. atroseptica SCRI1043; identical to SEQ ID NO: 28401

SEQ ID NO: 51096 - DNA, 1317 bp, Propionibacterium acnes KPA171202; identical to SEQ ID NO: 28402
  CDS (1)..(1317): transl_table=11

SEQ ID NO: 51097 - protein, 438 aa, Propionibacterium acnes KPA171202; identical to SEQ ID NO: 28403

SEQ ID NO: 51098 - DNA, 1206 bp, Bacillus licheniformis ATCC 14580; identical to SEQ ID NO: 28404
  CDS (1)..(1206): transl_table=11

SEQ ID NO: 51099 - protein, 401 aa, Bacillus licheniformis ATCC 14580; identical to SEQ ID NO: 28405

SEQ ID NO: 51100 - DNA, 1185 bp, Bacillus licheniformis ATCC 14580; identical to SEQ ID NO: 28406
  CDS (1)..(1185): transl_table=11

SEQ ID NO: 51101 - protein, 394 aa, Bacillus licheniformis ATCC 14580; identical to SEQ ID NO: 28407

SEQ ID NO: 51102 - DNA, 1230 bp, Burkholderia mallei ATCC 23344; identical to SEQ ID NO: 28408
  CDS (1)..(1230): transl_table=11

SEQ ID NO: 51103 - protein, 409 aa, Burkholderia mallei ATCC 23344; identical to SEQ ID NO: 28409

SEQ ID NO: 51104 - DNA, 1404 bp, Burkholderia mallei ATCC 23344; identical to SEQ ID NO: 28410
  CDS (1)..(1404): transl_table=11

SEQ ID NO: 51105 - protein, 467 aa, Burkholderia mallei ATCC 23344; identical to SEQ ID NO: 28411

SEQ ID NO: 51106 - DNA, 1281 bp, Burkholderia pseudomallei K96243; identical to SEQ ID NO: 28412
  CDS (1)..(1281): transl_table=11

SEQ ID NO: 51107 - protein, 426 aa, Burkholderia pseudomallei K96243; identical to SEQ ID NO: 28413

SEQ ID NO: 51108 - DNA, 1386 bp, Burkholderia pseudomallei K96243; identical to SEQ ID NO: 28414
  CDS (1)..(1386): transl_table=11

SEQ ID NO: 51109 - protein, 461 aa, Burkholderia pseudomallei K96243; identical to SEQ ID NO: 28415

SEQ ID NO: 51110 - DNA, 1458 bp, Burkholderia pseudomallei K96243; identical to SEQ ID NO: 28416
  CDS (1)..(1458): transl_table=11

SEQ ID NO: 51111 - protein, 485 aa, Burkholderia pseudomallei K96243; identical to SEQ ID NO: 28417

SEQ ID NO: 51112 - DNA, 1275 bp, Burkholderia pseudomallei K96243; identical to SEQ ID NO: 28418
  CDS (1)..(1275): transl_table=11

SEQ ID NO: 51113 - protein, 424 aa, Burkholderia pseudomallei K96243; identical to SEQ ID NO: 28419

SEQ ID NO: 51114 - DNA, 1275 bp, Methylococcus capsulatus str. Bath; identical to SEQ ID NO: 28420
  CDS (1)..(1275): transl_table=11

SEQ ID NO: 51115 - protein, 424 aa, Methylococcus capsulatus str. Bath; identical to SEQ ID NO: 28421

SEQ ID NO: 51116 - DNA, 1470 bp, Nocardia farcinica IFM 10152; identical to SEQ ID NO: 28422
  CDS (1)..(1470): transl_table=11

SEQ ID NO: 51117 - protein, 489 aa, Nocardia farcinica IFM 10152; identical to SEQ ID NO: 28423

SEQ ID NO: 51118 - DNA, 1485 bp, Nocardia farcinica IFM 10152; identical to SEQ ID NO: 28424
  CDS (1)..(1485): transl_table=11

SEQ ID NO: 51119 - protein, 494 aa, Nocardia farcinica IFM 10152; identical to SEQ ID NO: 28425

SEQ ID NO: 51120 - DNA, 1323 bp, Haloarcula marismortui ATCC 43049; identical to SEQ ID NO: 28426
  CDS (1)..(1323): transl_table=11

SEQ ID NO: 51121 - protein, 440 aa, Haloarcula marismortui ATCC 43049; identical to SEQ ID NO: 28427

SEQ ID NO: 51122 - DNA, 1200 bp, Geobacillus kaustophilus HTA426; identical to SEQ ID NO: 28428
  CDS (1)..(1200): transl_table=11

SEQ ID NO: 51123 - protein, 399 aa, Geobacillus kaustophilus HTA426; identical to SEQ ID NO: 28429

SEQ ID NO: 51124 - DNA, 1203 bp, Geobacillus kaustophilus HTA426; identical to SEQ ID NO: 28430
  CDS (1)..(1203): transl_table=11

SEQ ID NO: 51125 - protein, 400 aa, Geobacillus kaustophilus HTA426; identical to SEQ ID NO: 28431

SEQ ID NO: 51126 - DNA, 1389 bp, Salmonella enterica subsp. enterica serovar Paratyphi A str. ATCC; identical to SEQ ID NO: 28432
  CDS (1)..(1389): transl_table=11

SEQ ID NO: 51127 - protein, 462 aa, Salmonella enterica subsp. enterica serovar Paratyphi A str. ATCC; identical to SEQ ID NO: 28433

SEQ ID NO: 51128 - DNA, 1332 bp, Idiomarina loihiensis L2TR; identical to SEQ ID NO: 28434
  CDS (1)..(1332): transl_table=11

SEQ ID NO: 51129 - protein, 443 aa, Idiomarina loihiensis L2TR; identical to SEQ ID NO: 28435

SEQ ID NO: 51130 - DNA, 1692 bp, Azoarcus sp. EbN1; identical to SEQ ID NO: 28436
  CDS (1)..(1692): transl_table=11

SEQ ID NO: 51131 - protein, 563 aa, Azoarcus sp. EbN1; identical to SEQ ID NO: 28437

SEQ ID NO: 51132 - DNA, 1377 bp, Azoarcus sp. EbN1; identical to SEQ ID NO: 28438
  CDS (1)..(1377): transl_table=11

SEQ ID NO: 51133 - protein, 458 aa, Azoarcus sp. EbN1; identical to SEQ ID NO: 28439

SEQ ID NO: 51134 - DNA, 1509 bp, Bacillus clausii KSM-K16; identical to SEQ ID NO: 28440
  CDS (1)..(1509): transl_table=11

SEQ ID NO: 51135 - protein, 502 aa, Bacillus clausii KSM-K16; identical to SEQ ID NO: 28441

SEQ ID NO: 51136 - DNA, 1206 bp, Bacillus clausii KSM-K16; identical to SEQ ID NO: 28442
  CDS (1)..(1206): transl_table=11

SEQ ID NO: 51137 - protein, 401 aa, Bacillus clausii KSM-K16; identical to SEQ ID NO: 28443

SEQ ID NO: 51138 - DNA, 1164 bp, Staphylococcus epidermidis RP62A; identical to SEQ ID NO: 28444
  CDS (1)..(1164): transl_table=11

SEQ ID NO: 51139 - protein, 387 aa, Staphylococcus epidermidis RP62A; identical to SEQ ID NO: 28445

SEQ ID NO: 51140 - DNA, 1389 bp, Salmonella enterica subsp. enterica serovar Choleraesuis str; identical to SEQ ID NO: 28446
  CDS (1)..(1389): transl_table=11

SEQ ID NO: 51141 - protein, 462 aa, Salmonella enterica subsp. enterica serovar Choleraesuis str; identical to SEQ ID NO: 28447

SEQ ID NO: 51142 - DNA, 1212 bp, Pseudomonas syringae pv. syringae B728a; identical to SEQ ID NO: 28448
  CDS (1)..(1212): transl_table=11

SEQ ID NO: 51143 - protein, 403 aa, Pseudomonas syringae pv. syringae B728a; identical to SEQ ID NO: 28449

SEQ ID NO: 51144 - DNA, 1158 bp, Staphylococcus haemolyticus JCSC1435; identical to SEQ ID NO: 28450
  CDS (1)..(1158): transl_table=11

SEQ ID NO: 51145 - protein, 385 aa, Staphylococcus haemolyticus JCSC1435; identical to SEQ ID NO: 28451

SEQ ID NO: 51146 - DNA, 1380 bp, Psychrobacter arcticum 273-4; identical to SEQ ID NO: 28452
  CDS (1)..(1380): transl_table=11

SEQ ID NO: 51147 - protein, 459 aa, Psychrobacter arcticum 273-4; identical to SEQ ID NO: 28453

SEQ ID NO: 51148 - DNA, 1212 bp, Pseudomonas syringae pv. phaseolicola 1448A; identical to SEQ ID NO: 28454
  CDS (1)..(1212): transl_table=11

SEQ ID NO: 51149 - protein, 403 aa, Pseudomonas syringae pv. phaseolicola 1448A; identical to SEQ ID NO: 28455

SEQ ID NO: 51150 - DNA, 1215 bp, Dechloromonas aromatica RCB; identical to SEQ ID NO: 28456
  CDS (1)..(1215): transl_table=11

SEQ ID NO: 51151 - protein, 404 aa, Dechloromonas aromatica RCB; identical to SEQ ID NO: 28457

SEQ ID NO: 51152 - DNA, 1290 bp, Ralstonia eutropha JMP134; identical to SEQ ID NO: 28458
  CDS (1)..(1290): transl_table=11

SEQ ID NO: 51153 - protein, 429 aa, Ralstonia eutropha JMP134; identical to SEQ ID NO: 28459

SEQ ID NO: 51154 - DNA, 1386 bp, Ralstonia eutropha JMP134; identical to SEQ ID NO: 28460
  CDS (1)..(1386): transl_table=11

SEQ ID NO: 51155 - protein, 461 aa, Ralstonia eutropha JMP134; identical to SEQ ID NO: 28461

SEQ ID NO: 51156 - DNA, 1362 bp, Shigella sonnei Ss046; identical to SEQ ID NO: 28462
  CDS (1)..(1362): transl_table=11

SEQ ID NO: 51157 - protein, 453 aa, Shigella sonnei Ss046; identical to SEQ ID NO: 28463

SEQ ID NO: 51158 - DNA, 1269 bp, Thiobacillus denitrificans ATCC 25259; identical to SEQ ID NO: 28464
  CDS (1)..(1269): transl_table=11

SEQ ID NO: 51159 - protein, 422 aa, Thiobacillus denitrificans ATCC 25259; identical to SEQ ID NO: 28465

SEQ ID NO: 51160 - DNA, 1677 bp, Thiobacillus denitrificans ATCC 25259; identical to SEQ ID NO: 28466
  CDS (1)..(1677): transl_table=11

SEQ ID NO: 51161 - protein, 558 aa, Thiobacillus denitrificans ATCC 25259; identical to SEQ ID NO: 28467

SEQ ID NO: 51162 - DNA, 1263 bp, Magnetospirillum magnetotacticum MS-1; identical to SEQ ID NO: 28468
  CDS (1)..(1263)

SEQ ID NO: 51163 - protein, 420 aa, Magnetospirillum magnetotacticum MS-1; identical to SEQ ID NO: 28469

SEQ ID NO: 51164 - DNA, 1407 bp, Pseudomonas aeruginosa UCBPP-PA14; identical to SEQ ID NO: 28470
  CDS (1)..(1407)

SEQ ID NO: 51165 - protein, 468 aa, Pseudomonas aeruginosa UCBPP-PA14; identical to SEQ ID NO: 28471

SEQ ID NO: 51166 - DNA, 1326 bp, Burkholderia cepacia R18194; identical to SEQ ID NO: 28472
  CDS (1)..(1326)

SEQ ID NO: 51167 - protein, 441 aa, Burkholderia cepacia R18194; identical to SEQ ID NO: 28473

SEQ ID NO: 51168 - DNA, 1326 bp, Burkholderia cenocepacia AU 1054; identical to SEQ ID NO: 28474
  CDS (1)..(1326): transl_table=11

SEQ ID NO: 51169 - protein, 441 aa, Burkholderia cenocepacia AU 1054; identical to SEQ ID NO: 28475

SEQ ID NO: 51170 - DNA, 1407 bp, Burkholderia pseudomallei S13; identical to SEQ ID NO: 28476
  CDS (1)..(1407)

SEQ ID NO: 51171 - protein, 468 aa, Burkholderia pseudomallei S13; identical to SEQ ID NO: 28477

SEQ ID NO: 51172 - DNA, 1212 bp, Polaromonas sp. JS666; identical to SEQ ID NO: 28478
  CDS (1)..(1212): transl_table=11

SEQ ID NO: 51173 - protein, 403 aa, Polaromonas sp. JS666; identical to SEQ ID NO: 28479

SEQ ID NO: 51174 - DNA, 1320 bp, Geobacter metallireducens GS-15; identical to SEQ ID NO: 28480
  CDS (1)..(1320): transl_table=11

SEQ ID NO: 51175 - protein, 439 aa, Geobacter metallireducens GS-15; identical to SEQ ID NO: 28481

SEQ ID NO: 51176 - DNA, 1230 bp, Nitrobacter hamburgensis X14; identical to SEQ ID NO: 28482
  CDS (1)..(1230): transl_table=11

SEQ ID NO: 51177 - protein, 409 aa, Nitrobacter hamburgensis X14; identical to SEQ ID NO: 28483

SEQ ID NO: 51178 - DNA, 1209 bp, Paracoccus denitrificans PD1222; identical to SEQ ID NO: 28484
  CDS (1)..(1209): transl_table=11

SEQ ID NO: 51179 - protein, 402 aa, Paracoccus denitrificans PD1222; identical to SEQ ID NO: 28485

SEQ ID NO: 51180 - DNA, 1401 bp, Pseudomonas aeruginosa; identical to SEQ ID NO: 28486
  CDS (1)..(1401): transl_table=11

SEQ ID NO: 51181 - protein, 466 aa, Pseudomonas aeruginosa; identical to SEQ ID NO: 28487

SEQ ID NO: 51182 - DNA, 1416 bp, Mycobacterium fortuitum; identical to SEQ ID NO: 28488
  CDS (1)..(1416): transl_table=11

SEQ ID NO: 51183 - protein, 471 aa, Mycobacterium fortuitum; identical to SEQ ID NO: 28489

SEQ ID NO: 51184 - DNA, 1527 bp, Populus tremula x Populus tremuloides; identical to SEQ ID NO: 28490
  CDS (1)..(1527)

SEQ ID NO: 51185 - protein, 508 aa, Populus tremula x Populus tremuloides; identical to SEQ ID NO: 28491

SEQ ID NO: 51186 - DNA, 1602 bp, Pseudomonas sp; identical to SEQ ID NO: 28492
  CDS (1)..(1602): transl_table=11

SEQ ID NO: 51187 - protein, 533 aa, Pseudomonas sp; identical to SEQ ID NO: 28493

SEQ ID NO: 51188 - DNA, 1302 bp, Halomonas maura; identical to SEQ ID NO: 28494
  CDS (1)..(1302): transl_table=11

SEQ ID NO: 51189 - protein, 433 aa, Halomonas maura; identical to SEQ ID NO: 28495

SEQ ID NO: 51190 - DNA, 1254 bp, Rhizobium sp; identical to SEQ ID NO: 28496
  CDS (1)..(1254): transl_table=11

SEQ ID NO: 51191 - protein, 417 aa, Rhizobium sp; identical to SEQ ID NO: 28497

SEQ ID NO: 51192 - DNA, 1311 bp, Halobacterium mediterranei; identical to SEQ ID NO: 28498
  CDS (1)..(1311): transl_table=11

SEQ ID NO: 51193 - protein, 436 aa, Halobacterium mediterranei; identical to SEQ ID NO: 28499

SEQ ID NO: 51194 - DNA, 1650 bp, Physcomitrella patens; identical to SEQ ID NO: 28500
  CDS (1)..(1650)

SEQ ID NO: 51195 - protein, 549 aa, Physcomitrella patens; identical to SEQ ID NO: 28501

SEQ ID NO: 51196 - DNA, 1353 bp, Corynebacterium glutamicum; identical to SEQ ID NO: 28502
  CDS (1)..(1353): transl_table=11

SEQ ID NO: 51197 - protein, 450 aa, Corynebacterium glutamicum; identical to SEQ ID NO: 28503

SEQ ID NO: 51198 - DNA, 1284 bp, Paracoccus halodenitrificans; identical to SEQ ID NO: 28504
  CDS (1)..(1284): transl_table=11

SEQ ID NO: 51199 - protein, 427 aa, Paracoccus halodenitrificans; identical to SEQ ID NO: 28505

SEQ ID NO: 51200 - DNA, 1593 bp, Paracoccus halodenitrificans; identical to SEQ ID NO: 28506
  CDS (1)..(1593): transl_table=11

SEQ ID NO: 51201 - protein, 530 aa, Paracoccus halodenitrificans; identical to SEQ ID NO: 28507

SEQ ID NO: 51202 - DNA, 2718 bp, Paracoccus pantotrophus; identical to SEQ ID NO: 28508
  CDS (1)..(2718): transl_table=11

SEQ ID NO: 51203 - protein, 905 aa, Paracoccus pantotrophus; identical to SEQ ID NO: 28509

SEQ ID NO: 51204 - DNA, 1266 bp, Pseudomonas fluorescens; identical to SEQ ID NO: 28510
  CDS (1)..(1266): transl_table=11

SEQ ID NO: 51205 - protein, 421 aa, Pseudomonas fluorescens; identical to SEQ ID NO: 28511

SEQ ID NO: 51206 - DNA, 1332 bp, Thermus thermophilus; identical to SEQ ID NO: 28512
  CDS (1)..(1332): transl_table=11

SEQ ID NO: 51207 - protein, 443 aa, Thermus thermophilus; identical to SEQ ID NO: 28513

SEQ ID NO: 51208 - DNA, 1308 bp, Thermus thermophilus; identical to SEQ ID NO: 28514
  CDS (1)..(1308): transl_table=11

SEQ ID NO: 51209 - protein, 435 aa, Thermus thermophilus; identical to SEQ ID NO: 28515

SEQ ID NO: 51210 - DNA, 1449 bp, Cylindrotheca fusiformis; identical to SEQ ID NO: 28516
  CDS (1)..(1449)

SEQ ID NO: 51211 - protein, 482 aa, Cylindrotheca fusiformis; identical to SEQ ID NO: 28517

SEQ ID NO: 51212 - DNA, 1449 bp, Cylindrotheca fusiformis; identical to SEQ ID NO: 28518
  CDS (1)..(1449)

SEQ ID NO: 51213 - protein, 482 aa, Cylindrotheca fusiformis; identical to SEQ ID NO: 28519

SEQ ID NO: 51214 - DNA, 1449 bp, Cylindrotheca fusiformis; identical to SEQ ID NO: 28520
  CDS (1)..(1449)

SEQ ID NO: 51215 - protein, 482 aa, Cylindrotheca fusiformis; identical to SEQ ID NO: 28521

SEQ ID NO: 51216 - DNA, 1212 bp, Pseudomonas aeruginosa; identical to SEQ ID NO: 28522
  CDS (1)..(1212): transl_table=11

SEQ ID NO: 51217 - protein, 403 aa, Pseudomonas aeruginosa; identical to SEQ ID NO: 28523

SEQ ID NO: 51218 - DNA, 1389 bp, Escherichia coli; identical to SEQ ID NO: 28524
  CDS (1)..(1389): transl_table=11

SEQ ID NO: 51219 - protein, 462 aa, Escherichia coli; identical to SEQ ID NO: 28525

SEQ ID NO: 51220 - DNA, 1389 bp, Salmonella typhimurium; identical to SEQ ID NO: 28526
  CDS (1)..(1389): transl_table=11

SEQ ID NO: 51221 - protein, 462 aa, Salmonella typhimurium; identical to SEQ ID NO: 28527

SEQ ID NO: 51222 - DNA, 1266 bp, Bacillus subtilis; identical to SEQ ID NO: 28528
  CDS (1)..(1266): transl_table=11

SEQ ID NO: 51223 - protein, 421 aa, Bacillus subtilis; identical to SEQ ID NO: 28529

SEQ ID NO: 51224 - DNA, 21 bp, Artificial sequence
  Primer sequence
atgagtcactcatccgccccc

SEQ ID NO: 51225 - DNA, 27 bp, Artificial sequence
  Primer sequence
ttattttttagaatgccgaccatatac

SEQ ID NO: 51226 - protein, 512 aa, Artificial sequence; identical to SEQ ID NO: 28532
  Consensus
  Variant (2)..(9): Xaa in position 2 to 9 is any amino acid
  Variant (11)..(11): Xaa in position 11 is any amino acid
  Variant (13)..(13): Xaa in position 13 is any amino acid
  Variant (16)..(16): Xaa in position 16 is any amino acid
  Variant (18)..(22): Xaa in position 18 to 22 is any amino acid
  Variant (23)..(24): Xaa in position 23 to 24 is any or no amino acid
  Variant (26)..(38): Xaa in position 26 to 38 is any amino acid
  Variant (39)..(49): Xaa in position 39 to 49 is any or no amino acid
  Variant (51)..(51): Xaa in position 51 is any amino acid
  Variant (53)..(54): Xaa in position 53 to 54 is any amino acid
  Variant (55)..(55): Xaa in position 55 is any or no amino acid
  Variant (57)..(57): Xaa in position 57 is any amino acid
  Variant (60)..(60): Xaa in position 60 is any amino acid
  Variant (64)..(72): Xaa in position 64 to 72 is any amino acid
  Variant (74)..(74): Xaa in position 74 is any amino acid
  Variant (76)..(86): Xaa in position 76 to 86 is any amino acid
  Variant (88)..(101): Xaa in position 88 to 101 is any amino acid
  Variant (102)..(110): Xaa in position 102 to 110 is any or no amino acid
  Variant (112)..(112): Xaa in position 112 is any amino acid
  Variant (113)..(113): Xaa in position 113 is any or no amino acid
  Variant (115)..(117): Xaa in position 115 to 117 is any amino acid
  Variant (119)..(119): Xaa in position 119 is any amino acid
  Variant (123)..(123): Xaa in position 123 is any amino acid
  Variant (126)..(127): Xaa in position 126 to 127 is any amino acid
  Variant (129)..(133): Xaa in position 129 to 133 is any amino acid
  Variant (137)..(140): Xaa in position 137 to 140 is any amino acid
  Variant (142)..(142): Xaa in position 142 is any amino acid
  Variant (144)..(144): Xaa in position 144 is any amino acid
  Variant (147)..(147): Xaa in position 147 is any amino acid
  Variant (150)..(150): Xaa in position 150 is any amino acid
  Variant (151)..(151): Xaa in position 151 is any or no amino acid
  Variant (153)..(153): Xaa in position 153 is any amino acid
  Variant (155)..(156): Xaa in position 155 to 156 is any amino acid
  Variant (158)..(162): Xaa in position 158 to 162 is any amino acid
  Variant (164)..(164): Xaa in position 164 is any or no amino acid
  Variant (166)..(181): Xaa in position 166 to 181 is any amino acid
  Variant (182)..(210): Xaa in position 182 to 210 is any or no amino acid
  Variant (212)..(212): Xaa in position 212 is any amino acid
  Variant (214)..(215): Xaa in position 214 to 215 is any amino acid
  Variant (217)..(243): Xaa in position 217 to 243 is any amino acid
  Variant (244)..(314): Xaa in position 244 to 314 is any or no amino acid
  Variant (316)..(320): Xaa in position 316 to 320 is any amino acid
  Variant (322)..(324): Xaa in position 322 to 324 is any amino acid
  Variant (327)..(327): Xaa in position 327 is any amino acid
  Variant (331)..(342): Xaa in position 331 to 342 is any amino acid
  Variant (344)..(357): Xaa in position 344 to 357 is any amino acid
  Variant (358)..(377): Xaa in position 358 to 377 is any or no amino acid
  Variant (379)..(381): Xaa in position 379 to 381 is any amino acid
  Variant (383)..(384): Xaa in position 383 to 384 is any amino acid
  Variant (387)..(387): Xaa in position 387 is any amino acid
  Variant (392)..(392): Xaa in position 392 is any amino acid
  Variant (395)..(432): Xaa in position 395 to 432 is any amino acid
  Variant (433)..(455): Xaa in position 433 to 455 is any or no amino acid
  Variant (457)..(457): Xaa in position 457 is any amino acid
  Variant (459)..(459): Xaa in position 459 is any amino acid
  Variant (462)..(462): Xaa in position 462 is any amino acid
  Variant (464)..(465): Xaa in position 464 to 465 is any amino acid
  Variant (467)..(469): Xaa in position 467 to 469 is any amino acid
  Variant (471)..(474): Xaa in position 471 to 474 is any amino acid
  Variant (475)..(497): Xaa in position 475 to 497 is any or no amino acid
  Variant (499)..(501): Xaa in position 499 to 501 is any amino acid
  Variant (503)..(507): Xaa in position 503 to 507 is any amino acid
  Variant (510)..(510): Xaa in position 510 is any amino acid

SEQ ID NO: 51227 - protein, 19 aa, Artificial sequence
  Consensus
  Variant (2)..(10): Xaa in position 2 to 10 is any amino acid
  Variant (11)..(11): Xaa in position 11 is any or no amino acid
  Variant (13)..(13): Xaa in position 13 is any amino acid
  Variant (14)..(14): Xaa in position 14 is Ala, Ile or Val
  Variant (16)..(16): Xaa in position 16 is any amino acid
  Variant (17)..(17): Xaa in position 17 is Ile, Leu, Met or Val
  Variant (18)..(18): Xaa in position 18 is any amino acid
  Variant (19)..(19): Xaa in position 19 is Ala, Gly or Ser
LXXXXXXXXXXFXXWXXXX

SEQ ID NO: 51228 - protein, 45 aa, Artificial sequence; identical to SEQ ID NO: 28534
  Consensus
  Variant (2)..(3): Xaa in position 2 to 3 is any amino acid
  Variant (4)..(4): Xaa in position 4 is any or no amino acid
  Variant (6)..(6): Xaa in position 6 is Ala, Gly or Thr
  Variant (7)..(7): Xaa in position 7 is any amino acid
  Variant (9)..(9): Xaa in position 9 is Ala, Gly or Ser
  Variant (10)..(12): Xaa in position 10 to 12 is any amino acid
  Variant (13)..(13): Xaa in position 13 is Ala, Gly, Pro, Ser or Thr
  Variant (14)..(15): Xaa in position 14 to 15 is any amino acid
  Variant (16)..(16): Xaa in position 16 is Ala, Gly, Asn, Pro or Ser
  Variant (17)..(18): Xaa in position 17 to 18 is any amino acid
  Variant (19)..(19): Xaa in position 19 is Phe, His or Tyr
  Variant (20)..(24): Xaa in position 20 to 24 is any amino acid
  Variant (26)..(26): Xaa in position 26 is any amino acid
  Variant (27)..(27): Xaa in position 27 is Ala, Ser or Val
  Variant (28)..(28): Xaa in position 28 is any amino acid
  Variant (30)..(31): Xaa in position 30 to 31 is any amino acid
  Variant (32)..(33): Xaa in position 32 to 33 is any or no amino acid
  Variant (35)..(38): Xaa in position 35 to 38 is any amino acid
  Variant (39)..(39): Xaa in position 39 is Ala, Gly or Val
  Variant (40)..(44): Xaa in position 40 to 44 is any amino acid
  Variant (45)..(45): Xaa in position 45 is Phe, Ile, Leu or Val

SEQ ID NO: 51229 - protein, 24 aa, Artificial sequence
  Consensus
  Variant (2)..(3): Xaa in position 2 to 3 is any amino acid
  Variant (4)..(4): Xaa in position 4 is any or no amino acid
  Variant (6)..(6): Xaa in position 6 is any or no amino acid
  Variant (8)..(8): Xaa in position 8 is Ala, Gly or Ser
  Variant (9)..(9): Xaa in position 9 is Phe or Tyr
  Variant (10)..(10): Xaa in position 10 is Ala, Ile or Val
  Variant (11)..(11): Xaa in position 11 is Ala or Gly
  Variant (12)..(12): Xaa in position 12 is any amino acid
  Variant (13)..(13): Xaa in position 13 is Ala, Gly, Ser or Thr
  Variant (14)..(15): Xaa in position 14 to 15 is any amino acid
  Variant (16)..(16): Xaa in position 16 is Phe, Leu, Met or Val
  Variant (17)..(17): Xaa in position 17 is Ala, Gly, Pro, Ser or Thr
  Variant (18)..(23): Xaa in position 18 to 23 is any amino acid
  Variant (24)..(24): Xaa in position 24 is Phe or Tyr
YXXXFXGXXXXXXXXXXXXXXXXX

SEQ ID NO: 51230 - protein, 33 aa, Artificial sequence; identical to SEQ ID NO: 28536
  Consensus
  Variant (2)..(19): Xaa in position 2 to 19 is any amino acid
  Variant (20)..(22): Xaa in position 20 to 22 is any or no amino acid
  Variant (24)..(24): Xaa in position 24 is Phe, Ile, Leu, Met or Val
  Variant (25)..(25): Xaa in position 25 is any amino acid
  Variant (26)..(26): Xaa in position 26 is Ala, Gly or Ser
  Variant (27)..(28): Xaa in position 27 to 28 is any amino acid
  Variant (30)..(30): Xaa in position 30 is Ala, Cys, Gly, Asn, Ser or Thr
  Variant (31)..(31): Xaa in position 31 is any amino acid
  Variant (33)..(33): Xaa in position 33 is Ala, Gly, Pro or Ser

SEQ ID NO: 51231 - DNA, 2376 bp, Saccharomyces cerevisiae; identical to SEQ ID NO: 35553
  CDS (1)..(2376)

SEQ ID NO: 51232 - protein, 791 aa, Saccharomyces cerevisiae; identical to SEQ ID NO: 35554

SEQ ID NO: 51233 - DNA, 717 bp, Danio rerio; identical to SEQ ID NO: 35555
  CDS (1)..(717)

SEQ ID NO: 51234 - protein, 238 aa, Danio rerio; identical to SEQ ID NO: 35556

SEQ ID NO: 51235 - DNA, 1506 bp, Caenorhabditis elegans; identical to SEQ ID NO: 35557
  CDS (1)..(1506)

SEQ ID NO: 51236 - protein, 501 aa, Caenorhabditis elegans; identical to SEQ ID NO: 35558

SEQ ID NO: 51237 - DNA, 684 bp, Caenorhabditis elegans; identical to SEQ ID NO: 35559
  CDS (1)..(684)

SEQ ID NO: 51238 - protein, 227 aa, Caenorhabditis elegans; identical to SEQ ID NO: 35560

SEQ ID NO: 51239 - DNA, 720 bp, Homo sapiens; identical to SEQ ID NO: 35561
  CDS (1)..(720)

SEQ ID NO: 51240 - protein, 239 aa, Homo sapiens; identical to SEQ ID NO: 35562

SEQ ID NO: 51241 - DNA, 1272 bp, Leptospira interrogans serovar Lai str. 56601; identical to SEQ ID NO: 35563
  CDS (1)..(1272): transl_table=11

SEQ ID NO: 51242 - protein, 423 aa, Leptospira interrogans serovar Lai str. 56601; identical to SEQ ID NO: 35564

SEQ ID NO: 51243 - DNA, 1497 bp, Leptospira interrogans serovar Lai str. 56601; identical to SEQ ID NO: 35565
  CDS (1)..(1497): transl_table=11

SEQ ID NO: 51244 - protein, 498 aa, Leptospira interrogans serovar Lai str. 56601; identical to SEQ ID NO: 35566

SEQ ID NO: 51245 - DNA, 1287 bp, Leptospira interrogans serovar Lai str. 56601; identical to SEQ ID NO: 35567
  CDS (1)..(1287): transl_table=11

SEQ ID NO: 51246 - protein, 428 aa, Leptospira interrogans serovar Lai str. 56601; identical to SEQ ID NO: 35568

SEQ ID NO: 51247 - DNA, 870 bp, Leptospira interrogans serovar Lai str. 56601; identical to SEQ ID NO: 35569
  CDS (1)..(870): transl_table=11

SEQ ID NO: 51248 - protein, 289 aa, Leptospira interrogans serovar Lai str. 56601; identical to SEQ ID NO: 35570

SEQ ID NO: 51249 - DNA, 1281 bp, Leptospira interrogans serovar Lai str. 56601; identical to SEQ ID NO: 35571
  CDS (1)..(1281): transl_table=11

SEQ ID NO: 51250 - protein, 426 aa, Leptospira interrogans serovar Lai str. 56601; identical to SEQ ID NO: 35572

SEQ ID NO: 51251 - DNA, 1227 bp, Leptospira interrogans serovar Lai str. 56601; identical to SEQ ID NO: 35573
  CDS (1)..(1227): transl_table=11

SEQ ID NO: 51252 - protein, 408 aa, Leptospira interrogans serovar Lai str. 56601; identical to SEQ ID NO: 35574

SEQ ID NO: 51253 - DNA, 1134 bp, Leptospira interrogans serovar Lai str. 56601; identical to SEQ ID NO: 35575
  CDS (1)..(1134): transl_table=11

SEQ ID NO: 51254 - protein, 377 aa, Leptospira interrogans serovar Lai str. 56601; identical to SEQ ID NO: 35576

SEQ ID NO: 51255 - DNA, 936 bp, Leptospira interrogans serovar Lai str. 56601; identical to SEQ ID NO: 35577
  CDS (1)..(936): transl_table=11

SEQ ID NO: 51256 - protein, 311 aa, Leptospira interrogans serovar Lai str. 56601; identical to SEQ ID NO: 35578

SEQ ID NO: 51257 - DNA, 990 bp, Leptospira interrogans serovar Lai str. 56601; identical to SEQ ID NO: 35579
  CDS (1)..(990): transl_table=11

SEQ ID NO: 51258 - protein, 329 aa, Leptospira interrogans serovar Lai str. 56601; identical to SEQ ID NO: 35580

SEQ ID NO: 51259 - DNA, 1458 bp, Caenorhabditis elegans; identical to SEQ ID NO: 35581
  CDS (1)..(1458)

SEQ ID NO: 51260 - protein, 485 aa, Caenorhabditis elegans; identical to SEQ ID NO: 35582

SEQ ID NO: 51261 - DNA, 2160 bp, Eremothecium gossypii; identical to SEQ ID NO: 35583
  CDS (1)..(2160)

SEQ ID NO: 51262 - protein, 719 aa, Eremothecium gossypii; identical to SEQ ID NO: 35584

SEQ ID NO: 51263 - DNA, 3123 bp, Magnaporthe grisea 70-15; identical to SEQ ID NO: 35585
  CDS (1)..(3123)

SEQ ID NO: 51264 - protein, 1040 aa, Magnaporthe grisea 70-15; identical to SEQ ID NO: 35586

SEQ ID NO: 51265 - DNA, 2940 bp, Gibberella zeae PH-1; identical to SEQ ID NO: 35587
  CDS (1)..(2940)

SEQ ID NO: 51266 - protein, 979 aa, Gibberella zeae PH-1; identical to SEQ ID NO: 35588

SEQ ID NO: 51267 - DNA, 2943 bp, Aspergillus nidulans FGSC A4; identical to SEQ ID NO: 35589
  CDS (1)..(2943)

SEQ ID NO: 51268 - protein, 980 aa, Aspergillus nidulans FGSC A4; identical to SEQ ID NO: 35590

SEQ ID NO: 51269 - DNA, 2607 bp, Candida glabrata CBS138; identical to SEQ ID NO: 35591
  CDS (1)..(2607)

SEQ ID NO: 51270 - protein, 868 aa, Candida glabrata CBS138; identical to SEQ ID NO: 35592

SEQ ID NO: 51271 - DNA, 2379 bp, Kluyveromyces lactis NRRL Y-1140; identical to SEQ ID NO: 35593
  CDS (1)..(2379)

SEQ ID NO: 51272 - protein, 792 aa, Kluyveromyces lactis NRRL Y-1140; identical to SEQ ID NO: 35594

SEQ ID NO: 51273 - DNA, 2301 bp, Yarrowia lipolytica CLIB99; identical to SEQ ID NO: 35595
  CDS (1)..(2301)

SEQ ID NO: 51274 - protein, 766 aa, Yarrowia lipolytica CLIB99; identical to SEQ ID NO: 35596

SEQ ID NO: 51275 - DNA, 2466 bp, Candida albicans SC5314; identical to SEQ ID NO: 35597
  CDS (1)..(2466): transl_table=12

SEQ ID NO: 51276 - protein, 821 aa, Candida albicans SC5314; identical to SEQ ID NO: 35598

SEQ ID NO: 51277 - DNA, 1137 bp, Leptospira interrogans serovar Copenhageni str. Fiocruz L1-130; identical to SEQ ID NO: 35599
  CDS (1)..(1137): transl_table=11

SEQ ID NO: 51278 - protein, 378 aa, Leptospira interrogans serovar Copenhageni str. Fiocruz L1-130; identical to SEQ ID NO: 35600

SEQ ID NO: 51279 - DNA, 1209 bp, Leptospira interrogans serovar Copenhageni str. Fiocruz L1-130; identical to SEQ ID NO: 35601
  CDS (1)..(1209): transl_table=11

SEQ ID NO: 51280 - protein, 402 aa, Leptospira interrogans serovar Copenhageni str. Fiocruz L1-130; identical to SEQ ID NO: 35602

SEQ ID NO: 51281 - DNA, 1566 bp, Leptospira interrogans serovar Copenhageni str. Fiocruz L1-130; identical to SEQ ID NO: 35603
  CDS (1)..(1566): transl_table=11

SEQ ID NO: 51282 - protein, 521 aa, Leptospira interrogans serovar Copenhageni str. Fiocruz L1-130; identical to SEQ ID NO: 35604

SEQ ID NO: 51283 - DNA, 1134 bp, Leptospira interrogans serovar Copenhageni str. Fiocruz L1-130; identical to SEQ ID NO: 35605
  CDS (1)..(1134): transl_table=11

SEQ ID NO: 51284 - protein, 377 aa, Leptospira interrogans serovar Copenhageni str. Fiocruz L1-130; identical to SEQ ID NO: 35606

SEQ ID NO: 51285 - DNA, 1281 bp, Leptospira interrogans serovar Copenhageni str. Fiocruz L1-130; identical to SEQ ID NO: 35607
  CDS (1)..(1281): transl_table=11

SEQ ID NO: 51286 - protein, 426 aa, Leptospira interrogans serovar Copenhageni str. Fiocruz L1-130; identical to SEQ ID NO: 35608

SEQ ID NO: 51287 - DNA, 1719 bp, Leptospira interrogans serovar Copenhageni str. Fiocruz L1-130; identical to SEQ ID NO: 35609
  CDS (1)..(1719): transl_table=11

SEQ ID NO: 51288 - protein, 572 aa, Leptospira interrogans serovar Copenhageni str. Fiocruz L1-130; identical to SEQ ID NO: 35610

SEQ ID NO: 51289 - DNA, 1272 bp, Leptospira interrogans serovar Copenhageni str. Fiocruz L1-130; identical to SEQ ID NO: 35611
  CDS (1)..(1272): transl_table=11

SEQ ID NO: 51290 - protein, 423 aa, Leptospira interrogans serovar Copenhageni str. Fiocruz L1-130; identical to SEQ ID NO: 35612

SEQ ID NO: 51291 - DNA, 819 bp, Leptospira interrogans serovar Copenhageni str. Fiocruz L1-130; identical to SEQ ID NO: 35613
  CDS (1)..(819): transl_table=11

SEQ ID NO: 51292 - protein, 272 aa, Leptospira interrogans serovar Copenhageni str. Fiocruz L1-130; identical to SEQ ID NO: 35614

SEQ ID NO: 51293 - DNA, 1320 bp, Caenorhabditis briggsae; identical to SEQ ID NO: 35615
  CDS (1)..(1320)

SEQ ID NO: 51294 - protein, 439 aa, Caenorhabditis briggsae; identical to SEQ ID NO: 35616

SEQ ID NO: 51295 - DNA, 720 bp, Homo sapiens; identical to SEQ ID NO: 35617
  CDS (1)..(720)

SEQ ID NO: 51296 - protein, 239 aa, Homo sapiens; identical to SEQ ID NO: 35618

SEQ ID NO: 51297 - DNA, 720 bp, Homo sapiens; identical to SEQ ID NO: 35619
  CDS (1)..(720)

SEQ ID NO: 51298 - protein, 239 aa, Homo sapiens; identical to SEQ ID NO: 35620

SEQ ID NO: 51299 - DNA, 24 bp, Artificial sequence
  Primer sequence
atggtagcgacatcttcaaagagg

SEQ ID NO: 51300 - DNA, 23 bp, Artificial sequence
  Primer sequence
ttactccggagagttggcgctta

SEQ ID NO: 51301 - protein, 380 aa, Artificial sequence; identical to SEQ ID NO: 35623
  Consensus
  Variant (2)..(9): Xaa in position 2 to 9 is any amino acid
  Variant (10)..(11): Xaa in position 10 to 11 is any or no amino acid
  Variant (13)..(13): Xaa in position 13 is any amino acid
  Variant (15)..(18): Xaa in position 15 to 18 is any amino acid
  Variant (20)..(21): Xaa in position 20 to 21 is any amino acid
  Variant (24)..(24): Xaa in position 24 is any amino acid
  Variant (27)..(28): Xaa in position 27 to 28 is any amino acid
  Variant (30)..(31): Xaa in position 30 to 31 is any amino acid
  Variant (32)..(33): Xaa in position 32 to 33 is any or no amino acid
  Variant (35)..(36): Xaa in position 35 to 36 is any amino acid
  Variant (38)..(38): Xaa in position 38 is any amino acid
  Variant (40)..(41): Xaa in position 40 to 41 is any amino acid
  Variant (43)..(45): Xaa in position 43 to 45 is any or no amino acid
  Variant (47)..(52): Xaa in position 47 to 52 is any amino acid
  Variant (53)..(53): Xaa in position 53 is any or no amino acid
  Variant (55)..(59): Xaa in position 55 to 59 is any amino acid
  Variant (61)..(62): Xaa in position 61 to 62 is any amino acid
  Variant (64)..(64): Xaa in position 64 is any amino acid
  Variant (66)..(67): Xaa in position 66 to 67 is any amino acid
  Variant (69)..(75): Xaa in position 69 to 75 is any amino acid
  Variant (76)..(90): Xaa in position 76 to 90 is any or no amino acid
  Variant (93)..(94): Xaa in position 93 to 94 is any amino acid
  Variant (96)..(97): Xaa in position 96 to 97 is any amino acid
  Variant (99)..(105): Xaa in position 99 to 105 is any amino acid
  Variant (106)..(128): Xaa in position 106 to 128 is any or no amino acid
  Variant (130)..(137): Xaa in position 130 to 137 is any amino acid
  Variant (139)..(143): Xaa in position 139 to 143 is any amino acid
  Variant (145)..(151): Xaa in position 145 to 151 is any amino acid
  Variant (153)..(166): Xaa in position 153 to 166 is any amino acid
  Variant (167)..(214): Xaa in position 167 to 214 is any or no amino acid
  Variant (216)..(217): Xaa in position 216 to 217 is any amino acid
  Variant (219)..(219): Xaa in position 219 is any amino acid
  Variant (221)..(221): Xaa in position 221 is any amino acid
  Variant (222)..(222): Xaa in position 222 is any or no amino acid
  Variant (224)..(228): Xaa in position 224 to 228 is any amino acid
  Variant (229)..(265): Xaa in position 229 to 265 is any or no amino acid
  Variant (267)..(268): Xaa in position 267 to 268 is any amino acid
  Variant (270)..(271): Xaa in position 270 to 271 is any amino acid
  Variant (273)..(274): Xaa in position 273 to 274 is any amino acid
  Variant (276)..(296): Xaa in position 276 to 296 is any amino acid
  Variant (297)..(311): Xaa in position 297 to 311 is any or no amino acid
  Variant (313)..(314): Xaa in position 313 to 314 is any amino acid
  Variant (316)..(337): Xaa in position 316 to 337 is any amino acid
  Variant (338)..(364): Xaa in position 338 to 364 is any or no amino acid
  Variant (366)..(378): Xaa in position 366 to 378 is any amino acid
  Variant (379)..(379): Xaa in position 379 is any or no amino acid

SEQ ID NO: 51302 - protein, 46 aa, Artificial sequence; identical to SEQ ID NO: 35624
  Consensus
  Variant (2)..(4): Xaa in position 2 to 4 is any or no amino acid
  Variant (6)..(13): Xaa in position 6 to 13 is any amino acid
  Variant (14)..(14): Xaa in position 14 is any or no amino acid
  Variant (16)..(17): Xaa in position 16 to 17 is any amino acid
  Variant (18)..(18): Xaa in position 18 is Phe, Ile, Leu or Val
  Variant (19)..(19): Xaa in position 19 is any amino acid
  Variant (20)..(20): Xaa in position 20 is Ile, Leu or Val
  Variant (21)..(22): Xaa in position 21 to 22 is any amino acid
  Variant (24)..(24): Xaa in position 24 is any amino acid
  Variant (25)..(25): Xaa in position 25 is Phe, Ile or Leu
  Variant (26)..(27): Xaa in position 26 to 27 is any amino acid
  Variant (28)..(28): Xaa in position 28 is Phe, Ile, Leu or Val
  Variant (29)..(29): Xaa in position 29 is Pro or Ser
  Variant (30)..(31): Xaa in position 30 to 31 is any amino acid
  Variant (32)..(32): Xaa in position 32 is Ile, Leu or Val
  Variant (33)..(37): Xaa in position 33 to 37 is any amino acid
  Variant (39)..(45): Xaa in position 39 to 45 is any amino acid
  Variant (46)..(46): Xaa in position 46 is Asn or Ser

SEQ ID NO: 51303 - DNA, 705 bp, Escherichia coli
  CDS (1)..(705)
atggaattttctccccctctacagcgcgcgacgctaattcagcgttacaaacgttttttagccgatgtgatcacacccgatggtcgcgaattaacgctacactgcccgaatacgggtgcgatgaccggttgtgcaacgcctggcgataccgtctggtattcgacttcagacaacaccaaacggaaatacccacacacctgggaattaactcaaagccagagcggcgcatttatttgcgtcaacacgctttgggctaacaggttgacgaaagaggctatccttaatgaatcaatttcagaactgtcaggctatagctcgctgaaaagcgaagtaaaatacggcgcagaacgcagccgtattgactttatgttgcaggcggattcgcgtccagactgctatattgaagtgaaatcggttacgttagcggagaacgaacagggatattttcccgatgcggtcactgaacgaggtcagaaacaccttcgggagttgatgagcgtagcggctgaaggccagcgtgcggttatctttttcgccgtgctgcattcagccattacacggttttcacccgcgcgccacatcgatgagaaatacgcgcaactattgtcagaagctcaacagaggggggtagaaattctggcttacaaagcggaaatttctgctgaaggcatggctcttaaaaaatcactgccggttacattgtag

SEQ ID NO: 51304 - protein, 234 aa, Escherichia coli
MEFSPPLQRATLIQRYKRFLADVITPDGRELTLHCPNTGAMTGCATPGDTVWYSTSDNTKRKYPHTWELTQSQSGAFICVNTLWANRLTKEAILNESISELSGYSSLKSEVKYGAERSRIDFMLQADSRPDCYIEVKSVTLAENEQGYFPDAVTERGQKHLRELMSVAAEGQRAVIFFAVLHSAITRFSPARHIDEKYAQLLSEAQQRGVEILAYKAEISAEGMALKKSLPVTL

SEQ ID NO: 51305 - DNA, 636 bp, Thermoplasma acidophilum DSM 1728
  CDS (1)..(636): transl_table=11
ttgaagaggatcaacaggttcgccgtacagatcgatgtggaaggcaggacggaactggcgcatctgcacgatcctggcaggcttctggagatcgtttatcccggaaatgaggtccttgtgaggaggacggatggcccaaagctgaaatggaggattgagttcgggaagatcaacggaagatacgtgttaatagattccgggctgcactcggatatagccagaaggttccttcccgagggcgcggttccagaggtcagggttggaaggaaacgaatagatttcaggtacggggacgattacatagaggtcaaggggtgcaccctcatggcgaacggaatcgccatgtttccagacgctcctacgaagaggggcctggaacacctgaagacgctcgaaacgctcgcctcatcaggatacagatcgcatgtaatgatgataataaccagggacgacgtgagatgcttctaccccaacttcgaaaccgatcccaagttcgcagaggcgttcctgaggctggtgccggcatacgtgaaggcacacttcctgaccttcggcttcgacggcctttacctgaggtatgccggcagcatcggcctctgcgctgatgtcggtcatggcaccaacggaagattgtga

SEQ ID NO: 51306 - protein, 211 aa, Thermoplasma acidophilum DSM 1728
MKRINRFAVQIDVEGRTELAHLHDPGRLLEIVYPGNEVLVRRTDGPKLKWRIEFGKINGRYVLIDSGLHSDIARRFLPEGAVPEVRVGRKRIDFRYGDDYIEVKGCTLMANGIAMFPDAPTKRGLEHLKTLETLASSGYRSHVMMIITRDDVRCFYPNFETDPKFAEAFLRLVPAYVKAHFLTFGFDGLYLRYAGSIGLCADVGHGTNGRL

SEQ ID NO: 51307 - DNA, 837 bp, Prochlorococcus marinus str. MIT 9313
  CDS (1)..(837): transl_table=11
ttgggcctcagaccatctgatcatttagcagcattctcaagccctgcaagcatccccatgaccaaggccatcccggaaggattgttagggagtccactgctcacattcccaccactcgatgaaggaatattggtgaagcgctacaagcgcttccttgccgatgtggagctagtcagcggcgaaatcgtgacagcccactgcgccaacacaggccccatgactggtgttcttcatcctggaggcagagtgagaatccgccatgcgccttctcccaagcgcaagttggcctggacatgggagcaagcggaggcacccagcgcccagggcggcctctgctgggtgggtatcaacacagccttggccaatagcctgatcagagcagcgattgaagccggacacctcaagcaagtcctcggtccgatcgcagcaatccgtgcggaagtgacttatggaagcaaccgacgcagccgcattgacctgtttttaacccctgatgccaattgctccgacaccagacccatttacttagaggtcaagaacaccacctggatcgaagactccttagccctctttcccgacacggtgacagaacgagggcaaaaacatctcaaagagctaatcggtgtgctgccagagtccagagcagtcttggtgccctgcctcagccgccacgatgtccaagcgttcgccccaggggatagcgcagaccctcgctatggcgaactctttcgtctggctcttacagctggcgtggaagtcattccctgttgcttcggatttcacctcgacaagatcacctgggaaggccttaggcctaccaagacgacacagagttga

SEQ ID NO: 51308 - protein, 278 aa, Prochlorococcus marinus str. MIT 9313
MGLRPSDHLAAFSSPASIPMTKAIPEGLLGSPLLTFPPLDEGILVKRYKRFLADVELVSGEIVTAHCANTGPMTGVLHPGGRVRIRHAPSPKRKLAWTWEQAEAPSAQGGLCWVGINTALANSLIRAAIEAGHLKQVLGPIAAIRAEVTYGSNRRSRIDLFLTPDANCSDTRPIYLEVKNTTWIEDSLALFPDTVTERGQKHLKELIGVLPESRAVLVPCLSRHDVQAFAPGDSADPRYGELFRLALTAGVEVIPCCFGFHLDKITWEGLRPTKTTQS

SEQ ID NO: 51309 - DNA, 780 bp, Desulfotalea psychrophila LSv54
  CDS (1)..(780): transl_table=11
gtgccaccctctttagcaccaaggcaattgatatgcaatataaattttacttatagaagagatacttatatggacttctcacaaggactcaccccggcaagactcatcagaagatataaacggtttttagcggatgtagagatcgaagatggtacgatcataacagtctactgccccaatacgggcaccatgcgtacctgctcaacacctaacagccccgttatgctctccatctccgacaaccccaagagaaaatacgcccacaccctggagatgatctttgaaaatcacacttggataggagttaacacagggcggacaaatagcatcgtcgcaaaggccattctcaatggcagtatagctgaattttctggagctaccaaggtgcagcgagagataaccgtctccaagggcagtcgattagacctccttgtagaccatgcggatcaaaaaagctatattgaaattaaaaattgttccatggcggaaaatcgaagggcaatgttccccgatgcagtcactgcccgcggcacaaagcacctacgagagcttatcaaattagtgaagcaaggagaaaatgcctacatattctttcttatccaacgagaggacgccgattccttctcgccggcaacccacatagatcccctctacgccaacacgctgaaagaagcactgcaacaaggagtgcaggcactggcctaccaggcaagcgtcattctccgagcgcttccaatcatcctcaacggcagtaactctcctcacctgccacaaaggtaa

SEQ ID NO: 51310 - protein, 259 aa, Desulfotalea psychrophila LSv54
MPPSLAPRQLICNINFTYRRDTYMDFSQGLTPARLIRRYKRFLADVEIEDGTIITVYCPNTGTMRTCSTPNSPVMLSISDNPKRKYAHTLEMIFENHTWIGVNTGRTNSIVAKAILNGSIAEFSGATKVQREITVSKGSRLDLLVDHADQKSYIEIKNCSMAENRRAMFPDAVTARGTKHLRELIKLVKQGENAYIFFLIQREDADSFSPATHIDPLYANTLKEALQQGVQALAYQASVILRALPIILNGSNSPHLPQR

SEQ ID NO: 51311 - DNA, 666 bp, Thermus thermophilus HB8
  CDS (1)..(666): transl_table=11
atggagcttccccttcctcccctccttccctgccggatcctccggcgggcgaaccggttcgtggtggaggcggacgtgggccccctccacctcgccaacacgggccgcctcaccgagcttctcctccccggaacccggggccactaccacccgaggcccacggccaagacccgggggcggctttacctggtggagcgggaaggcgtcctcgtgggggtggacgccaccctggcggggccccttctggaaaggctccttcgcgccgggcgctacggacccctggaggccttgcggcgggaggtggggctacaaggggaaaggctggacttctgggcccgggtggggggaagggaggccttctttgaggccaagaacgcgaaccggctggagggggccctcgccctcttccccgacgcccccacctcgaggggggcgcgccaccttcgcctcctcgccgccttggcccgggaggggtacggggccttcgccgtctggctcgtccagcaccccctggccgaggcctttgccctggaccccgcggaccgggccctcctcgaggccgcccaagcggcgcgggaggccggggtggtcctggaggcctatagggttcggccgagcctggaggccctccgcctcgaggcccccctcccctgggtctggctctaa

SEQ ID NO: 51312 - protein, 221 aa, Thermus thermophilus HB8
MELPLPPLLPCRILRRANRFVVEADVGPLHLANTGRLTELLLPGTRGHYHPRPTAKTRGRLYLVEREGVLVGVDATLAGPLLERLLRAGRYGPLEALRREVGLQGERLDFWARVGGREAFFEAKNANRLEGALALFPDAPTSRGARHLRLLAALAREGYGAFAVWLVQHPLAEAFALDPADRALLEAAQAAREAGVVLEAYRVRPSLEALRLEAPLPWVWL

SEQ ID NO: 51313 - DNA, 720 bp, Dehalococcoides ethenogenes 195
  CDS (1)..(720): transl_table=11
atgtaccaatttgatgagcctcttatcagaggcacaatgctaaaaagaaaaagtcagttcactgctgtcgttcagattgacggcgaggagctgatcgcacatataccgacaacaaaccggatcggagacgtggagaataagaatctaccttgtctgctttcttatcatccagatccgaagcgaaagctgcattatgacattgaggccgtgcttctgtcggatgatgacaactgggtgggcatcaatcagattctctccaacaggctggtggagcatttctttcgggagcatgagctggataaaattgtggcggagtatgacgatatacaaagagaggtcaagctcggtatctccaagctggactttaaggtcggtgacacataccttgaggtgaagacaccactcactaccatcaatgtgaaatacggcgagaccatcaagacgttgccgccgaagccgttctcatcgacagaccggatggtcaagcacgtgaacgagctggcaggctctctttcggagcacgagagagcgatcttcctgcaggtgtatcagtatcgcatcaccgaacgcaaggagcgactgcgctcgacgcattatgaggaggtctctgagacgatccacagggctgccgaacagggcgtggagttctgggaaatccagatggactttcgaccggagggtgtgagtctttataatgtggagagaagtacagatttatag

SEQ ID NO: 51314 - protein, 239 aa, Dehalococcoides ethenogenes 195
MYQFDEPLIRGTMLKRKSQFTAVVQIDGEELIAHIPTTNRIGDVENKNLPCLLSYHPDPKRKLHYDIEAVLLSDDDNWVGINQILSNRLVEHFFREHELDKIVAEYDDIQREVKLGISKLDFKVGDTYLEVKTPLTTINVKYGETIKTLPPKPFSSTDRMVKHVNELAGSLSEHERAIFLQVYQYRITERKERLRSTHYEEVSETIHRAAEQGVEFWEIQMDFRPEGVSLYNVERSTDL

SEQ ID NO: 51315 - DNA, 714 bp, Thermococcus kodakarensis KOD1
  CDS (1)..(714): transl_table=11
atggcgaagcccgtactgctcaccctaaacgtcgttccatgcacgttccttaagcgtctcaaccgcttcgttgctctagtcgaggtaaacggtgagaccaggaaagcattggtaacgaacactggaagattagaagagttcatgatccctggcagaaaagccttctgcgttccgaaggaaggggggaagactgactttgttttagtcgcattcgaagatgaagagggcaaaggagcagtgatcgacaccagaacgcaggcaagagcctttgagagggcccttgagctaggtctcgtcccctggctcagggactgttccataaagaagaaggagatcaaagtcggaagctcccgcctcgactacctctttgaatgtcccggcggtgatgtctacgccgagatgaagagtgccgtcctaaggggcggtgagaaaggggaatatgcaatgtaccctgactgtccatcaacgagggggcagagacacataagggagctcatcgagctgtcgaaagctggaaagagggccatgatattcttcatcggcgcaatgccaggtgttgaaaagttcaggccttacgagaaaggcgaccccgagatagcgaggctcctcaaaggggccagaaaagcgggcgttgaaatccacgccctcagcatctcactcctgcccgatggaaaaatcgtcctcgaaaggcccgagcttgaggttgaagtatga

SEQ ID NO: 51316 - protein, 237 aa, Thermococcus kodakarensis KOD1
MAKPVLLTLNVVPCTFLKRLNRFVALVEVNGETRKALVTNTGRLEEFMIPGRKAFCVPKEGGKTDFVLVAFEDEEGKGAVIDTRTQARAFERALELGLVPWLRDCSIKKKEIKVGSSRLDYLFECPGGDVYAEMKSAVLRGGEKGEYAMYPDCPSTRGQRHIRELIELSKAGKRAMIFFIGAMPGVEKFRPYEKGDPEIARLLKGARKAGVEIHALSISLLPDGKIVLERPELEVEV

SEQ ID NO: 51317 - DNA, 708 bp, Vibrio fischeri ES114
  CDS (1)..(708): transl_table=11
atgaaatttgaacctgaattagaatctgggaagctaataaaacgctataaacgctttttagctgatattaaacttgacgataatagtgagcgcacaattcattgcgctaacactggagcaatgactggctgtgcagagcctgacagtacggtgtttttttcaacatccagtaacctcaagcgcaaataccctaacagttgggagctcagcgtcacagaaaacaatcacacaatatgcgttaatacccttcgatctaatcaattagttgtcgaggcgattcaagatcagaacataaaagaactgactgaatatgacgagctaaaaaccgaagtaaaatacggctcagagaacagtcgaattgatattttacttactggtaaatcgttacctgactgctatattgaagtgaagagcgtcacattattaagtgaatcgggtcaaggtttctttccagatgccgttacaacccgtggccaaaaacacttaagggaattaagcgaaatggcacaacttggccataaagccatattatttttcgctgttttacattcgggtattgaaaaagtctcaatcgcacaccatatagaccagcaatatcattctttattaattgatgcgattgaaaatggggtcaatattctctgctaccaagcagagatgtcatcaaaagagatgaagatcgtacgcaagctaccttttagtatttag

SEQ ID NO: 51318 - protein, 235 aa, Vibrio fischeri ES114
MKFEPELESGKLIKRYKRFLADIKLDDNSERTIHCANTGAMTGCAEPDSTVFFSTSSNLKRKYPNSWELSVTENNHTICVNTLRSNQLVVEAIQDQNIKELTEYDELKTEVKYGSENSRIDILLTGKSLPDCYIEVKSVTLLSESGQGFFPDAVTTRGQKHLRELSEMAQLGHKAILFFAVLHSGIEKVSIAHHIDQQYHSLLIDAIENGVNILCYQAEMSSKEMKIVRKLPFSI

SEQ ID NO: 51319 - DNA, 714 bp, Pseudomonas syringae pv. syringae B728a
  CDS (1)..(714): transl_table=11
atgcgtttttctccgcagcttgaacagggtcgtctgctggtgcgttacaagcgctttctcgctgatatcgaaaccgatagcggtgaattgctgaccattcactgccctaacaccggttcgatgctcaactgcatgatgcccggcgggcgcgtgtggttcagtcgctcgaatgaccccaagcgcaaactgccgggcacttgggaaatcagcgaaaccccgcagggtcgcctggcctgtatcaataccggacgggccaatacgctggttgaagaggcgttgcgcgccggggtcatcagcgaactgacggggttcacggcgctcaagcgcgaggtggcctacggacaggaaaaaagtcgtgtggactttcgtctggagtacccggatggctatctgtatctggaagtgaaaagtgtcactctgggattcgatggttccagcgtggcggcattccccgatgcggtgacccagcgcggcgcgcggcacctgcgcgaactggcgacgctggcgcgcgaaggcgtgcgcgccgtgctgttgtattgcgtcaatctcaccggtatcgacgctgtgcggccggcgcaggagattgatcctgcctacgcagcggcattgcgtgaagccatcgatgccggtgtgcaaattctcgcctacggtgcgcaactgacgtcggaagagatttttatcgaccggcgcctgcaggtgcacgggctggattga

SEQ ID NO: 51320 - protein, 237 aa, Pseudomonas syringae pv. syringae B728a
MRFSPQLEQGRLLVRYKRFLADIETDSGELLTIHCPNTGSMLNCMMPGGRVWFSRSNDPKRKLPGTWEISETPQGRLACINTGRANTLVEEALRAGVISELTGFTALKREVAYGQEKSRVDFRLEYPDGYLYLEVKSVTLGFDGSSVAAFPDAVTQRGARHLRELATLAREGVRAVLLYCVNLTGIDAVRPAQEIDPAYAAALREAIDAGVQILAYGAQLTSEEIFIDRRLQVHGLD

SEQ ID NO: 51321 - DNA, 717 bp, Haemophilus influenzae 86-028NP
  CDS (1)..(717): transl_table=11
atgcaacttccagctttacaatcggcaaaattaattcgtcgttacaaacgctttcttgcggatattgaactaccaactggtgatgtgatgacaattcattgcgccaatacaggtgcgatgactggctgcggtgaaaaaggcgataccatttggtattcacattctgatagccaaacccgcaaatatccccattcttgggagctcacacaacttgcaaatggacaactttgttgtatcaatacgcatcgttctaatcagcttgtctttgaagcattgcaaaataaacaaatcaaagaattagcaatgtatgatgaaatttatcctgaagtgaaatacggcgaagaaaatagccgaattgatttcttactaaaaggcgagggtttgcctgattgttatgtagaagtgaaatcaatcacgcttgtaaaaggtaatttaggtatgttccccgatgcggttactacgcgtggacaaaaacacgttcgtgaattactcgcaatgaaaaaacaaggtcatagagcagtggtgctatttgctgggttacataatgggtttgatcgtttcaaaatcgcagaatatatcgatcctgaatatgatcgcttattaaaagaagcaatggaacaaggcgttgaagcctatgcttatgcgggacaatttgaaatttctaatgaaattcctaccgcactttctttgacagaatcggtgccttatataaaataa

SEQ ID NO: 51322 - protein, 238 aa, Haemophilus influenzae 86-028NP
MQLPALQSAKLIRRYKRFLADIELPTGDVMTIHCANTGAMTGCGEKGDTIWYSHSDSQTRKYPHSWELTQLANGQLCCINTHRSNQLVFEALQNKQIKELAMYDEIYPEVKYGEENSRIDFLLKGEGLPDCYVEVKSITLVKGNLGMFPDAVTTRGQKHVRELLAMKKQGHRAVVLFAGLHNGFDRFKIAEYIDPEYDRLLKEAMEQGVEAYAYAGQFEISNEIPTALSLTESVPYIK

SEQ ID NO: 51323 - DNA, 744 bp, Sulfolobus acidocaldarius DSM 639
  CDS (1)..(744): transl_table=11
ttgagatatttcttcctgaagttatatctcacattcagtccctacaccgctcctcatagatcagatatgaccacttcatcatttgttgtttatgatttcgacactccattatttgaagatattgttaaagaacggataaatagatttgttgttataacgcagtccggaaaattgtgccacttacacgacccaggaagactcaaggaattgatatacccaggcaataggattttgataagagagcataaaggaaggaaaactaactatatggttctagctgcccactctggtacaggatgggttgtaacagatagttccattcataataaaatagcgagaaattttcttccctctgacgtcaaatcagaggtcaaggtgaataactcaaggttagatttctattacgataacacatttgttgaggtgaagggctgtagtttagtggttgacggtaaagcactatttcctgatgcgcctactgagagaggtaaaaggcatttagaagaactgataaagctaaaaatgcaaggttatagatcgttgatcttgatcctggtcatgagagacgacgctatctgtttttctccgaattggaagactgacaagaaattttcaatggcattcaagaacgcagtcgaagaaggagttgaagttacaataaagttacttaaacttatagacaataagatatggtacattaaggatattcagctatgtcctgatgcgtttaattactctcactag

SEQ ID NO: 51324 - protein, 247 aa, Sulfolobus acidocaldarius DSM 639
MRYFFLKLYLTFSPYTAPHRSDMTTSSFVVYDFDTPLFEDIVKERINRFVVITQSGKLCHLHDPGRLKELIYPGNRILIREHKGRKTNYMVLAAHSGTGWVVTDSSIHNKIARNFLPSDVKSEVKVNNSRLDFYYDNTFVEVKGCSLVVDGKALFPDAPTERGKRHLEELIKLKMQGYRSLILILVMRDDAICFSPNWKTDKKFSMAFKNAVEEGVEVTIKLLKLIDNKIWYIKDIQLCPDAFNYSH

SEQ ID NO: 51325 - DNA, 714 bp, Pseudomonas fluorescens Pf-5
  CDS (1)..(714): transl_table=11
atgcgcttcgatcctcccctggaagaggggcgtctgctgcgtcgttacaagcgcttcctggcagacatcgaaaccaccaccggcgagctgttgaccatccattgccccaataccggctcgatgctcaattgcatggtcgagggcgggcaggtgtggttcagccgctccaatgaccccaagcgcaagttgccgggcacctgggaaatcagcgaaacccctcaaggccgcctggcctgcgtcaacaccgggcgggccaacgggctggtggaagaagccttgcgggcggggcttatcagcgagttgaacggcttcaccgggctcaagcgcgaggtgccttacgggcaagagaacagccgtatcgattttcgcctggattacccggacggtccggcgtacgtcgaggtcaaaagcgtcaccctgggcttcgatggcacgccggtggcagcgtttcccgatgccgtgacccagcgcggcgccaagcatctgcgggaactggcgagcctggcccgggagggcgtgcgggcggttcagctgtattgcgtcaacctttcgggtatcgacgcggtgcggccggcgcaggagatcgatccgggttacgccgctgccctgcgcgaagcccgcgcggcgggggttgaggtgctggcctatggagtgtgcctaacggccgagcaagtgttcatcgaccgacgtcttgaggtgttgctcggggattag

SEQ ID NO: 51326 - protein, 237 aa, Pseudomonas fluorescens Pf-5
MRFDPPLEEGRLLRRYKRFLADIETTTGELLTIHCPNTGSMLNCMVEGGQVWFSRSNDPKRKLPGTWEISETPQGRLACVNTGRANGLVEEALRAGLISELNGFTGLKREVPYGQENSRIDFRLDYPDGPAYVEVKSVTLGFDGTPVAAFPDAVTQRGAKHLRELASLAREGVRAVQLYCVNLSGIDAVRPAQEIDPGYAAALREARAAGVEVLAYGVCLTAEQVFIDRRLEVLLGD

SEQ ID NO: 51327 - DNA, 699 bp, Candidatus Pelagibacter ubique HTCC1062
  CDS (1)..(699): transl_table=11
atggaatttaccaaagctttaataaaaggcaaactgatcaaacgttataagaggttttttgcagacgttaaaattggcaaggaaattgttacggcacattgccctaatactggatctatgaagggcttattagatgaaggaaatatggtttatgtatctaaaaatgatgacccaaaaagaaagttaaaatatacccttgaaataattaaagttaaaaaaaatttagttggtgttaatactcattttgcaaataaaattgccttccatggtttagtaaataatctagttaaagaagttgcaaacaatgacagtatcaaggctgaggtattttttgataaagaaacacggtttgattttttagttgaaaaaaataaacaaaaaatatttgtagaagttaaaaatgttactttattcagagaagaaaaaactgcagaatttccagatgccgttaccactagagggtcaaagcatttaaaaacacttatagaggcggttaaaaagggctataaatcctatctattatttttagtccaaatagagggtgtggataattttaaaatagcaaaagacattgataaagaatattatgaaaattatttacttgcaaaaaaagctggagttaactttttggcttatcaatgtaaaataaattcaaaagaaattaaaatagataaaaaaattaaaattattaatgcctga

SEQ ID NO: 51328 - protein, 232 aa, Candidatus Pelagibacter ubique HTCC1062
MEFTKALIKGKLIKRYKRFFADVKIGKEIVTAHCPNTGSMKGLLDEGNMVYVSKNDDPKRKLKYTLEIIKVKKNLVGVNTHFANKIAFHGLVNNLVKEVANNDSIKAEVFFDKETRFDFLVEKNKQKIFVEVKNVTLFREEKTAEFPDAVTTRGSKHLKTLIEAVKKGYKSYLLFLVQIEGVDNFKIAKDIDKEYYENYLLAKKAGVNFLAYQCKINSKEIKIDKKIKIINA

SEQ ID NO: 51329 - DNA, 714 bp, Colwellia psychrerythraea 34H
  CDS (1)..(714): transl_table=11
atgatacttcaagtgcaacccgccaaattaattaagcgttataaacgctttctagctgatattgaacttaattgtggtgaggaaacaaccatacattgtgctaacacgggtgcgatgaaaggttgtgcagagcccgatgatactgtttggtacaccacctcaaccaatactaagcgaaaatatccatttagctgggagatcacccaaagccaagatgaccattttatttgcgtcaacaccttgcgcgctaatcagttggtggaagaggcgttacacttagatttaatcaaagaattatctggcttcaatgaattaaaacgagaagtaaaatacggcaatgaaaacagccgagttgattttttagcaacttataataatgcccctgacacatatattgaagttaaatcagtcacattattagagagtggtcatggctatttccctgatgcggttaccacacgtggacaaaaacacttacgtgaattaatggacatggtcgcacaaggacacaaggctgttttattatttgccgttttacatagtggcatcaatgatatttctgccgctagtcatgttgatccaatttatgcaaaattactcaaagaagctcgccttgccggtgttgaaataatcgcctataaagcaggtttttcactacaactcggagagctagatgttaagttagtagaaaaaattccctttattgaacgataa

SEQ ID NO: 51330 - protein, 237 aa, Colwellia psychrerythraea 34H
MILQVQPAKLIKRYKRFLADIELNCGEETTIHCANTGAMKGCAEPDDTVWYTTSTNTKRKYPFSWEITQSQDDHFICVNTLRANQLVEEALHLDLIKELSGFNELKREVKYGNENSRVDFLATYNNAPDTYIEVKSVTLLESGHGYFPDAVTTRGQKHLRELMDMVAQGHKAVLLFAVLHSGINDISAASHVDPIYAKLLKEARLAGVEIIAYKAGFSLQLGELDVKLVEKIPFIER

SEQ ID NO: 51331 - DNA, 714 bp, Pseudomonas syringae pv. phaseolicola 1448A
  CDS (1)..(714): transl_table=11
atgcgttttgctccgcagcttgaacagggacgcctgctgattcgttacaaacgctttctggctgatatcgaaaccgacagcggcgagctgttgaccattcactgccccaacaccggttcgatgctcaactgcatgatgcccggtgggcgtgtgtggttcagccgttcaagtgacccgaagcgcaagctgccgggcacttgggaaatcagcgagacgccgcagggcaggctggcctgtatcaacaccgggcgagccaatacgctggttgaagaggccttgcgcgccggggttatcagcgaactcgaggggtttacgacgctcaagcgcgaggtggcctacgggcaggaaaagagtcgtgtggactttcgccttgaataccctgatggctatctgtatctggaagtgaaaagtgtcacgttgggtttcgatgattccagtgtcgctgcgtttcccgacgcggttacccagcgtggtgcgcggcacttgcgtgaactggccacgctggcgcgcgagggcgtgcgggccgtgttgttgtattgcgtcaacctcaccggtatcgacgccgtgcgacccgcaaaggagatcgatccggtttacgcggctgcgttgcgcgaagccattgacgctggtgtgcaaattcttgcctacggtgtgcacctgacgccagacgaaattgttattgaccgacgactgcaggtgcactggctggattga

SEQ ID NO: 51332 - protein, 237 aa, Pseudomonas syringae pv. phaseolicola 1448A
MRFAPQLEQGRLLIRYKRFLADIETDSGELLTIHCPNTGSMLNCMMPGGRVWFSRSSDPKRKLPGTWEISETPQGRLACINTGRANTLVEEALRAGVISELEGFTTLKREVAYGQEKSRVDFRLEYPDGYLYLEVKSVTLGFDDSSVAAFPDAVTQRGARHLRELATLAREGVRAVLLYCVNLTGIDAVRPAKEIDPVYAAALREAIDAGVQILAYGVHLTPDEIVIDRRLQVHWLD

SEQ ID NO: 51333 - DNA, 777 bp, Prochlorococcus marinus str. NATL2A
  CDS (1)..(777): transl_table=11
gtgattgaaattggtgaaaccattattaagtttcctcctcttaaagagggaatattgattaagagatataagaggtttttggccgatattgagttggatgatggagaggttgttacagcgcattgtgcaaatacaggaccaatgaaaggggttttgtggcctgggcggagagtcagactcaagtattctccttcacctaaacgtaaattagattggtcttgggagcaagctgaggttcctagtcacaatgagaacaagaaatgctgggttggtattaatacatctttgcctaataagttgattaaacatttaattgaagcaaattgtttagagaggcaatttggtcaaatttcaagcattaagcctgaagttgtttatggtttagaaagaaaaagtagaattgatctattgctttatccaagcattcagaatgaagatagtagaaagatttttgtcgaggttaaaaatacaacttggtgtgaagattctttagcattgttcccagatacagtaacgactagaggtcaaaaacatttaaaagaattaatgagtgtttatccagattctcgagcagtgctaattccttgtattagtagaagcgatatagaactttttgcacctggtgaaatagcagatcctgagtatgggaggttgtttagagaggcattaactaagggtgttgaagtgattccatgcgcatttggtttctttatagatcacatcacttgggaaggtattagaccttttcagaagtcgagagaaaataaacaattttaa

SEQ ID NO: 51334 - protein, 258 aa, Prochlorococcus marinus str. NATL2A
MIEIGETIIKFPPLKEGILIKRYKRFLADIELDDGEVVTAHCANTGPMKGVLWPGRRVRLKYSPSPKRKLDWSWEQAEVPSHNENKKCWVGINTSLPNKLIKHLIEANCLERQFGQISSIKPEVVYGLERKSRIDLLLYPSIQNEDSRKIFVEVKNTTWCEDSLALFPDTVTTRGQKHLKELMSVYPDSRAVLIPCISRSDIELFAPGEIADPEYGRLFREALTKGVEVIPCAFGFFIDHITWEGIRPFQKSRENKQF

SEQ ID NO: 51335 - DNA, 723 bp, Nostoc punctiforme PCC 73102
  CDS (1)..(723)
atggattggctttaccgttacccacctttgtatccgggtattttactcaagcgttacaagcgattttttgctgacgttcaacttacttctggcgaaatagtgacagcacactgtcctaatacagggccaatgactggagtatcaactccccaaagtgctgtacagctttccaaaagtgataatcttaaccgcaaattggcttacactttagaactaattcaggtacatgacaatgagccgacttgggtaggcataaatacttttttgcccaatcgggtggtaaagctagctttggcaaaatatcttttcccagaattgggtgagtatagccaaatcaagggtgaggtggtttatggactagataaaaaaagtcgagtggattttttcttgacggggagtgatgaggaacgcccgatttatttagaagtgaaaaatacaactttgtctgaggggagactagctttatttcctgacacggagactacaagaggacaaaaacacttgcgagaactgatggcgttgctacctttaactcgtgcggtgatgctttactttatcaatcgtggtgattgtacagagttttcccctggcgatcgcacagatcctgtatatggtaaattattgcgggatgcgatcgctcttggtttagaagtcttaccttgccgttttgatatttcccccgaaggcatccgttatttgggtttggcaaaactaaaaatttaa

SEQ ID NO: 51336 - protein, 240 aa, Nostoc punctiforme PCC 73102
MDWLYRYPPLYPGILLKRYKRFFADVQLTSGEIVTAHCPNTGPMTGVSTPQSAVQLSKSDNLNRKLAYTLELIQVHDNEPTWVGINTFLPNRVVKLALAKYLFPELGEYSQIKGEVVYGLDKKSRVDFFLTGSDEERPIYLEVKNTTLSEGRLALFPDTETTRGQKHLRELMALLPLTRAVMLYFINRGDCTEFSPGDRTDPVYGKLLRDAIALGLEVLPCRFDISPEGIRYLGLAKLKI

SEQ ID NO: 51337 - DNA, 717 bp, Haemophilus somnus 129PT
  CDS (1)..(717)
atgcaattaccgaatttacaatcagcaacattacttcgccgttataaacgctttttggcagatgtagaattaaacaacggtgaaattttaacgcttcattgtgccaataccggtgcgatgacaggatgtggtgaaaaaggcgatactgtttggttttctacttctgacagcaaaacaagaaaatacccgcactcttgggaattaactcaacttaaaaatggtcaaacggtatgtatcaatactcaccgttccaatcaattaactttagaggctttgcaaaataaaatcatcacagaattagctgaatatgatgagattttgcctgaagtaaaatatggtgtagaaaatagtcgcattgattttttactcaaaggtaaaaacttaccggattgttatgtcgaagtaaaatccgttacgtttgtcaaaaatcatctcggtttgttccctgatgccgtcacaacaagaggacaaaaacacttgcgtgagcttatagcaatgaaaaagcggggacatagagcggtcgtttttttcgccggtcttcacgacggttttaatcgcttcaccgttgcaaaatctattgatcctgattatgccgaattactgcagcaagcagttaaagaaggtgttgaagtttatagctatgccgtgaaatttgatttttctcatcaaaaaccgaccgcactttatctaacaaatttagtgaattacctagaataa

SEQ ID NO: 51338 - protein, 238 aa, Haemophilus somnus 129PT
MQLPNLQSATLLRRYKRFLADVELNNGEILTLHCANTGAMTGCGEKGDTVWFSTSDSKTRKYPHSWELTQLKNGQTVCINTHRSNQLTLEALQNKIITELAEYDEILPEVKYGVENSRIDFLLKGKNLPDCYVEVKSVTFVKNHLGLFPDAVTTRGQKHLRELIAMKKRGHRAVVFFAGLHDGFNRFTVAKSIDPDYAELLQQAVKEGVEVYSYAVKFDFSHQKPTALYLTNLVNYLE

SEQ ID NO: 51339 - DNA, 729 bp, Desulfovibrio desulfuricans G20
  CDS (1)..(729)
ttgattgcctttccccgcggctgcataaccggcacattcatacggcgggtcaagcgcttcagtgtggagatggaaacggccggtgccggagcgcccgagcgggtgtggatacacagcaataactccggttccatgctggggttgctgcgcgccggtgcgcctgtgctggcatcgccggcggccaaccccgcccgcaagcttaaatggacgcaggaactggccggactggacggcatgtgggtgggcgttaatacgcagacccccaacagactgctggaagctgcttttcatgccggcagattgccgtgggcagcggggtacaccatgttccggcgtgaggcccgctgcggcgccagcaggcttgatgcccgcatggatgcgccgcaggacagcggtctgccgcctttgtgggtggagtgcaaaaacgtcaccatggtggaggacgacgtggccgcttttcccgatgcggccaccgagcgcgggcagaagcacctgcgggagatgatggagattgtgcggcaggggcagcgggccgccatgttttatctggtgcagcgtgcggacgggcattgcttcgggcctgctgattatgtggaccctgtatacgccggacttttttatgaagctgcagccgcgggcgtggaaatgtacccgcacagggcactggtgagcgaacacggcatcgatctggggccgctgttgcccgttgtgccgccgcccggcgtctga

SEQ ID NO: 51340 - protein, 242 aa, Desulfovibrio desulfuricans G20
MIAFPRGCITGTFIRRVKRFSVEMETAGAGAPERVWIHSNNSGSMLGLLRAGAPVLASPAANPARKLKWTQELAGLDGMWVGVNTQTPNRLLEAAFHAGRLPWAAGYTMFRREARCGASRLDARMDAPQDSGLPPLWVECKNVTMVEDDVAAFPDAATERGQKHLREMMEIVRQGQRAAMFYLVQRADGHCFGPADYVDPVYAGLFYEAAAAGVEMYPHRALVSEHGIDLGPLLPVVPPPGV

SEQ ID NO: 51341 - DNA, 717 bp, Haemophilus somnus 2336
  CDS (1)..(717)
atgcaattaccgaatttacaatcagcaacattacttcgccgttataaacgctttttggcagatgtagaattaaacaacggtgaaattttaacgcttcattgtgccaataccggtgcgatgacaggatgtggtgaaaaaggcgatactgtttggttttctacttctgacagcaaaacaagaaaatacccgcactcttgggaattaactcaacttaaaaatggtcaaacggtatgtatcaatactcaccgttccaatcaattaactttagaggctttgcaaaataaaatcatcacagaattagctgaatatgatgagattttgcctgaagtaaaatatggtgtagaaaatagtcgcattgattttttactcaaaggtaaaaacttaccggattgttatgtcgaagtaaaatccgttacgtttgtcaaaaatcatctcggtttgttccctgatgccgtcacaacaagaggacaaaaacacttgcgtgagcttatagcaatgaaaaaacggggtcatagagcggtcgtttttttcgcaggtcttcacgacggttttaatcgcttcaccgttgcaaaatctattgatcctgattatgccgaattactgcagcaagcagttaaagaaggtgttgaagtttatagctatgccgtgaaatttgatttttctcatcaaaaaccaaccgcactttatctaacaaatttagtgagttacctagaataa

SEQ ID NO: 51342 - protein, 238 aa, Haemophilus somnus 2336
MQLPNLQSATLLRRYKRFLADVELNNGEILTLHCANTGAMTGCGEKGDTVWFSTSDSKTRKYPHSWELTQLKNGQTVCINTHRSNQLTLEALQNKIITELAEYDEILPEVKYGVENSRIDFLLKGKNLPDCYVEVKSVTFVKNHLGLFPDAVTTRGQKHLRELIAMKKRGHRAVVFFAGLHDGFNRFTVAKSIDPDYAELLQQAVKEGVEVYSYAVKFDFSHQKPTALYLTNLVSYLE

SEQ ID NO: 51343 - DNA, 714 bp, Actinobacillus pleuropneumoniae serovar 1 str. 4074
  CDS (1)..(714)
atgcaatttccttctctttcttgcggcatattaatcaaacgttataaacgttttttagccgatattctgctgcccaacggcgagcaaattaccctacattgtccgaacaccggtgcaatgaccggctgtgctactaccggcgataccgtttggttttccacatcagataatcctaaacgcaaatatgctcacacttgggaactgactcaaactcaagcgggtgattttatttgtgtgaatacccaacgagccaaccagctggtgcaagaagcattagaaaagcgctggattgccgaactcgccgagtaccaaaccgtcttgcccgaacaaaaatacggctcggaaaacagccgcattgattttctgctcaaagcggacaatcagcccgactgttttgcagaagtgaaatccactaccttacttactgaaaacgatttggggatgttccccgatgccaaaacggaacgcgggcaaaaacacttgcgagaactggctgcgattgccgaatccgggcaacaagcggtcatactttttgcgattttacacactggcatccaacgttttgccgtggcaaaacaaattgatccgcaatatgctgccttatttgaacaagcgaaaaatgttggggtaaaagtattagcgtataaagcccaaatagaattagtactcggcaagccaatatcaatgaatttgcaattttcctgtgaaatctga

SEQ ID NO: 51344 - protein, 237 aa, Actinobacillus pleuropneumoniae serovar 1 str. 4074
MQFPSLSCGILIKRYKRFLADILLPNGEQITLHCPNTGAMTGCATTGDTVWFSTSDNPKRKYAHTWELTQTQAGDFICVNTQRANQLVQEALEKRWIAELAEYQTVLPEQKYGSENSRIDFLLKADNQPDCFAEVKSTTLLTENDLGMFPDAKTERGQKHLRELAAIAESGQQAVILFAILHTGIQRFAVAKQIDPQYAALFEQAKNVGVKVLAYKAQIELVLGKPISMNLQFSCEI

SEQ ID NO: 51345 - DNA, 717 bp, Haemophilus influenzae R2846
  CDS (1)..(717)
atgcaacttccagctttacaatcggcaaaattaattcgtcgttacaaacgctttcttgcggatattgaattgccaactggtgatgttatgacaattcattgtgcaaatactggggcgatgacaggatgtggagaaaaaggcgatacaatttggtattcacattccgatagtcaaactcgtaaatatccccattcttgggagcttactcaactcgcaaatggacagctttgctgtatcaatacgcatcgttctaatcagcttgtttttgaagcattgcaaaataagcaaatcaaagaattggcaatgtatgatgaaatttaccctgaagtgaaatacggcgaggaaaatagccgcattgatttcttactaaaaggcgagggtttgcctgattgttatgtagaagtgaaatcaatcacgcttgtaaaaggcaatttaggtatgtttcccgatgcggttactacgcgtggacaaaaacacgttcgagaattattggcaatgaaaaaacaaggtcatcgagcagtagtgctatttgctgggttacataatgggtttgatcgtttcaaaattgcggaatatatcgatcctgaatatgatcgcttattaaaagaagcaatggaacaaggtgttgaagcctatgcttatgtgggacaatttgaaatttctaatgaaattcctaccgcactttctttgatagaatcggtgccttatataaaataa

SEQ ID NO: 51346 - protein, 238 aa, Haemophilus influenzae R2846
MQLPALQSAKLIRRYKRFLADIELPTGDVMTIHCANTGAMTGCGEKGDTIWYSHSDSQTRKYPHSWELTQLANGQLCCINTHRSNQLVFEALQNKQIKELAMYDEIYPEVKYGEENSRIDFLLKGEGLPDCYVEVKSITLVKGNLGMFPDAVTTRGQKHVRELLAMKKQGHRAVVLFAGLHNGFDRFKIAEYIDPEYDRLLKEAMEQGVEAYAYVGQFEISNEIPTALSLIESVPYIK

SEQ ID NO: 51347 - DNA, 717 bp, Haemophilus influenzae R2866
  CDS (1)..(717)
atgcaacttccagctttacaatcggcaaaattaattcgtcgttacaaacgctttcttgcggatattgaactaccaactggtgatgtgatgacaattcattgtgccaatacaggtgcgatgactggctgcggtgaaaaaggcgataccatttggtattcacattctgatagccaaacccgcaaatatccccattcttgggagctcacacaacttgcaaatggacaactttgttgtatcaatacgcatcgttctaatcagcttgtctttgaagcattgcaaaataaacaaatcaaagaattagcaatgtatgatgaaatttatcctgaagtgaaatacggcgaagaaaatagccgaattgatttcttactaaaaggcgagggtttgcctgattgttatgtagaagtgaaatcaatcacgcttgtaaaaggtaatttaggtatgttccccgatgcggttactacgcgtggacaaaaacacgttcgtgaattactcgcaatgaaaaaacaaggtcatagagcagcggtgctatttgctgggttacataatgggtttgatcgtttcaaaatcgcagaatatatcgatcctgaatatgatcgcttattaaaagaagcaatggaacaaggtgttgaagcctatgcttatgcgggacaatttgaaatttctaatgaaattcctaccgcactttctttgacagaatcggtgccttatataaaataa

SEQ ID NO: 51348 - protein, 238 aa, Haemophilus influenzae R2866
MQLPALQSAKLIRRYKRFLADIELPTGDVMTIHCANTGAMTGCGEKGDTIWYSHSDSQTRKYPHSWELTQLANGQLCCINTHRSNQLVFEALQNKQIKELAMYDEIYPEVKYGEENSRIDFLLKGEGLPDCYVEVKSITLVKGNLGMFPDAVTTRGQKHVRELLAMKKQGHRAAVLFAGLHNGFDRFKIAEYIDPEYDRLLKEAMEQGVEAYAYAGQFEISNEIPTALSLTESVPYIK

SEQ ID NO: 51349 - DNA, 726 bp, Anabaena variabilis ATCC 29413
  CDS (1)..(726)
atgattgattggctctacagttacccacctttatatcctggcattttgctaaagcgctataagcgctttttcgctgatgtacaactagcttccggcgaagtcgtaacagcacattgtcccaatacaggccccatgaccggagtctcaactctagggagtgtggtacaactttctaaaagtgccaatcctaagcgtaaattggcttatactctagaactgattcaagtacacgataacgagccgacttgggtaggtgtaaatacagctttaccaaatcagatagtcaagttggctttggcaaaatacttgtttccagagttaggtagttataaccacatcaaaagtgaggtagtttacggggtagataaaaaaagtcgggtggacttctttttgacaggaagtgatacagaacgcccaatttatctagaggtaaaaaatacaacttgggcaaaagggactttagcattattccccgatacagaaaccacaaggggacaaaagcacttacgggaattaatgacgttattgccacaaacgcgatcagtaatgctgtattttattaatcgtggtgattgtacagagtttgcccctggtgatagtacagatcctatatatggtaagttgttacgagaagcgatcgccttaggtttagaagttttaccttgtcgtttcgatgttaccccagaaggcatccgttatttaggtttagcaaaactggtaatttaa

SEQ ID NO: 51350 - protein, 241 aa, Anabaena variabilis ATCC 29413
MIDWLYSYPPLYPGILLKRYKRFFADVQLASGEVVTAHCPNTGPMTGVSTLGSVVQLSKSANPKRKLAYTLELIQVHDNEPTWVGVNTALPNQIVKLALAKYLFPELGSYNHIKSEVVYGVDKKSRVDFFLTGSDTERPIYLEVKNTTWAKGTLALFPDTETTRGQKHLRELMTLLPQTRSVMLYFINRGDCTEFAPGDSTDPIYGKLLREAIALGLEVLPCRFDVTPEGIRYLGLAKLVI

SEQ ID NO: 51351 - DNA, 711 bp, Magnetospirillum magnetotacticum MS-1
  CDS (1)..(711)
atgcgttttcccgaccctctgatccgcgccacgctcatcaagcgctataagcgcttcctggccgatgtacggctggaggacggcaccgaggtcaccacccatctggccaattcgggagccatgctgggcaccgcggaacccggtatggaggtctggctgtcgcccgcctccaacccggagcgcaagttgaagtggaactgggaaatggtcaccgtggatggccatctggtgggcgtcaacaccgcgcaccccaatgccatcgtggccgaaagcgtggcggccggactcatcgccgagttgaccggctatgactccatccggcgcgaggtgaaatatggcgtcaattcccgcatcgacctgttgctggaagccgcggcgcgccccaaatgctgggtggaggtcaagaacgtccatctcaagcgcggcggctgggccgagtttcccgacgcggtcaccacgcggggcaccaagcatctggccgaactcaccgatcgggtcaaagcgggcgagcgcgccgtgatgctctatctggtccagcgcgaagactgtggcggctttcgccccgccgccgatatcgacccggtttatgcccgcgccctggcccaggcgacacgggacggcgtcgaggctatctgttatacctgccgtctgacgcccggcggcatcgacctgggcgcacccttactcatggatttgactgagcggatttga

SEQ ID NO: 51352 - protein, 236 aa, Magnetospirillum magnetotacticum MS-1
MRFPDPLIRATLIKRYKRFLADVRLEDGTEVTTHLANSGAMLGTAEPGMEVWLSPASNPERKLKWNWEMVTVDGHLVGVNTAHPNAIVAESVAAGLIAELTGYDSIRREVKYGVNSRIDLLLEAAARPKCWVEVKNVHLKRGGWAEFPDAVTTRGTKHLAELTDRVKAGERAVMLYLVQREDCGGFRPAADIDPVYARALAQATRDGVEAICYTCRLTPGGIDLGAPLLMDLTERI

SEQ ID NO: 51353 - DNA, 714 bp, Pseudomonas fluorescens PfO-1
  CDS (1)..(714)
atgcgctttcatcctcctcttgaagaaggccggttgatccggcgttacaagcgttttctcgccgatatcgaaaccgttggcggcgagttgctgaccattcattgccccaataccggctcgatgctcaattgccaggtcgagggcgggcaggtctggttcagccgctccaatgatccgaagcgcaagctgcccggtacctgggaagtcggcgaaaccccgcagggccggctgttttgcgtgaataccggacgcgccaacgcactggtcgaagaagccttgcaggcgggtgtcatcaatgagttgaacggtttcaccgggctcaagcgcgaagtggcgtatggacaggaaaagagtcggatcgattttcgcctcgactatccgacgggcccggcctacgtggaagtgaagagtgtcacgctgggtttcgacggaacggcagtggcggcgtttcccgatgcggtgacagagcgcggcgccaagcatttgcgtgagctggcgcatctggcgcgggacgggattcgtgcggtgcagttgtactgcgtcaatctcacgggagtcgaggcggtgcgtccagccgaggaaatcgacttcgcctacgccgctgcgctgcgtgaggcggtggcgtgcggggtcgaagtcctggcgtacggcgtgcggttgagccatgaagagatggtgatcgaccggcggctggacgtgctgctcaacggttag

SEQ ID NO: 51354 - protein, 237 aa, Pseudomonas fluorescens PfO-1
MRFHPPLEEGRLIRRYKRFLADIETVGGELLTIHCPNTGSMLNCQVEGGQVWFSRSNDPKRKLPGTWEVGETPQGRLFCVNTGRANALVEEALQAGVINELNGFTGLKREVAYGQEKSRIDFRLDYPTGPAYVEVKSVTLGFDGTAVAAFPDAVTERGAKHLRELAHLARDGIRAVQLYCVNLTGVEAVRPAEEIDFAYAAALREAVACGVEVLAYGVRLSHEEMVIDRRLDVLLNG

SEQ ID NO: 51355 - DNA, 738 bp, Rhodospirillum rubrum
  CDS (1)..(738)
atgctgtttcccacgccgctggtcgaaggccggctggtcaagcgctacatgcggttcctggccgatgtgatcttggacgatggcaccgccgtgaccgcccattgcgccaattcgggatcgatggcctcggtcaaggagccgggatcgccggtctggctttccgaaagccccaatcccgaccgcaagctgaaatacacctgggagatcatccgcgttggcgacgcctattccggcgtcaacaccggcacgcccaatgccgtggtcgccgaggccatcgccgagggcaagatcccgccgcttgccggctatgcccgcctgcgccgcgaggtcaaatacggcaagacctcgcgcatcgacatcctgctcgaggatgatgccgccgccgacgacgcccccgcccgcccgcgctgctatgtcgaggtcaagaacgtcaccctcaagcgcgatccggcctgggatggccccatcgattttcccgacgcggtgacgacgcgcggcgccaagcaccttctcgaactggccgatatggtcgaccagggccaccgcgccgccatggtctatctggtccagcgcaccgatggcggcgccgtcgccatggccgccgacatcgatcccgcctatgccgccggcctgaagaccgccatcgccaagggcgtcgaggtctattgcctgggctgcgaggtcgaccccttgcgcggcatctgggtcaaccgcgccctgccgctgatcgccccttaa

SEQ ID NO: 51356 - protein, 245 aa, Rhodospirillum rubrum
MLFPTPLVEGRLVKRYMRFLADVILDDGTAVTAHCANSGSMASVKEPGSPVWLSESPNPDRKLKYTWEIIRVGDAYSGVNTGTPNAVVAEAIAEGKIPPLAGYARLRREVKYGKTSRIDILLEDDAAADDAPARPRCYVEVKNVTLKRDPAWDGPIDFPDAVTTRGAKHLLELADMVDQGHRAAMVYLVQRTDGGAVAMAADIDPAYAAGLKTAIAKGVEVYCLGCEVDPLRGIWVNRALPLIAP

SEQ ID NO: 51357 - DNA, 783 bp, Microbulbifer degradans 2-40
  CDS (1)..(783)
ttggcggaaaaacaaagcgtgcaagctaccagaagaattgccgctgcgctagcctttttggccgttttggaggccccgttaatgaagtttgagtaccccttgatacctgcaacactgttgcgacgttacaaacgctttctcgcggatgttgagttaagcgacggaagcacaataacagtgcactgcccaaacaccggtagcatgcgtaattgtattgtggaaaacagcccctgttggctgctggattccgcaaaccctaagcgtaagtatagatacagtttggagcgagtgaccactccaacaggcgcagtggcaggaataaacagcgcgagcgcaaatgggttggtgatcgcggcaatcgagaatggtgttattagcgagctgcagggctacgacgaattagctagagagcagcgttacggcgacgaaaaatcccgtatagatatattgctaagtaagcccgaagaacagtgctatatcgaagtaaaaagtgtgactttggaggaggggaagggtgagggcttcttccccgatgccgtaagtacgcgcggccaaaaacacttgcgcgaattaatggcaatgcggtcgcagggccatcgcgccgtactgtttttttgtgtgcagcactcgggtataacaaaagtggctgcagccgaacatatcgaccccgcctacgctgctctgtttaagcaggccgttaatgaaggggtggaagtgattgcttacggtgttgatttgggtatagagggcagtgttatcactaaaaagctcaaagtagtgtag

SEQ ID NO: 51358 - protein, 260 aa, Microbulbifer degradans 2-40
MAEKQSVQATRRIAAALAFLAVLEAPLMKFEYPLIPATLLRRYKRFLADVELSDGSTITVHCPNTGSMRNCIVENSPCWLLDSANPKRKYRYSLERVTTPTGAVAGINSASANGLVIAAIENGVISELQGYDELAREQRYGDEKSRIDILLSKPEEQCYIEVKSVTLEEGKGEGFFPDAVSTRGQKHLRELMAMRSQGHRAVLFFCVQHSGITKVAAAEHIDPAYAALFKQAVNEGVEVIAYGVDLGIEGSVITKKLKVV

SEQ ID NO: 51359 - DNA, 708 bp, Pseudomonas aeruginosa UCBPP-PA14
  CDS (1)..(708)
atgcgtttcgagcagccactggaagaaggccgcctgctgcgtcgctacaagcgtttcctcgccgatatcgagagcgccggcggcgagcgcctgaccatccactgtccgaataccggttcgatgctcaattgcatgagcgaaggttgccgggtctggttcagccgctccaacgaccccaagcgcaagctgccggggacctgggagctgagcgagactccgcagggccgcctggcctgcgtcaacacggcgcgggccaaccgcctggtagaggaggcgctgctggccggggacatcgcggagcttgccggtttcaccgctctgcgccgggaagtggcctacggcgtggagaacagtcgcgccgactttcgcctggaataccccacgggcgcactgttcatcgaggtgaagagcgtcaccctgggcttcgacgaaaccgccgtggcggcctttcccgacgcggtgacgctgcgcggcgccaagcacctgcgcgaactggcggcgctggcgcgggaggggatccgcgcggtgcagttgtactgcgtgaacctttccggggccgaggcggtgcgccccgccgacgagatcgatccagcctatggcaaggcgttgcgcgaggcggcgcaagcgggcgtcgaggtgctggcctatggcgccgaggtgacgacggaaggattgcacctggcgcggcgcctcccggtgcgactctga

SEQ ID NO: 51360 - protein, 235 aa, Pseudomonas aeruginosa UCBPP-PA14
MRFEQPLEEGRLLRRYKRFLADIESAGGERLTIHCPNTGSMLNCMSEGCRVWFSRSNDPKRKLPGTWELSETPQGRLACVNTARANRLVEEALLAGDIAELAGFTALRREVAYGVENSRADFRLEYPTGALFIEVKSVTLGFDETAVAAFPDAVTLRGAKHLRELAALAREGIRAVQLYCVNLSGAEAVRPADEIDPAYGKALREAAQAGVEVLAYGAEVTTEGLHLARRLPVRL

SEQ ID NO: 51361 - DNA, 780 bp, Chloroflexus aurantiacus
  CDS (1)..(780)
atggtgacagggcacggaacaggacatcacggacaatcgccagtacgggttccgctttccagtggagcgccactggttgaggcgacgtttgccagtcgtccgagccagtttctggtcgaagcccagatgggtgggcgaatggtgcgtgcgcatctcgccgaccgggggcgattaaccgatttgctaacaccaggagcgcgcctgttgctcgcctcacgcgaggaaattgggcggaagacggcatttcaggtggtagcagtctatcaggatggcgacctggtctcgcttgacacccaattacccaatcgcctggtggcggcagcattgtcgctcggtgcgcttccccaattcgcgcgttattcgcgggtacagcgagaagtacagcttggcccgcatcgcatcgattttcgcttaagtgaaggactggatacctgtctgctggaggtcaagtcggtgacccggctggttgatgggattgccgtctttcccgacgcaccgactgagcgtggggggcgccatctggagctactgatcaatgctgcccggaatggtcagcgggcggctgtagtgttcatcattcaacgctcgcgtggttgcgcatttgcccccgatgtgaccgttgatccggcgttcagccggtcgttacgagaagcacgctcggttggtgttgagatatacgcctaccgttgcccggtcgatccgtctggtatcacgctgggccaggaggtgccggtcttcgcctcgtttgcagccgtaccgttcgagctgcggcaacactga

SEQ ID NO: 51362 - protein, 259 aa, Chloroflexus aurantiacus
MVTGHGTGHHGQSPVRVPLSSGAPLVEATFASRPSQFLVEAQMGGRMVRAHLADRGRLTDLLTPGARLLLASREEIGRKTAFQVVAVYQDGDLVSLDTQLPNRLVAAALSLGALPQFARYSRVQREVQLGPHRIDFRLSEGLDTCLLEVKSVTRLVDGIAVFPDAPTERGGRHLELLINAARNGQRAAVVFIIQRSRGCAFAPDVTVDPAFSRSLREARSVGVEIYAYRCPVDPSGITLGQEVPVFASFAAVPFELRQH

SEQ ID NO: 51363 - DNA, 732 bp, Lactobacillus casei ATCC 334
  CDS (1)..(732)
atgtactaccaaaatgtcagcgttgggcagctcatcaaacgggtgagtcgctttaccgttgaaattgacctgaatggcaccgtcgaacctgtccacatgaataataccggacgcaataaagaaattttgattccgggatcattagccagtgtccgctatgttgataacccaaatcgcaaaacgcactatgacttgctggctgttcaacggcaaggtcgctggatcaacatcgacagtctggcacccaatcatgttgccaaagaatgtttagaagctggcaccttaaaattgccgggactcgccttgccatacgccgttcatccagaatcgacttggcgcgattcgcgactggactttgctgggaaagccgctgatggccagtcgtggtttgttgaaacgaagggcgtcacgttggctaatggcaccctagcagctttcccagatgcgccaacaactcgcgccgtcaagcatgttcatacgctgacgatggcgcaggcagaagggtatcaggcatttttattgttcatcgtgcaattaccggatattcgccaaatgaccatttatcgggaccgttttcctgaactagtgactgccatcacgactgctaaacaaaatggcgttcgcgtgctggcttatgacaccatgactggcccagatcaaatcacattaggcaacgaaataccattcgacgaacacttgcctttttcagagattaatcttaacagcttgtga

SEQ ID NO: 51364 - protein, 243 aa, Lactobacillus casei ATCC 334
MYYQNVSVGQLIKRVSRFTVEIDLNGTVEPVHMNNTGRNKEILIPGSLASVRYVDNPNRKTHYDLLAVQRQGRWINIDSLAPNHVAKECLEAGTLKLPGLALPYAVHPESTWRDSRLDFAGKAADGQSWFVETKGVTLANGTLAAFPDAPTTRAVKHVHTLTMAQAEGYQAFLLFIVQLPDIRQMTIYRDRFPELVTAITTAKQNGVRVLAYDTMTGPDQITLGNEIPFDEHLPFSEINLNSL

SEQ ID NO: 51365 - DNA, 708 bp, Azotobacter vinelandii AvOP
  CDS (1)..(708): transl_table=11
atgcgctttgatccgccgctggaagaagggcacctgctgcgccgctacaagcgctttttcgccgacatcgagacgccggacggcgaggcgctgtgcatccactgcccgaacaccggctccatgttcaactgcatggccgagggtgggcgcgtctggttcagccgctcgaacgaccccaggcgcaagctgccgggcacctgggagctgagcgagaccccgcagggacggctggcctgcgtgaataccgcgcgggccaatccgttggtggaggaggcattgcgcgccggctcgatcgccgagctgacggggtttaccggactgcggcgagaggtccgctacgggctggagaacagccgggtggacttctgcctggactatccggacgggacggccttcgtcgaggtgaagagcgtcaccctgggcttcgccgacagcccggtcgccgccttcccggatgcccgcaccgagcgcggcgccaagcacctgcgcgagctggcggtcctggcgcggcagggcgtgcgcacggtgcaattgtattgcgtgaatctgtccggcatcgcggcggtgcgcccggcggcggaaatcgacccgggctatgcgcaggcgctgcgcgaagccgtggcggcgggcgtcgaagtgctcgcctacggcgccgagctgtcgcctgcggcgatccggctggtacgccggctcgaggtgtgcctgtag

SEQ ID NO: 51366 - protein, 235 aa, Azotobacter vinelandii AvOP
MRFDPPLEEGHLLRRYKRFFADIETPDGEALCIHCPNTGSMFNCMAEGGRVWFSRSNDPRRKLPGTWELSETPQGRLACVNTARANPLVEEALRAGSIAELTGFTGLRREVRYGLENSRVDFCLDYPDGTAFVEVKSVTLGFADSPVAAFPDARTERGAKHLRELAVLARQGVRTVQLYCVNLSGIAAVRPAAEIDPGYAQALREAVAAGVEVLAYGAELSPAAIRLVRRLEVCL

SEQ ID NO: 51367 - DNA, 762 bp, Chromohalobacter salexigens DSM 3043
  CDS (1)..(762): transl_table=11
atgcaatacacggagctggtgcccgggaccttgatccgccgttacaagcgttttctggccgatgtggcgttggcgtcgggcgatgtggtggtggcgcattgcccgaacaccggctcgatgcgagcggtcgacgtgcccgggtgccgggtctggctgtcaccgagtcgcaacccggcgcgcaagctggcctggacctgggagctgatcgagctgcccatgccggatgccccgcccgcgctggtttccgtgcataccgggcgtgccaatgcgctggtggcccaggcattgcaggaggcacgcattcccgagttggcgggttacgacacgcacaagcgcgaggttcgcgtcgccgacgcccgcctggactttcggctctcgaccgcgcacgcagccgcctatgtcgaggtcaagcaggtcaccctgcgcgagcatgacggccatggctactttccggactcggtgagcgagcgcggccgccgccatctggaggccctggcggcccgcgtggcggagggcgatcgcgcggtgctgctgttttgcgtggcacacaccggaatcgacgccgtggccccggccgcgcatctcgacccggcctatgccgagacgctgcggcgcgtcgcggcgcaaggggtcgaggtactggcctatggcatgagcgcgacctggacccatgacggcgtgcccggcgacattgcgctgacgcgcgcgttgccggtgtcgctcgagcgccgactggcgagcgcgacaccgctcagcgattga

SEQ ID NO: 51368 - protein, 253 aa, Chromohalobacter salexigens DSM 3043
MQYTELVPGTLIRRYKRFLADVALASGDVVVAHCPNTGSMRAVDVPGCRVWLSPSRNPARKLAWTWELIELPMPDAPPALVSVHTGRANALVAQALQEARIPELAGYDTHKREVRVADARLDFRLSTAHAAAYVEVKQVTLREHDGHGYFPDSVSERGRRHLEALAARVAEGDRAVLLFCVAHTGIDAVAPAAHLDPAYAETLRRVAAQGVEVLAYGMSATWTHDGVPGDIALTRALPVSLERRLASATPLSD

SEQ ID NO: 51369 - DNA, 702 bp, Clostridium thermocellum ATCC 27405
  CDS (1)..(702): transl_table=11
atgagaattgaaggagaacttgttaaagcaaagtttgtcaaaagattaaaccggtttgtagctcttgtggaagttgacggggtacaggaatttgcccatgttccgaatacgggaagattgaaagaactcctggtggacggggcggctgtgatggtcagaaagtatgacaaaactgaccgcaagacccgttttgggctcatattggtaagaaaaaacgggatatgggtatccattgattctgcgaatgcgcccaacagaataatgtatgaagcactggtgcaggggaaatttgataaatttcgggactatagcgaaatacgcagggaagtaaccgtgttaaacagccgctttgactttggactgttttctgaaggtaaagaatattatattgaagttaaaggggtaacacttgtggaaaacaggcaaggttttttccccgatgctcccacccaaaggggtacccggcatcttgaagaattgacaaaaataaggcaaaatggcaaagaggcaggagttgcctttattgtgcagagagaggacgcggatgttgtaaggcccaatgacaggacggacaagaactttgccaatgcgctgagaatagccgcggaagccggcgttgacctcatggcctacgtatgcaaagttgatgcggaacaaagaagaatggacattgtccgcgaaataccggtaataataaaatag

SEQ ID NO: 51370 - protein, 233 aa, Clostridium thermocellum ATCC 27405
MRIEGELVKAKFVKRLNRFVALVEVDGVQEFAHVPNTGRLKELLVDGAAVMVRKYDKTDRKTRFGLILVRKNGIWVSIDSANAPNRIMYEALVQGKFDKFRDYSEIRREVTVLNSRFDFGLFSEGKEYYIEVKGVTLVENRQGFFPDAPTQRGTRHLEELTKIRQNGKEAGVAFIVQREDADVVRPNDRTDKNFANALRIAAEAGVDLMAYVCKVDAEQRRMDIVREIPVIIK

SEQ ID NO: 51371 - DNA, 723 bp, Crocosphaera watsonii WH 8501
  CDS (1)..(723): transl_table=11
atggatactgattttatttacacctatcctgctctcattcctggcattcttaagaaacgctataaacgttttttagcggatattgaattagaatcgggggaaacaatcacagcccattgtgccaacacaggtcccatgatcggggtgtgtgatgttgatagtcgggtttatctttctaaaagtaataatcccaaacgaaagctggcttatagttgggaattgattgaggtagacaatacatgggtggggattaatacagctttacctaatcgggttattaaacaagttttagaacaggaaaaatttcctcccctacaaggaaaatacaatcaggttcgtccagaagttccctacggaaaaaacaagaaaagtcgcattgattttctcttaagcaacgaatctgagaaaaaccctatttatgtggaagtaaaaaatactaccttagccacagaaaagatggcattatttcccgatacagttaccactcggggacaaaagcacttacaggagttaatggatttattgccagacgctcaaccgattatgttatattttattaatcggggagactgcgatcgcttttcccctggggacaattatgatccagagtatggcaaattgtttcgggaagccgttgaaaaaggggtgaaaattctaccctgtcgctttgatattacaccccaaggaattcgttatttaggactcgcagaattagttttataa

SEQ ID NO: 51372 - protein, 240 aa, Crocosphaera watsonii WH 8501
MDTDFIYTYPALIPGILKKRYKRFLADIELESGETITAHCANTGPMIGVCDVDSRVYLSKSNNPKRKLAYSWELIEVDNTWVGINTALPNRVIKQVLEQEKFPPLQGKYNQVRPEVPYGKNKKSRIDFLLSNESEKNPIYVEVKNTTLATEKMALFPDTVTTRGQKHLQELMDLLPDAQPIMLYFINRGDCDRFSPGDNYDPEYGKLFREAVEKGVKILPCRFDITPQGIRYLGLAELVL

SEQ ID NO: 51373 - DNA, 699 bp, Geobacter metallireducens GS-15
  CDS (1)..(699): transl_table=11
atgcgactccccacccccctctaccccggcaccctcgtccgccgctaccaacgcttcctggccgacgtgcaactggccgacggcaccattgtcaccgcccactgccccaactcgggaagcatgaaagggtgcaaccttcccggcagcctggtctggctctcgaaaagcacaaatccggcccgcaagctggcctacacctgggaactggtcatggccgacggcttctgggccgggatcaacacggggctgccgaaccggctcgtgcgagaggccatcgaggacggcaccgtgacggagcttcagggatacgggagcatccgccccgaggtgcgctacggggaagaaaggagccggatcgatctgctgctggaaggtgagccggggcgctgctgggtggaggtgaagaacgtgacgctggtggaaggagaacgggccctcttccccgacgccgtgacggaacgggggcagaagcacctgcgggagctgatggagatggtgcggcggggagatcgcggggtgattttctacgtggtgcagcggggggacggcgaggctgtttcaccggccgacgccattgacccgaaatatggacagctcctccggctggccgtggcgaacggcgtcgaggccctcgcctaccgggcactggtgacgccggaggagatccggcttacggagcggctaccggtgattctgtag

SEQ ID NO: 51374 - protein, 232 aa, Geobacter metallireducens GS-15
MRLPTPLYPGTLVRRYQRFLADVQLADGTIVTAHCPNSGSMKGCNLPGSLVWLSKSTNPARKLAYTWELVMADGFWAGINTGLPNRLVREAIEDGTVTELQGYGSIRPEVRYGEERSRIDLLLEGEPGRCWVEVKNVTLVEGERALFPDAVTERGQKHLRELMEMVRRGDRGVIFYVVQRGDGEAVSPADAIDPKYGQLLRLAVANGVEALAYRALVTPEEIRLTERLPVIL

SEQ ID NO: 51375 - DNA, 690 bp, Desulfuromonas acetoxidans DSM 684
  CDS (1)..(690): transl_table=11
atgaatctgcccgaactcaagcgtgccacgctgttaaggcgctataaacgctttttggccgatatcgaatggccggacggcaccacaaccacggtacatacacccaacaccggtagtatgcgccagtgcgccacacccggtgccacggtcctggtctcacacagtgacaacgccaagcgtaaatatccctggacgctggagatgattgaggtcaatggtcactgggtcgatacgaatactcagcgcagcaataaggtggtggccgaagctctgaaattgggtaccatcgagggggtgcagggctatcaggtgtacccggagaaacagctcggtgacagtcggatcgattttctgctggaaaaacccggtcagcgcatgtggctggaagtaaagaacgccaccttgttgattactcgcgcctgtgccggatttcccgatgccgtcaccgagcgggggaggcgccatctccaggagctgatgaaggcggtagatcagggtgatcgtgccggagtgctgtttctggtccagcgcgctgaagcccagttgtttgccgctgccgctgagattgatcccgcctatgccgagcaattggccgtggctctggagcatggggtggaagcctttgcttgccagacccaatccgatgaaaaacagacccgcattgcccggcgtattccggtgcaagtatga

SEQ ID NO: 51376 - protein, 229 aa, Desulfuromonas acetoxidans DSM 684
MNLPELKRATLLRRYKRFLADIEWPDGTTTTVHTPNTGSMRQCATPGATVLVSHSDNAKRKYPWTLEMIEVNGHWVDTNTQRSNKVVAEALKLGTIEGVQGYQVYPEKQLGDSRIDFLLEKPGQRMWLEVKNATLLITRACAGFPDAVTERGRRHLQELMKAVDQGDRAGVLFLVQRAEAQLFAAAAEIDPAYAEQLAVALEHGVEAFACQTQSDEKQTRIARRIPVQV

SEQ ID NO: 51377 - DNA, 726 bp, Jannaschia sp. CCS1
  CDS (1)..(726): transl_table=11
atgcgctttccaaccccgcttgtccccgcccgccttctgcgtcgttacaaacgcttcctgtccgatgccgtgctggaggacgggacggagatcaccgcccattgtcccaacccgggcgcgatgctgggcctgaaagatgacggcgcgcggatctggctgttgcccaatgacgatccgaagaaaaagctgaaatacggttggcggttggtggaactgccagatggccatttcgcgggcatcgatgcgggcctgccgaacgctttggtgaaggaggcgttggccgaggggcagatcgaggcgctgcgcggttattccagtatccggcccgaacagaaatacggcgacgagaacagtcgcattgatttcctgttgtctgagccgggacggcccgatgcctttgttgaagtcaagaattgccaccttcggcgcgagagcgattgggccgaattccccgattgcgtgacggaccgtggcgcgaagcatctgcgtgagctgacaaagattgcccgaagcggggggcgcgcggtcatgctgtatgtcgtgcagcgtaccgattgcgcgcgcttccgcctcgcgccggatctggacccggcctatgcccgcgccttcgatgcggcccgtgatgcgggcgtggaagtgctttgccacggcaccgatattacgcctgaggggatcacccttacgggaccattgcctgtcgacccatcgccgcaggcgcgggactga

SEQ ID NO: 51378 - protein, 241 aa, Jannaschia sp. CCS1
MRFPTPLVPARLLRRYKRFLSDAVLEDGTEITAHCPNPGAMLGLKDDGARIWLLPNDDPKKKLKYGWRLVELPDGHFAGIDAGLPNALVKEALAEGQIEALRGYSSIRPEQKYGDENSRIDFLLSEPGRPDAFVEVKNCHLRRESDWAEFPDCVTDRGAKHLRELTKIARSGGRAVMLYVVQRTDCARFRLAPDLDPAYARAFDAARDAGVEVLCHGTDITPEGITLTGPLPVDPSPQARD

SEQ ID NO: 51379 - DNA, 687 bp, Desulfitobacterium hafniense DCB-2
  CDS (1)..(687): transl_table=11
atgaagtacaccaatatcagagaaggacaatttctttctcgtcccaatcggttcattgctaaggtggaaatcgacggtaaagaggaaatctgtcatgttaaaaatacaggccgctgcagggaattattaataccgggagtgacggttttccttcaagaagcggattttgagcatcggaaaacaaaatacgacctgatcggagttcgcaaagggaataggctgattaacatggacagtcaggtgccgaacaaggtgtttcgtgaatggttggagaaagggtattttcaggagcttcagcatattaagcaggagcagacctttcgaaattcgcgctttgatttttatctggaggcaggacagagaaaaatctttgttgaagtgaaaggggtaaccttagaggaagagggagttgcgctctttcccgatgcccccacagaacggggggttaagcacctgcgcgagttgagccaggctgtggctgcagggtatgaagcctatgtggtgttcatcattcaaatgaaagatattcactatttcacccccaacatcaagacccaccaagcctttggggattcattgattcaggctgaaaagcagggagtaaaaattctcgctctggactgcgaggtcacggaagattctatagaggctggggattttgtgacggtcaaattagttgagggttaa

SEQ ID NO: 51380 - protein, 228 aa, Desulfitobacterium hafniense DCB-2
MKYTNIREGQFLSRPNRFIAKVEIDGKEEICHVKNTGRCRELLIPGVTVFLQEADFEHRKTKYDLIGVRKGNRLINMDSQVPNKVFREWLEKGYFQELQHIKQEQTFRNSRFDFYLEAGQRKIFVEVKGVTLEEEGVALFPDAPTERGVKHLRELSQAVAAGYEAYVVFIIQMKDIHYFTPNIKTHQAFGDSLIQAEKQGVKILALDCEVTEDSIEAGDFVTVKLVEG

SEQ ID NO: 51381 - DNA, 744 bp, Methanococcoides burtonii DSM 6242
  CDS (1)..(744): transl_table=11
atggttcgcaatgatctggtaatggagatcccatgggatattgaagctacacttctgtcaagacctaacaggtttcttggcatcgtggaaatggatgaatctacatcttctggaccctttcaggagaaagttcatattcatgatcctggcagacttgaggatctactttatcccgggaacaggcttcttttgagaaaagctaccaaccccaaacgtaaaacagggtgggatgtaattgctgcaaaggctgatgatgggtggatattgataaattccatatttcatcgcagaatcgccgaatgggcaatagcaaataaggtgtgttcttgttttgagaatgtacttgaggtcatacctgaacagaagtttggagatagtcgtctggattttttgttgaagaaaagtgatactgaactatgggtggaagtaaaagggtgtacacttatctatggtaatactgccacttttcctgatgctcccactacaagagggaaaaggcatgtgggggagttgaagaaggcattggaaagtggatctgaggcacttatactgatcatcattctccgaaaagatgctttatgttttaaagcgaatgcgagtattgatcctgattttgcagaagtgttcaaggatgctgtaaatgcaggggtgcaagtatgtcctttagtatttggttatgagggaagggaactattctataagggaatggttcctttatgcactgaagaatacaattccatttaa

SEQ ID NO: 51382 - protein, 247 aa, Methanococcoides burtonii DSM 6242
MVRNDLVMEIPWDIEATLLSRPNRFLGIVEMDESTSSGPFQEKVHIHDPGRLEDLLYPGNRLLLRKATNPKRKTGWDVIAAKADDGWILINSIFHRRIAEWAIANKVCSCFENVLEVIPEQKFGDSRLDFLLKKSDTELWVEVKGCTLIYGNTATFPDAPTTRGKRHVGELKKALESGSEALILIIILRKDALCFKANASIDPDFAEVFKDAVNAGVQVCPLVFGYEGRELFYKGMVPLCTEEYNSI

SEQ ID NO: 51383 - DNA, 699 bp, Moorella thermoacetica ATCC 39073
  CDS (1)..(699): transl_table=11
atggtcgaactacccgccaatttgattaaagctacctttctttcccggccgaaccgttttacagtggtggctgccagggaaggggagaagctggttgccttcctggccgacccggggcgcttgacggaactgttgctgcccggggctgaggtctacttggccccggcgtcacggcagggggataggaaaacggcctacgacgtggtcctgctccgccagaacggtacctttatttccctggacagccgcctgcccaaccgcctctttgccgccgccttacaggccgggagccttgaacccttcaaaggttaccggctgcgggcgaccgaggtccgggccggttccagccgcctggactttttactccagggtgatggacaccccccctgctacgttgaggtaaaatcggtaaccctggtaagaggtgggctggcccttttccccgatgccccgactgctcgcggcagccgtcacctgcgggagttgatggccctgcactcccggggctaccgggcggcagccgtttttatcatccagcgggaagatgctatcagcctggcccccaacgaggttaccgacccttgcttttccagcaccatcagagaagcggctgccgccggggtggaaatctatgcctaccgctgccatatcgacccggtgacagtcagcctgatcgctcccgtaatggtaaaactttag

SEQ ID NO: 51384 - protein, 232 aa, Moorella thermoacetica ATCC 39073
MVELPANLIKATFLSRPNRFTVVAAREGEKLVAFLADPGRLTELLLPGAEVYLAPASRQGDRKTAYDVVLLRQNGTFISLDSRLPNRLFAAALQAGSLEPFKGYRLRATEVRAGSSRLDFLLQGDGHPPCYVEVKSVTLVRGGLALFPDAPTARGSRHLRELMALHSRGYRAAAVFIIQREDAISLAPNEVTDPCFSSTIREAAAAGVEIYAYRCHIDPVTVSLIAPVMVKL

SEQ ID NO: 51385 - DNA, 705 bp, Shewanella baltica OS155
  CDS (1)..(705): transl_table=11
atggaatttactccgcgactacaacagggtattttactgcgccgctataaacgttttctggccgatgtgcagttaagcgacggcagtgagatcactctgcattgccccaatacgggttctatgcgtaattgcctgtatcccggtgaaaccgtctggttttctacctctgataaccctaaacgtaagtacgcccatacatgggaactgatgactacgcctgattctggcttgatcggtatccactcgggtcaggccaacaccttagccgaagaagccatcaataaaggcatcatcaaggagctcacgggttatgacagcctaagccgtgaagttaaatatggtgatgaaaatagccgcatcgacatcctgctacagggtgctcaaaaacccgcctgttatatagaagtcaaaagttgtactttgctcgaggatggccaaggttattttcctgatgctgtgagcctacgaggtcaaaaacatttacgtgaattgatgcacatggtcagccaaggccacagagccgtattgctgtttgtggtgcagcacagtgacatctttagtgttgcccccgcagcacatatcgaccctgaatatgctaagttactgaaaaaagcagtgttagctggagttgaagtccttgcctatcgctgtgaaatgtccccgactgagattcacctagcccaagcctgtgttgtccgagtatga

SEQ ID NO: 51386 - protein, 234 aa, Shewanella baltica OS155
MEFTPRLQQGILLRRYKRFLADVQLSDGSEITLHCPNTGSMRNCLYPGETVWFSTSDNPKRKYAHTWELMTTPDSGLIGIHSGQANTLAEEAINKGIIKELTGYDSLSREVKYGDENSRIDILLQGAQKPACYIEVKSCTLLEDGQGYFPDAVSLRGQKHLRELMHMVSQGHRAVLLFVVQHSDIFSVAPAAHIDPEYAKLLKKAVLAGVEVLAYRCEMSPTEIHLAQACVVRV

SEQ ID NO: 51387 - DNA, 714 bp, Shewanella amazonensis SB2B
  CDS (1)..(714): transl_table=11
atggaatacccagcccccctgtccagcgctgtgctcattacccgctataaacgatttttagccgatgtcaccctggaggacggcagtcagacaaccctgcactgccccaataccggctcgatgaaaaactgcctgtatcccggtaaacgggtgtggttttcgacctcggacaaccccaagcgcaagtacgcccacacctgggagctggccgaggatgaccggggcaacctgattggcattaacacggcgcgggccaatcaacttgccgaagaagccattgggctggggcagatatccgagcttcagggctacaaccaaatccgccgcgaagtgaagtatggcaatgagaacagccgcatcgatttactgctgagtgaggggcaagccccagactgctatatagaagtcaaaagttgcactctgttggaccatgactggggactgtttcccgacgcagtatccacccgtggacaaaagcacctgcgggagctgatggagatgaaacgccagggctaccgggcggtgctgctgtttgtggtgcaacatcaggggatccacagagtagcgcctgccgaggctatagatcccaaatatgcggcgctgctgagggaggccattgcggccggtgttgaagtgctggcctatggatgtatgatgaataacaaaggcttgcagttaaacatcccgatacctttccaccctgatgcggggtaa

SEQ ID NO: 51388 - protein, 237 aa, Shewanella amazonensis SB2B
MEYPAPLSSAVLITRYKRFLADVTLEDGSQTTLHCPNTGSMKNCLYPGKRVWFSTSDNPKRKYAHTWELAEDDRGNLIGINTARANQLAEEAIGLGQISELQGYNQIRREVKYGNENSRIDLLLSEGQAPDCYIEVKSCTLLDHDWGLFPDAVSTRGQKHLRELMEMKRQGYRAVLLFVVQHQGIHRVAPAEAIDPKYAALLREAIAAGVEVLAYGCMMNNKGLQLNIPIPFHPDAG

SEQ ID NO: 51389 - DNA, 729 bp, Enterococcus faecium DO
  CDS (1)..(729): transl_table=11
ttgaagtatcagcaagtggaaatagctttttttattgaccgcccgaatcggtttatagcacattgtatgaaaaaagacggagaaataattattgcgcatgtcaaaaatacaggtagaggaaaagaggtcctgataccaggcgctgaagtggctattgtatttgctcctggacctaaacggaaaaccgcctatgatctgattgctgtaaaaaagaagggtgactggtttaatatcgatagtcaattgcctaatcggctggcaattgatggtattttagacggcacgatccttttaccaggattaactggtccatttacggtatacaagcgtgaagtaacttatcttcactccaaatttgatatttatttagagacggtggtcggacaaaaagcatttgttgaagtcaaaggtatgacacttgaaaataaagcgattggtgcttttcctgatgcgcccacactcagaggattgaaacatataggagaattaacgtatgccgcacaagatggttatgccgcttatgtcttgtttattgctcagttcgaacatcttcatctggcaacgatccatgaagaaatgcaaccagcactagctgatatggttcgacatgcgcagcaaagcggagttcaaatcctcgcctataattgtcaagtatcggcagatgaggtaactgtcaagcaggccattccatttgatgtagatatcccttttgaagatcctatacaatag

SEQ ID NO: 51390 - protein, 242 aa, Enterococcus faecium DO
MKYQQVEIAFFIDRPNRFIAHCMKKDGEIIIAHVKNTGRGKEVLIPGAEVAIVFAPGPKRKTAYDLIAVKKKGDWFNIDSQLPNRLAIDGILDGTILLPGLTGPFTVYKREVTYLHSKFDIYLETVVGQKAFVEVKGMTLENKAIGAFPDAPTLRGLKHIGELTYAAQDGYAAYVLFIAQFEHLHLATIHEEMQPALADMVRHAQQSGVQILAYNCQVSADEVTVKQAIPFDVDIPFEDPIQ

SEQ ID NO: 51391 - DNA, 699 bp, Magnetococcus sp. MC-1
  CDS (1)..(699): transl_table=11
gtggagtatccaacgccactaacgcccgcccgcatggtgcaacgctataaacgttttttaagcgatgtcaccctggccgatggcactcaagtaaccgcccactgtgccaactccggctccatgcgcgggttggtgcatgtgggtgagcctgtctacctctcccactcggacaaccccaagcgcaaactggcctggaccctggagttggtgtgcgatggtggcgcgctggttggggtcaatacgggcttggccaatgcactggtggccgaggcgctacagcaagaccgcatcccccctttacaggggtttgcccactttaggcgagaggtcccctatcaggactctcgcctggatttttgcctaaccgcccccgctggtgcgttaacctatgttgaggtgaagagcgttaccctgcgcttgaccgacgaagccgcttttcccgacgcggtaaccaagcgcggcgcaaaacatctggcggctttgcgccatgcggttaaagctggacatcggggggtgatcctgtttattgtccagcgttcggatctcgaccattttcgccctgctcatgagattgatccaggctatgcccagacgctacaatgggcgatctccgagggggttgaaatactggtttatgcctgcgcgctcaccacggcatccatctacgttgaacgccctttaagctatacgctcggttga

SEQ ID NO: 51392 - protein, 232 aa, Magnetococcus sp. MC-1
MEYPTPLTPARMVQRYKRFLSDVTLADGTQVTAHCANSGSMRGLVHVGEPVYLSHSDNPKRKLAWTLELVCDGGALVGVNTGLANALVAEALQQDRIPPLQGFAHFRREVPYQDSRLDFCLTAPAGALTYVEVKSVTLRLTDEAAFPDAVTKRGAKHLAALRHAVKAGHRGVILFIVQRSDLDHFRPAHEIDPGYAQTLQWAISEGVEILVYACALTTASIYVERPLSYTLG

SEQ ID NO: 51393 - DNA, 681 bp, Ferroplasma acidarmanus Fer1
  CDS (1)..(681): transl_table=11
atgtatccatttatagagagggaaccgggatatgttgttgcaaaatttccgaaccttattgaagcaaaagttgtctcccgtccaaatagattcatggtaaaagcaatggtagatgataaggaagtggatgttcatatacacgatccaggaaggcttgaagaacttatatttcccgggaattcaatactgataagggaaactaatggtacaaaaacacattattctgtaactttttgcaaaaatgatgatatctggacatttaacgattctagataccattccggtatagcctctatgtttatccaggaagggtggcagagggaggttaaagtgggaaacagcagattggatttcaggcttaacaatgcatacatagaagtaaagtctgcaacacttgtagaaaatgggattgccagatttcccgatgcacccaccctgaggggaaaaaagcatcttgaaacccttatggatcttatagcctcgggttatgaatcatttgttttatttctcattttcaatgagaatgccaaatgttttcttccaaatactgccagggaccctgaattttcacatgcatattattcaactctggaacacggggtaaaattccagtacctggtattttcatccagtggtggtgaaattgttttaaaagattcaatatccatgtgcaatccctga

SEQ ID NO: 51394 - protein, 226 aa, Ferroplasma acidarmanus Fer1
MYPFIEREPGYVVAKFPNLIEAKVVSRPNRFMVKAMVDDKEVDVHIHDPGRLEELIFPGNSILIRETNGTKTHYSVTFCKNDDIWTFNDSRYHSGIASMFIQEGWQREVKVGNSRLDFRLNNAYIEVKSATLVENGIARFPDAPTLRGKKHLETLMDLIASGYESFVLFLIFNENAKCFLPNTARDPEFSHAYYSTLEHGVKFQYLVFSSSGGEIVLKDSISMCNP

SEQ ID NO: 51395 - DNA, 702 bp, Mesorhizobium sp. BNC1
  CDS (1)..(702): transl_table=11
atgatatttccctccccgctcaccgaagcccggctcatccgccgctataagcgctttctggccgatgtagtgcttgcggacggaacggaacttacggtttcagtgcccaataccggatcgatgctcgggctcaccgcgccgggatcgcgcgtgctcttgtcgaaatgggacgatccgaaacgcaaatatccctatcggctggaaatcgtggaagcggacggaacgctggtgggtatcaatacaggcctgccgaaccggcttgcggcggaggctatccgcgcccgtctggtgggcgacctcggcacatatccggtgatacggcccgaacagcgctatggcgagcgctcgcgcatcgactttcttctggagcacccggagcgcccgccagcctatgtggaggtgaaaaacgtgcatttcatgcgcgaggccgggcttgccgaatttccggatacgaggacggaccgcggcgcccggcacctcgacgagcttgcagccatgcgcagggcaggcaaccgcgccgtcatgatctatgtggtccagcgggccgattgctcccgattccgcctttgcgcggatcttgacgcctcttatgccgcggctttcgggcgcgcgagggatgcgggggttgaagctttcgtgatagggtgccaaatctctgccgacgcgatcgctcccgatcgcctgatcgatttggatttttag

SEQ ID NO: 51396 - protein, 233 aa, Mesorhizobium sp. BNC1
MIFPSPLTEARLIRRYKRFLADVVLADGTELTVSVPNTGSMLGLTAPGSRVLLSKWDDPKRKYPYRLEIVEADGTLVGINTGLPNRLAAEAIRARLVGDLGTYPVIRPEQRYGERSRIDFLLEHPERPPAYVEVKNVHFMREAGLAEFPDTRTDRGARHLDELAAMRRAGNRAVMIYVVQRADCSRFRLCADLDASYAAAFGRARDAGVEAFVIGCQISADAIAPDRLIDLDF

SEQ ID NO: 51397 - DNA, 717 bp, Silicibacter sp. TM1040
  CDS (1)..(717): transl_table=11
atggcccatcaccacggcatgagatttccgacccccttgatccccgcgaccttgatcaaacgctacaaacgctttttggcggattgccggcttgaggacggccgcgagatcacggcccattgcgccaatccaggctcgatgatgggcttggccgagccgggcatgcgggtctggctggaacccaacgacgacccgaagaaaaagctcaaatacggctggcggctggtggagcatacgaatggccatttcaccggtgtcgatacatctgttccaaatcgtgcgctcaaagccgcgctggaggcgcacgaaattgcagaattcgccgcctactccgaggttcaggccgaggtgaagtacgggcagaacagccggatcgactttttgctgacggatgcgaagctgccgcggtgctatgtcgaggtcaaaagcgtgacactgtcacgccagccgggccttgcggagtttcccgatagcgtcaccgcgcgggggaccaaacaccttcgcgaactagcagctatggcggaagccggccacagggccgtgatgctctatctcgttcagcgtacggattgcgaccgctttgctctcgccgctgatatagacccagcctacgctgccgagttcgaaaccgcccacgccaaaggcgttgagcggctggtgatcggcaccaccatcacgccagagggcgtaaaaataggcgatatcctcccgagctaa

SEQ ID NO: 51398 - protein, 238 aa, Silicibacter sp. TM1040
MAHHHGMRFPTPLIPATLIKRYKRFLADCRLEDGREITAHCANPGSMMGLAEPGMRVWLEPNDDPKKKLKYGWRLVEHTNGHFTGVDTSVPNRALKAALEAHEIAEFAAYSEVQAEVKYGQNSRIDFLLTDAKLPRCYVEVKSVTLSRQPGLAEFPDSVTARGTKHLRELAAMAEAGHRAVMLYLVQRTDCDRFALAADIDPAYAAEFETAHAKGVERLVIGTTITPEGVKIGDILPS

SEQ ID NO: 51399 - DNA, 810 bp, Shewanella denitrificans OS-217
  CDS (1)..(810): transl_table=11
atggcatcagtgtactggatccctaagcttaggataatccctaggacaaaatttgttaccatatgccccattaccctcacactgagtttaagcatgcaatactcccctaatttggctcacggtactttgttaagacgttacaagcgcttcctggccgatgtactgctggacgatggcacagaaatcacgctgcattgccccaatacgggttcgatgaaaaactgcctgtttcccggtgaaactgtgtggttttcaacatcaaacaaccctaagcgtaaatatgcccacacctgggagcaaagcagcacccctgacaagcagttaatcggcatcaataccggccgcgctaacgccttagcagaagaggccatcaatcttggggtgatcaaagaattgactggctatgacaggctacagcgtgaagtcaaatatggtgaagaaaatagccgcatcgatatcctgcttagcagtgacactcgagcaagctgttatattgaagttaaaagttgtaccttattagaagagggttcaacgtcaggcagaggatattttccagactctgtgactgtccgaggccaaaaacacttacgtgaacttattcacatggtaaaacaaggacatagggcggtattactttttgtagttcagcactcaggtattaacagcgtaagccctgcaaggcatatagatgtagcctatagcgaattattcactcaagcgctcgacgcgggagtcgaagtattagcctatcagacacaaatgtcgcctcaggaaagtcaaatactgacttcttgccctgtgataacttaa

SEQ ID NO: 51400 - protein, 269 aa, Shewanella denitrificans OS-217
MASVYWIPKLRIIPRTKFVTICPITLTLSLSMQYSPNLAHGTLLRRYKRFLADVLLDDGTEITLHCPNTGSMKNCLFPGETVWFSTSNNPKRKYAHTWEQSSTPDKQLIGINTGRANALAEEAINLGVIKELTGYDRLQREVKYGEENSRIDILLSSDTRASCYIEVKSCTLLEEGSTSGRGYFPDSVTVRGQKHLRELIHMVKQGHRAVLLFVVQHSGINSVSPARHIDVAYSELFTQALDAGVEVLAYQTQMSPQESQILTSCPVIT

SEQ ID NO: 51401 - DNA, 705 bp, Shewanella frigidimarina NCIMB 400
  CDS (1)..(705): transl_table=11
atgaaatttactcccgaattagagtccggtgtattaattaaacgatacaaacgctttcttgccgatatcatgctacctaacgggcaagaaatcactattcattgcccaaatactggttcaatgaaaaattgcttattccctggtgaaaaggtgtggttttccacctccgacaatccaaaacgaaaatatgcccacacatgggaactaatgcagacagatcagcagcattatatcgggattaataccggacgagccaatgctcttgcagaagaagcgattaatcggcaagtgattaccgaactgttaggttacgagcatttaaaacgtgaagtgaagtacggcagtgaaaatagccgcatcgatatcttgctcactagccaaaaccgacctgagtgctatattgaagtgaagagctgtactttgctagaagatcaaatgggttacttcccagatgctgtaaccacgcgtggacagaagcatctgcgagaattaatccacatggtggaattaggccatcgtgcggttttattatttgtggtgcagcacagtgccatcacgagtgttaaacccgcgcgacacatagatccacattacgcagacttacttgaacaagccgtagcaaatggcgttgaagtgctagcttacaaaacagcgctttcgccacagggaagcctgatcacttcagcttgtaaagtcatgctgtag

SEQ ID NO: 51402 - protein, 234 aa, Shewanella frigidimarina NCIMB 400
MKFTPELESGVLIKRYKRFLADIMLPNGQEITIHCPNTGSMKNCLFPGEKVWFSTSDNPKRKYAHTWELMQTDQQHYIGINTGRANALAEEAINRQVITELLGYEHLKREVKYGSENSRIDILLTSQNRPECYIEVKSCTLLEDQMGYFPDAVTTRGQKHLRELIHMVELGHRAVLLFVVQHSAITSVKPARHIDPHYADLLEQAVANGVEVLAYKTALSPQGSLITSACKVML

SEQ ID NO: 51403 - DNA, 786 bp, Syntrophobacter fumaroxidans MPOB
  CDS (1)..(786): transl_table=11
atgaccgattccgcgaagccgcagaaccccgatcccgggcatgagagccgccgcgtggccccgctcgcgggttcgccgagatccccgttcctgatcgaattcccggaggacagtttcaccgccgttttcctggggcgggaaaaacgtttccttgtcgaggccgaacgaaacggacacctgtttcaggcacactgcaacaattccgggagcatgctcggcctgctgcggccgggaagcgacatcctgctttccgtatcccccaacccctcgcgtcgactgccctacacgctcgaatccatcaagctcggaagccactgggtgggagtgaacacgctcgtacccaaccggatcctcaggctcgcctgggacaggggaatactgccggagttgataggttacgatcgatttcagaacgaaaaaacctccggcgagagccgtctggacgcctttgcggaaggacccgcggggcaggtctggatcgaggcgaaaaacgtgacgctggtggaggacgacgtcgcctgtttcccggatgcggtgaccgtacgcgggcaaaaacacatgagggaactgacggcgctggcgcgcgcgggccggagggccgcctgcttcttcctggtccagcgaccggatgcttcgtgcttcgctcccgccgatttcatcgacccggtttatgccgagctttttcacgcagcagtgcatgcgggcgtggagatctggccgtacgaggcggttgtcacccggcaggggattgctctgggccgcaggctgaaagtggtggggcactga

SEQ ID NO: 51404 - protein, 261 aa, Syntrophobacter fumaroxidans MPOB
MTDSAKPQNPDPGHESRRVAPLAGSPRSPFLIEFPEDSFTAVFLGREKRFLVEAERNGHLFQAHCNNSGSMLGLLRPGSDILLSVSPNPSRRLPYTLESIKLGSHWVGVNTLVPNRILRLAWDRGILPELIGYDRFQNEKTSGESRLDAFAEGPAGQVWIEAKNVTLVEDDVACFPDAVTVRGQKHMRELTALARAGRRAACFFLVQRPDASCFAPADFIDPVYAELFHAAVHAGVEIWPYEAVVTRQGIALGRRLKVVGH

SEQ ID NO: 51405 - DNA, 753 bp, Trichodesmium erythraeum IMS101
  CDS (1)..(753): transl_table=11
atgatttgttatccaataattatgaataatcaactaaaattctcttacaaatatccttctcttgaaccaggtattttaattaaacgttataaaaggtttctggcagatatagagttaaagtctggaggaattattactgctcactgcccaaatacgggtccaatgactggagtttctactccgggaagtaatgttatggtttcttatagtaataatccaaaacgaaaattagcttacacttgggaattaattgaagtaactgataatgaaccgacttgggtgggaattaatacggctttaccaaatcgagttattaagttggcgttggccgaaaatttatttcctgaattgggagattattatgaagttaaaacggaagttgtttatggaaaagataggaaaagtagggttgattttaagttaattagtgagactaaaaatatttatcttgaggttaagaatactacttgggcagatggaagagttgctttatttccagatacggttacaaaaagagggcaaaaacatttacgtgaattaataggggtagttgaacaaggggaaagagctgtatgtttgtttttgataaatcgtggtgattgttatcagtttgctcctggagatgttgctgatcatgattatggtaaacttttgagagaagctatgattaaaggggtggaaattttgccttgtagatttatagttactcctcaagaaattaattatttggggatagcagaatttatcaattag

SEQ ID NO: 51406 - protein, 250 aa, Trichodesmium erythraeum IMS101
MICYPIIMNNQLKFSYKYPSLEPGILIKRYKRFLADIELKSGGIITAHCPNTGPMTGVSTPGSNVMVSYSNNPKRKLAYTWELIEVTDNEPTWVGINTALPNRVIKLALAENLFPELGDYYEVKTEVVYGKDRKSRVDFKLISETKNIYLEVKNTTWADGRVALFPDTVTKRGQKHLRELIGVVEQGERAVCLFLINRGDCYQFAPGDVADHDYGKLLREAMIKGVEILPCRFIVTPQEINYLGIAEFIN

SEQ ID NO: 51407 - DNA, 693 bp, Pelobacter propionicus DSM 2379
  CDS (1)..(693): transl_table=11
gtgagactccctccgctgatagccggaacactggtcaggcgctacaagcgtttcctggccgatgtgatcctggaggacggcagccccgtcacggtccactgccccaattcgggaagcatgaagggatgcgcgtcccccggcagccgggtgctgctctcccgcagcgccaatccgggccgcgcctatcccctcacctgggagctggtggagtcggacggatgctgggccggcatcaacacctccctgcccaaccgcctggtgcgggaggccatcgagaacggcaccgtggtggaactccgggggtatgacagcatccggcccgaggtagcctacggccagcggagccgcatcgatctcctcctggaggggccggccgggcgctgttatgtggaagtcaagaacgtcaccctggtggagggggaaagggcactcttccccgatgccgtgacggtccgcggccagaaacacctgaacgagctgatgcgggtggtcagggagggggaccggggagtgatcttcttcaccgtccagcggggcgatgccgagagcgtttctccggcggacgccatcgacccggagtacggcaggctgctgcgactggcgctggacagcggcgtggaagcgctggcctaccgggccgttgtctcacctgaggagatccgcctgaaggaacggcttccggtgatcctgtag

SEQ ID NO: 51408 - protein, 230 aa, Pelobacter propionicus DSM 2379
MRLPPLIAGTLVRRYKRFLADVILEDGSPVTVHCPNSGSMKGCASPGSRVLLSRSANPGRAYPLTWELVESDGCWAGINTSLPNRLVREAIENGTVVELRGYDSIRPEVAYGQRSRIDLLLEGPAGRCYVEVKNVTLVEGERALFPDAVTVRGQKHLNELMRVVREGDRGVIFFTVQRGDAESVSPADAIDPEYGRLLRLALDSGVEALAYRAVVSPEEIRLKERLPVIL

SEQ ID NO: 51409 - DNA, 717 bp, Pseudoalteromonas haloplanktis TAC125
  CDS (1)..(717): transl_table=11
atgaagtaccaacctgccctgcaatcagccaccttattaaaacgctataaacgttttttagctgatttacagctcagtgatggctcagagtttaccgcccattgtgccaatacaggtaaaatgactggctgcgctgaacccggttttaatgctttttactccaccagtactaatagcaaacgcaaatacccgcaatcgttagagctcacccaaaatagcttatcgcaacttatttgcgttaataccgcagtggcaaataaagttgttgctgaagctataaatgccaatcttattagtgagcttagcaattatgagcaattacaaagcgaagttaaatatggcaacgaaaacagccgtatcgactttttactaaccagcgatgagcgtcctaattgctacgttgaagttaaatcggtaacgctcttaagccaagataacccccacagtggccaaggctactttcctgatgcaccaactctgcgcgggcaaaaacatattcgcgaattaatagagatggtagagcaaggtcatcgtgcagtattgctttttgctgtactgcaccagggaataaaccaggtaagcgctgctgctcatatagacaataaatatgcacagttactaaatgaggcaattaaccaaggcgttgaggtattagcatataaagcagatatttctaccaacgaaatcatcttaaaagagaagctcccttttatataa

SEQ ID NO: 51410 - protein, 238 aa, Pseudoalteromonas haloplanktis TAC125
MKYQPALQSATLLKRYKRFLADLQLSDGSEFTAHCANTGKMTGCAEPGFNAFYSTSTNSKRKYPQSLELTQNSLSQLICVNTAVANKVVAEAINANLISELSNYEQLQSEVKYGNENSRIDFLLTSDERPNCYVEVKSVTLLSQDNPHSGQGYFPDAPTLRGQKHIRELIEMVEQGHRAVLLFAVLHQGINQVSAAAHIDNKYAQLLNEAINQGVEVLAYKADISTNEIILKEKLPFI

SEQ ID NO: 51411 - DNA, 708 bp, Nitrosococcus oceani ATCC 19707
  CDS (1)..(708): transl_table=11
atgagttttgatcaaattctgctccccggcatattacggcgccgctaccagcggttttttgctgacgtagcgcttgaaaccggtgaatctatcgtggcccactgtcccaatacgggatcgatgcggggattagccgaacctgggctaggagtttacgtttcccgcgctaacaacccccgccgtaaacttgcttacacactagagctagtggacgctcacaccagcctggtgggtgtgcacacgggccgcgctaacattttgacgaaagaagccatcgcagcagggagaatatcccaactcttaggctatggagaaatccgccaggaagtccgctacagcaaaaattcccgaattgatcttctcctggaagacccttctacccagcaatgctgttacgtggaagtcaaaagcgtcaccctcaggcaaggtgacggggcggcctgcttccctgatgccgtcaccacccgtggcgccaagcatctggatgacttggctgccaccgtatgttccccccgccagcgggcggtcatgttctatcttgtgcagcgggaggattgccgctactttacccccgctgatgatatcgatccccgctatggcgctaagctccgctccgctatcgagcaaggagtcgaaatattggcctacgcctgccaagtctcctcccagggtattcaagtcacccagtcgctgcccatccatttatag

SEQ ID NO: 51412 - protein, 235 aa, Nitrosococcus oceani ATCC 19707
MSFDQILLPGILRRRYQRFFADVALETGESIVAHCPNTGSMRGLAEPGLGVYVSRANNPRRKLAYTLELVDAHTSLVGVHTGRANILTKEAIAAGRISQLLGYGEIRQEVRYSKNSRIDLLLEDPSTQQCCYVEVKSVTLRQGDGAACFPDAVTTRGAKHLDDLAATVCSPRQRAVMFYLVQREDCRYFTPADDIDPRYGAKLRSAIEQGVEILAYACQVSSQGIQVTQSLPIHL

SEQ ID NO: 51413 - DNA, 678 bp, uncultured euryarchaeote Alv
  CDS (1)..(678)
atgtggaaagtgatggacataccggtaagtaagcaaacggtatttttagagcgaaagaatcgttttctgggggtggttgagggcggaataaaagtgcatgtccacgaccccggccggctggaagaactgctttatccgggcaatgaggtgcttattcttcatactcccggtaaacacagaaagacggagtgggaccttattgccgcccgcgcacctgaggacggctcgtgggtgctggtgcattcagggtaccacaggcgcatatcggagcgcatactggaaaaaatgttttccgaagcggatataaacccggaggtaaggctgggtgagagccgcatagattttatgatacgtggtaatggagacattgcggtggaggtgaagggctgcactcttgcaagaaacgagattgcgcttttccccgacgcgcccaccacccgtggcacccgccatgttcacgagttaatacaatttaaaaaagcgggtaatgaagcaatgctcctgattctaattttccgcaacgcacggtgctttgcacccaactccgacaccgacccgaaatttgcagatgcgttcagagctgcggtgaatgtgggagtgagagtcgcgccagtgcgccttgtttattctccgccgggagtttattttgtggaggagctgccgctctgcgagcgctga

SEQ ID NO: 51414 - protein, 225 aa, uncultured euryarchaeote Alv
MWKVMDIPVSKQTVFLERKNRFLGVVEGGIKVHVHDPGRLEELLYPGNEVLILHTPGKHRKTEWDLIAARAPEDGSWVLVHSGYHRRISERILEKMFSEADINPEVRLGESRIDFMIRGNGDIAVEVKGCTLARNEIALFPDAPTTRGTRHVHELIQFKKAGNEAMLLILIFRNARCFAPNSDTDPKFADAFRAAVNVGVRVAPVRLVYSPPGVYFVEELPLCER

SEQ ID NO: 51415 - DNA, 723 bp, Aeropyrum pernix
  CDS (1)..(723): transl_table=11
gtggctgtggagctgcggtatgacgaggaggcagtgttcctaaggagggtgaacaggttcgttgtggaggtcaagagtagccgcggggtggttaggtgccacctgatggacactggcaggatagaccatctagcaagccctgggaggcggggagtgctgatagcctggctcaataggctcggaggcaagaccgtgtgccgtgcacaggctttcaagactgctggtggcgtagtggctgttgtcgactcgcgggtgcccaacaggctgttcgccgaggcggccccgatggtggttgggggtgacgcctcgatcgaggctgagagggaggtcttcggctcgaggctggacttcctcatatccactgggagggggctctgggctgttgaggttaagggcgtaaacctctcgctcgacggcgtcggcctgttccccaacgcccccagcgcaagggctgttaagcacctggaggtcctcgccaggctcgcgagggagggtgtgaagcctctcatggcgttcgtggccctcaggcctgacatcagggtattcgcccccaactacagggtcgacaggaggttcgccagcctggcctgcaccctcctgagaagagggctcgtgggcatggtgggcatcagggtctccatcgacctggagcctggggtggtgaggataaggcctgtagccacagcccccgtccaatgccccccactccagcctgggcgataa

SEQ ID NO: 51416 - protein, 240 aa, Aeropyrum pernix
MAVELRYDEEAVFLRRVNRFVVEVKSSRGVVRCHLMDTGRIDHLASPGRRGVLIAWLNRLGGKTVCRAQAFKTAGGVVAVVDSRVPNRLFAEAAPMVVGGDASIEAEREVFGSRLDFLISTGRGLWAVEVKGVNLSLDGVGLFPNAPSARAVKHLEVLARLAREGVKPLMAFVALRPDIRVFAPNYRVDRRFASLACTLLRRGLVGMVGIRVSIDLEPGVVRIRPVATAPVQCPPLQPGR

SEQ ID NO: 51417 - DNA, 720 bp, Agrobacterium tumefaciens
  CDS (1)..(720): transl_table=11
atgctcttcacgcctccgctcattcccgccacactgatttcccgctacaagcgtttcctgttcgatgccgttctggaggacggcaccgcgattaccggctcctgccccaataccggctccatgcgtgggctgacgacaccgggctcccgtatctggctctccgagcatgacagcccgacccgcaagtaccggcacatgtttgaaatggtcgaggccgatggcaccgtggtcggtatcaataccggcatgccgaaccggctggcggaagaagcgatcctgaatggccgcatcccggaactggccggctattcgacaatccgccgcgaacagaaatacggccgcaattcccgcatcgatttcctgctgtcggaacctggtcggccggatgcctatgtggaagtgaagaacgtgcatttcatgcgcgagaagggtcttgccgaatttcctgatacagccaccaaacgtggcgccaaacatctggaggaactgggtgacgcagcggaagctggttaccgctcagtgatgctctatctcatccagcgcgacgattgcgagcggatgcgcatctgcgccgatctcgaccccatctatgcactggcctttcagcgggcgatggcacgcggggtggaggcctatgcggtgaaatgcgcggtctcgccgacacaaatttcggtcagcggaacggttaagatggacgaatggcgtccggctgttttatga

SEQ ID NO: 51418 - protein, 239 aa, Agrobacterium tumefaciens
MLFTPPLIPATLISRYKRFLFDAVLEDGTAITGSCPNTGSMRGLTTPGSRIWLSEHDSPTRKYRHMFEMVEADGTVVGINTGMPNRLAEEAILNGRIPELAGYSTIRREQKYGRNSRIDFLLSEPGRPDAYVEVKNVHFMREKGLAEFPDTATKRGAKHLEELGDAAEAGYRSVMLYLIQRDDCERMRICADLDPIYALAFQRAMARGVEAYAVKCAVSPTQISVSGTVKMDEWRPAVL

SEQ ID NO: 51419 - DNA, 726 bp, Anabaena sp
  CDS (1)..(726): transl_table=11
atgactgattggctctaccgttacccacccctatatactggtattctgctaaagcgctacaagcgcttttttgctgacgtacaactaacgtctggcgaagtcgtaacagcacattgtcccaatacaggccccatgactggagtatcgactctagggagtgcggtacaactttctaaaagtgccaatcctaagcgtaaattggcttatactctagaactgattcaagtacatgataacgagccgacttgggtaggcgtaaatacagctttaccaaaccagatagtcaagttggctttggcaaaatacttgtttccagagttgggtaactatagctacatcaaaagtgaggtagtttacggggtagataaaaaaagtcgggtagatttctttttgacaggaagtgatacagaacgaccaatttatctagaggtaaaaaataccacttggacaaaagggactttagcattattccccgacacagaaaccacaaggggacaaaagcacttgcgggaattaacggcgttattgccacaaatgcgatcggtaatgctgtattttattaatcgtggtgattgtacagagtttgcccctggtgatagtacagatcctatatatggtaagttgttacgagaagcgatcgccttaggtttagaagttttaccttgtcgttttgatgttaccccagaaggcatccgttatctaggtttagcaaaactggtaatttaa

SEQ ID NO: 51420 - protein, 241 aa, Anabaena sp
MTDWLYRYPPLYTGILLKRYKRFFADVQLTSGEVVTAHCPNTGPMTGVSTLGSAVQLSKSANPKRKLAYTLELIQVHDNEPTWVGVNTALPNQIVKLALAKYLFPELGNYSYIKSEVVYGVDKKSRVDFFLTGSDTERPIYLEVKNTTWTKGTLALFPDTETTRGQKHLRELTALLPQMRSVMLYFINRGDCTEFAPGDSTDPIYGKLLREAIALGLEVLPCRFDVTPEGIRYLGLAKLVI

SEQ ID NO: 51421 - DNA, 645 bp, Aquifex aeolicus
  CDS (1)..(645): transl_table=11
atgaagcttcctcctctgatgcccgccattttcgtaaaaagactaaatagatttgtgggaaaggtttttttaaatgggaaaatagaaagagctctaatcaggaacacgggaagactttctgagctcttaaaattcggaaacactgtttttgttagggaaaaagagggtggaaagtacaggtacgaaatcatactcgcaagggcggagaagagtctcgtatgcgttgagtcccactacgccaacaagatttttgaggaatacattcgcagaaattggaaatttaaggagctaaagagagaagtaaagctggagaatgaacggtttgatttccttatagacaacacactggtagaggtaaagtccgttaacctggtaaaaaatggtgttgccatgttcccggacgctcctacaaaaaggggaacgggacacataaggactttgataaagctttccgataagttcaaacctctacttgttttcgtggttcaaagaagtgattttttaagttttgagcccaactgcgaaactgaccccgagttctgtaaagcttactacgaatacgtatctaaggggtttgaagttttagtactgaagtgtagagtttctttggaagagataaatgtagtagaagtatttttcacttaa

SEQ ID NO: 51422 - protein, 214 aa, Aquifex aeolicus
MKLPPLMPAIFVKRLNRFVGKVFLNGKIERALIRNTGRLSELLKFGNTVFVREKEGGKYRYEIILARAEKSLVCVESHYANKIFEEYIRRNWKFKELKREVKLENERFDFLIDNTLVEVKSVNLVKNGVAMFPDAPTKRGTGHIRTLIKLSDKFKPLLVFVVQRSDFLSFEPNCETDPEFCKAYYEYVSKGFEVLVLKCRVSLEEINVVEVFFT

SEQ ID NO: 51423 - DNA, 660 bp, Archaeoglobus fulgidus
  CDS (1)..(660): transl_table=11
atgaagctttttgagattgagaacgccgtggattgcaggataattggcagagtgaacaggtttgtggtggatgttgaggtggatgggaggagggaaagggcttacataaacaacacgggaaggctgaaggagctcatttttgagggtaatgtggggaaatgtttgaccaaaagaggtggaaagctctcgtacaggctttttgctgtcagttgcgaaggcggttacgctctgatagatacacagcttcagatgagagcctttgaggtagccattccgaaaataagctggcttgatggagaggttaggagaaacgttaaagttggaaactccataatcgattaccgcattggagagagctacgtggagcttaaaagtgctgccctcaagaagggaatctatgcgatgtaccccgactgccccaccgcaaggggtagaaagcacctcaggctgcttgaggagatagggaagaggtcaagagctttggttgtgttcgttgcggcattgccatcagtgagggccttcatgcccaacagagaaggggatgaggagctttacaggctgataaagcggtctaaaaacgtcgagttcaggtcgattcaggttgaataccttaacgggaaggtttttctgaggaatccagacctgaaggttgtgatttag

SEQ ID NO: 51424 - protein, 219 aa, Archaeoglobus fulgidus
MKLFEIENAVDCRIIGRVNRFVVDVEVDGRRERAYINNTGRLKELIFEGNVGKCLTKRGGKLSYRLFAVSCEGGYALIDTQLQMRAFEVAIPKISWLDGEVRRNVKVGNSIIDYRIGESYVELKSAALKKGIYAMYPDCPTARGRKHLRLLEEIGKRSRALVVFVAALPSVRAFMPNREGDEELYRLIKRSKNVEFRSIQVEYLNGKVFLRNPDLKVVI

SEQ ID NO: 51425 - DNA, 732 bp, Bacillus halodurans
  CDS (1)..(732): transl_table=11
atgtttttaccgtttaatacaaggttacaccacgcaacgtttttaaggcgaccgaatcgttttatcgtagaagcccgcctcgatacaggcgaggaggtggtggcacatctgcccgatccagggagattaaaggagctattactaccggaagcatccatatggcttcggcatgtagataacccgagccggaaaacgcagtggtccgtcgtttgcagccaagctccagaaggagatgttctcgtttccctcgatacgacattgccgaatcaacttgtgacgaaagcgttgcaacagcaagaattcctccctttgtgtcagtgggcttatgtaagacaagagtttacgtatggaggatcacgctgggatgtgttgcttagggaaggagaaaaacagttgcttctcgaaataaaaagcgtcacgctatccgaagcgggggtcgcctattttcctgacgccgttacggcgcgtgggacgaaacatgtaaaggagctgacagcgattcagcaatcaggtgactatgaaaccgccattcttctgttagcacagcgtgaggatgtaacggaaatcaggcctgcctatcatattgatcctcatttctcggccgcgttgcaggaagcagagaaatgtggtgtgcgtcttttaggccacacgagtaaagtgacgcttgaagggattgaattaggaaaaccggtaaaggtggatacgagtgagcgaaaggagacaagcgattga

SEQ ID NO: 51426 - protein, 243 aa, Bacillus halodurans
MFLPFNTRLHHATFLRRPNRFIVEARLDTGEEVVAHLPDPGRLKELLLPEASIWLRHVDNPSRKTQWSVVCSQAPEGDVLVSLDTTLPNQLVTKALQQQEFLPLCQWAYVRQEFTYGGSRWDVLLREGEKQLLLEIKSVTLSEAGVAYFPDAVTARGTKHVKELTAIQQSGDYETAILLLAQREDVTEIRPAYHIDPHFSAALQEAEKCGVRLLGHTSKVTLEGIELGKPVKVDTSERKETSD

SEQ ID NO: 51427 - DNA, 699 bp, Bacillus clausii
  CDS (1)..(699): transl_table=11
atgcgcttgccgccattaacgaaaatgcagttcgttcatcgccccaatcgttttgttgtcgagttaaagcggactgatacagaggagaacgtcctggcccatttgcctgatccaggacgtttgcgtgaattgttagtagaaggcgccatcatttgggcggagcctgctgttgacccgttgcgaaaaacggcgtggacagctgttctatgtgagacgcctggcggtgaccttgtttcattaaaaacgacttttgccaaccaactagtagaagaagcgctagcctcccaatcgcttgaagcatttagtggctggcagttagaaaaacgagaagcaacaataggccaatcgcgctttgattttttgctctcgaaaaacggacgcacgctggtgcttgaagtaaagagtgtaacgcttgctcggggcagcaaagggttttttccagatgcggtcacaaaaaggggcgcaaaacatgtccgggaattgactgctttgaatttgttgcccgagtatgagagtgcggttctgtttgtctctcaacatagcaacattagcacagtggaaatggaaagcagcatagacgctgattttgccaaagcgattaaggaggcaaacgataaaggtgtgttcattagcgctgtaagcactgaactatccaaacagaacatttgtttaaaaaatcggattccggttgtcgtctga

SEQ ID NO: 51428 - protein, 232 aa, Bacillus clausii
MRLPPLTKMQFVHRPNRFVVELKRTDTEENVLAHLPDPGRLRELLVEGAIIWAEPAVDPLRKTAWTAVLCETPGGDLVSLKTTFANQLVEEALASQSLEAFSGWQLEKREATIGQSRFDFLLSKNGRTLVLEVKSVTLARGSKGFFPDAVTKRGAKHVRELTALNLLPEYESAVLFVSQHSNISTVEMESSIDADFAKAIKEANDKGVFISAVSTELSKQNICLKNRIPVVV

SEQ ID NO: 51429 - DNA, 708 bp, Bartonella henselae
  CDS (1)..(708): transl_table=11
atgttctttattcataaactttttcccgcaaagcttattcgtcgttataaacgttttcttgctgatgttaaacgtgaagatcaacacatcttcaccgtatcggttcccaatacaggatcgatgcttggattaacaactccaaattctaatatttggctttcatatcacaataatcccaaacgaagatacgcatatcaattagagattgtcgaagcaaataataccttagttggaatcaatacaactttacccaacaaacttgcattagaagcaattcaaaataatttactaccagaattaaacggatacaaaacaatcttgaaagaacaacgttatggtattcaatcacgaattgactttcttttacgtgatgacatcctacctgactgttatctagaaattaaaaatgttcattttattcgccaaaaaggactagcagaatttcctgatactgagacaaaacgtggcacacgtcatcttgaagagcttataaaaatcgtgcaacaaggaaaacgagctgttatgctttatataattcaacgggaagattgttcagcttttacaatctgccgtgatcttgatccaacctatggacgtaaatttgatttagcattagaatcaggggtagaattttatgctataaaatgtcaagtaagtgtagaaggtattttcccaattcagcaagtgaaaatagaaaacagaaaatga

SEQ ID NO: 51430 - protein, 235 aa, Bartonella henselae
MFFIHKLFPAKLIRRYKRFLADVKREDQHIFTVSVPNTGSMLGLTTPNSNIWLSYHNNPKRRYAYQLEIVEANNTLVGINTTLPNKLALEAIQNNLLPELNGYKTILKEQRYGIQSRIDFLLRDDILPDCYLEIKNVHFIRQKGLAEFPDTETKRGTRHLEELIKIVQQGKRAVMLYIIQREDCSAFTICRDLDPTYGRKFDLALESGVEFYAIKCQVSVEGIFPIQQVKIENRK

SEQ ID NO: 51431 - DNA, 705 bp, Bartonella quintana
  CDS (1)..(705): transl_table=11
atgctctttattcccaaactatttcctgcaaaacttatccgtcgttataaacgttttcttgctgatgttaaacgagacgatcaggatatcttcaccgtgtctgttcctaatacaggttcaatgcttggcttaataactcccaattccaatatttggctttcatatcacaacaattctaagcgaaaatacgtgtatcaattagaaattgtcgaagcaaataatagtttggttggcatcaatacaactttacctaacaaacttgcattagaagcaattcaaaatggcttattaccagaattaaacgggtacaaaacaatcttgaaggaacaacgttatggtacgcaatcacggattgactttcttttgcgtgatgatatcctccctgactgttatctagaagttaaaaatgtccattttattcgtcaaaaagaattagcagaatttcctgatactgagacaaaacgtggcacacgtcatcttgaagagctcataaaaattgtgcaacaaggaaaacgagctgctatgctttatatgattcaacgggaagactgctcagcttttacaatctgccgtgatcttgatccaacctatggacgtaaatttgatttagcattaaaatcaggagtagaattttatgctgtaaaatgtcacgtaagtgtagaaggcatttttccgattcatcgagtgaaaatagaaaatgattga

SEQ ID NO: 51432 - protein, 234 aa, Bartonella quintana
MLFIPKLFPAKLIRRYKRFLADVKRDDQDIFTVSVPNTGSMLGLITPNSNIWLSYHNNSKRKYVYQLEIVEANNSLVGINTTLPNKLALEAIQNGLLPELNGYKTILKEQRYGTQSRIDFLLRDDILPDCYLEVKNVHFIRQKELAEFPDTETKRGTRHLEELIKIVQQGKRAAMLYMIQREDCSAFTICRDLDPTYGRKFDLALKSGVEFYAVKCHVSVEGIFPIHRVKIEND

SEQ ID NO: 51433 - DNA, 732 bp, Bdellovibrio bacteriovorus
  CDS (1)..(732): transl_table=11
atgaagtttcacagcaagctgcaagagggtatttttttaaagcgctataagcgcttctttgcggatattgaatttcaggggcagcaggtgacggcccatgttcccaacaccggcagtctaaaaagtgtgaacaatccgggacagcactgtctgttttctgaaagcaccaatccggagcgtaagctgaagtacactctggaaatgatcaagtccccgacgggatcctgggttggggttaatacggcgactccaaacacagtggtgcgtgaaacccttcatcatgtggtcggtcacaaaaaagaggtgattggcggctttgcccactgggcggcctttgatgaagtgaagccggaatacaaaatcagcgcggaaacccgcctggattttgccctgaagaaaaacaacagcgataaaatgcattttatcgaagtgaaaaacgtgaccctggctgaagaagggaccgccaagttcccggacgctgtgaccgagcgcgggcaaaagcatctgcgtgagcttatggcattgatggagcaggggcacacggcggaaatcgtcttcacaatccagcgtcacgactgcggttcgttctctccggcggatgacattgatccggaatatggccgtctgctgcgtgaggcctatcaaaaagggctgcgtgtttcgccttttgtgctggatctgactccggagtccgtcgagttgtctgagacagttctgccgctaaaaatgtag

SEQ ID NO: 51434 - protein, 243 aa, Bdellovibrio bacteriovorus
MKFHSKLQEGIFLKRYKRFFADIEFQGQQVTAHVPNTGSLKSVNNPGQHCLFSESTNPERKLKYTLEMIKSPTGSWVGVNTATPNTVVRETLHHVVGHKKEVIGGFAHWAAFDEVKPEYKISAETRLDFALKKNNSDKMHFIEVKNVTLAEEGTAKFPDAVTERGQKHLRELMALMEQGHTAEIVFTIQRHDCGSFSPADDIDPEYGRLLREAYQKGLRVSPFVLDLTPESVELSETVLPLKM

SEQ ID NO: 51435 - DNA, 717 bp, Brucella melitensis
  CDS (1)..(717): transl_table=11
atgctgtttcctacccccctcatttccggcaggctggagcgccgctacaagcggtttcttgccgatgtcactcttgatgatggccggttcatcaccgcctccgttcccaataccggctccatgctgggcctgacggcgcccggttcacgggtctggctcagcttttcggacgccccgcaccgcaaatatgcgcacacactccagattgtcgaggccgacaatacgctggttggcgtcaataccggattgccgaaccgcatcgcggaggaagcgatcctgaaaggcctcatacccgaccttgacggctatgcgaccctcaagcgagagcaaaaatacgggcgcaattcccgcatcgaccttctgctcgatgatggcccccgcccgcgcgcctatgtcgaagtaaagaatgtgcatttcattcgcacgcccggccttgcagaattccccgatacggtgacggcgcgcggcgcaaaacatctggacgaacttgttgatgttgttgccgctggtcatcggggcataatgctgtttattacccagcgcgccgattgcagcagatttggtatttccggcgatcttgatcccttttacgcacgggcttttgaacgtgcgattgcatccggggttgaggcttgggccgttcggtgccacataacggaaaatggcatcgacgccacagagctggtgccaatcgaggacatgagacggatcgagtga

SEQ ID NO: 51436 - protein, 238 aa, Brucella melitensis
MLFPTPLISGRLERRYKRFLADVTLDDGRFITASVPNTGSMLGLTAPGSRVWLSFSDAPHRKYAHTLQIVEADNTLVGVNTGLPNRIAEEAILKGLIPDLDGYATLKREQKYGRNSRIDLLLDDGPRPRAYVEVKNVHFIRTPGLAEFPDTVTARGAKHLDELVDVVAAGHRGIMLFITQRADCSRFGISGDLDPFYARAFERAIASGVEAWAVRCHITENGIDATELVPIEDMRRIE

SEQ ID NO: 51437 - DNA, 717 bp, Brucella suis
  CDS (1)..(717): transl_table=11
atgctgtttcctacccccctcatttccggcaggctggagcgccgctacaagcggtttcttgccgatgtcactcttgatgatggccggttcatcaccgcctccgttcccaataccggctccatgctgggcctgacggcgcccggttcacgggtctggctcagcttttcggacgccccgcaccgcaaatatgcgcacacactccagattgtcgaggccgacaatacgctggttggcgtcaataccggattgccgaaccgcatcgcggaggaagcgatcctgaaaggcctcatacccgaccttgacggctatgcgaccctcaagcgagagcaaaaatacgggcgcaattcccgcatcgaccttctgctcgatgatggcccccgcccgcgcgcctatgtcgaagtaaagaatgtgcatttcattcgcacgcccggccttgcagaattccccgatacggtgacggcgcgcggcgcaaaacatctggacgaacttgttgatgttgttgccgctggtcatcggggcataatgctgtttattatccagcgcgccgattgcagcagatttggtatttccggcgatcttgatcccttttacgcacgggcttttgaacgtgcgattgcatccggggttgaggcgtgggccgttcggtgccacataacggaaaatggcatcgacgccacagagctggtgccaatcgaggacatgagacggatcgagtga

SEQ ID NO: 51438 - protein, 238 aa, Brucella suis
MLFPTPLISGRLERRYKRFLADVTLDDGRFITASVPNTGSMLGLTAPGSRVWLSFSDAPHRKYAHTLQIVEADNTLVGVNTGLPNRIAEEAILKGLIPDLDGYATLKREQKYGRNSRIDLLLDDGPRPRAYVEVKNVHFIRTPGLAEFPDTVTARGAKHLDELVDVVAAGHRGIMLFIIQRADCSRFGISGDLDPFYARAFERAIASGVEAWAVRCHITENGIDATELVPIEDMRRIE

SEQ ID NO: 51439 - DNA, 720 bp, Caulobacter crescentus
  CDS (1)..(720): transl_table=11
atgctgctgccgcaaccgctgatccatggtcgtctggtgagccgctacaagcggttcttcgccgacctcgtactggacgacggccaggagatcaccgcccactgccccaatccgggggccatgctgggggtgaaggacgcaggccaaggcgcctgggtgtcgtggtcagacgatcccaagcgcaagctggcctacaccctgcagatggtcgagcagggaaacgcgctggtcgggatcaacaccctgctgcccaacaagctggtggccgaggccctggcggcggacgccctccccgagctttccggctacgcgaccatcaagcccgaggtgaaatacgccgaagccagccgcgtcgacttcctgctgacccaccccgatcgcccgccctgctggctggaggtcaagaactgccacttctcgcgcaccccgggcctggcggagtttcccgactgcaaggcgcagcgctcgacccggcacctggaggacctttccgcccaggtccgcgagggccatcgggccgtggtgctgttcgtcgtccagcgcgaggactgcgagaccttcagcgcctgcgcggagctcgacccggcgttcgcggcggggctggaggcggcggccaaggccggggtggaggtgctggtctatgcgtgtgaaatggggacgcaggcggtgcggatcgcgcggcgcattttgtggagccacgcccacctaacagcgatttaa

SEQ ID NO: 51440 - protein, 239 aa, Caulobacter crescentus
MLLPQPLIHGRLVSRYKRFFADLVLDDGQEITAHCPNPGAMLGVKDAGQGAWVSWSDDPKRKLAYTLQMVEQGNALVGINTLLPNKLVAEALAADALPELSGYATIKPEVKYAEASRVDFLLTHPDRPPCWLEVKNCHFSRTPGLAEFPDCKAQRSTRHLEDLSAQVREGHRAVVLFVVQREDCETFSACAELDPAFAAGLEAAAKAGVEVLVYACEMGTQAVRIARRILWSHAHLTAI

SEQ ID NO: 51441 - DNA, 693 bp, Clostridium acetobutylicum
  CDS (1)..(693): transl_table=11
ttgaagatagataatatgacgaaacttgccaaatttgtaaaaaggccaaatagatttcaagcatatatagaattagaaggcgaagaaatgatggttcatgtacccaataccggaagatgcagggaaatattacttccaaattgtactgtggtactgcgagaggaaaataatccaaatagaaaaactaaatatgatttaattggagcatataagggagaaaaatttataaatatagattctcaaattcctaataaagttgtttatgaggcgctttacaataagaaagtggagagcttagctaaatataatattataatgaaagaaaagacctttaaaaacagcagatttgattttagattggaaaatgatgagggagaggtttatttcctggaggttaagggagtaacacttgaggataaaggagttgctagatttccagatgcaccaactgaaagaggagcaaagcatttaaaagaacttgttgaggccaaaaaaagcggatatggggcaggtgtattatttcttatgcaaatggataatataagtgagttcagaccacatgatgagatggacaaaatgtttggagaagcacttagatatgcagcaataaatggtgtagatgtgatggcttacgagtgttctgttgatgaaaaaagtataactcttacaaagagtgttaagatagttctttaa

SEQ ID NO: 51442 - protein, 230 aa, Clostridium acetobutylicum
MKIDNMTKLAKFVKRPNRFQAYIELEGEEMMVHVPNTGRCREILLPNCTVVLREENNPNRKTKYDLIGAYKGEKFINIDSQIPNKVVYEALYNKKVESLAKYNIIMKEKTFKNSRFDFRLENDEGEVYFLEVKGVTLEDKGVARFPDAPTERGAKHLKELVEAKKSGYGAGVLFLMQMDNISEFRPHDEMDKMFGEALRYAAINGVDVMAYECSVDEKSITLTKSVKIVL

SEQ ID NO: 51443 - DNA, 693 bp, Clostridium perfringens
  CDS (1)..(693): transl_table=11
atgaagtacaatagtgttatcagaaaagctatttttttaagaagaccaaatagatttcaagcttatgtagttttagatgatgaggagttattagttcatgtccctaacactggaaggtgtagagagattttaaaagaaggatgtacagttcttttaagaaaaggaactactccaaatagaaaaactccgtatgatttaattgcagcttataagggtgaggttttaataaatatagattctcagattcctaataaagttgtagaagaggcattaagaaataaaaagatagaaaagctagtaaattttaataatataagtagagaaaaaacttttggaaattctagatttgattttaaattacaagatgataatgaaaatacatactttttagaagtaaaaggggtaactttagaggaaaatggagagactaggtttccagatgctccaactgaaagaggaaagaaacacatattagaactgattgaaattaaaaaattaggaatgggtgcaggaataatttttttaatacagatagataatgtaaataagttttctcctaatgatgaaacagatcctaagtttggggaagcattgagattagctaaaaaagaaggagtagatatctttgcatataattgcaaagttactgaagaggaaattgagttgcttaattctgtagaaatagtgttataa

SEQ ID NO: 51444 - protein, 230 aa, Clostridium perfringens
MKYNSVIRKAIFLRRPNRFQAYVVLDDEELLVHVPNTGRCREILKEGCTVLLRKGTTPNRKTPYDLIAAYKGEVLINIDSQIPNKVVEEALRNKKIEKLVNFNNISREKTFGNSRFDFKLQDDNENTYFLEVKGVTLEENGETRFPDAPTERGKKHILELIEIKKLGMGAGIIFLIQIDNVNKFSPNDETDPKFGEALRLAKKEGVDIFAYNCKVTEEEIELLNSVEIVL

SEQ ID NO: 51445 - DNA, 693 bp, Clostridium tetani
  CDS (1)..(693): transl_table=11
atgattataaaaaagaatattaaacgagctgaatttattaaaagacctaatagatttcaagcatatgtaaaagtagataatgaagaaatcatggttcatgttccgaatactggaagatgtaaagaaatattaataccaggaacaacagtagttttaagagaagagagtaatcctacaagaaagactaagtatgacttaattggtggatataaaaatggtaaatttataaatatagattctcaaataccaaataaagtagttgaggaagcacttaaattgggaaatataaaaaaactaaaaaaatataatataataaaaagagaaaaaacctatggtaatagtagatttgattttaaactaggtaatgattctggagaggaatattatttagaagtaaaaggagttactttagaagatgggggagtaacaaagtttccagatgctccaacagaaagaggaactaaacatattttagagctaatagatgttaaaaataaaggcataggtgcaggagtgttatttttaatacagatgaaggatgtaaagtattttactcctaatatagaaatggataaaaacttttcagaagctttagtgtcagcacacaaagcgggagttgatatttttgcatatgaatgtgatgtggatgaagattttataactttaaaaaaagaagttaaagttatactatag

SEQ ID NO: 51446 - protein, 230 aa, Clostridium tetani
MIIKKNIKRAEFIKRPNRFQAYVKVDNEEIMVHVPNTGRCKEILIPGTTVVLREESNPTRKTKYDLIGGYKNGKFINIDSQIPNKVVEEALKLGNIKKLKKYNIIKREKTYGNSRFDFKLGNDSGEEYYLEVKGVTLEDGGVTKFPDAPTERGTKHILELIDVKNKGIGAGVLFLIQMKDVKYFTPNIEMDKNFSEALVSAHKAGVDIFAYECDVDEDFITLKKEVKVIL

SEQ ID NO: 51447 - DNA, 711 bp, Desulfotalea psychrophila
  CDS (1)..(711)
atggacttctcacaaggactcaccccggcaagactcatcagaagatataaacggtttttagcggatgtagagatcgaagatggtacgatcataacagtctactgccccaatacgggcaccatgcgtacctgctcaacacctaacagccccgttatgctctccatctccgacaaccccaagagaaaatacgcccacaccctggagatgatctttgaaaatcacacttggataggagttaacacagggcggacaaatagcatcgtcgcaaaggccattctcaatggcagtatagctgaattttctggagctaccaaggtgcagcgagagataaccgtctccaagggcagtcgattagacctccttgtagaccatgcggatcaaaaaagctatattgaaattaaaaattgttccatggcggaaaatcgaagggcaatgttccccgatgcagtcactgcccgcggcacaaagcacctacgagagcttatcaaattagtgaagcaaggagaaaatgcctacatattctttcttatccaacgagaggacgccgattccttctcgccggcaacccacatagatcccctctacgccaacacgctgaaagaagcactgcaacaaggagtgcaggcactggcctaccaggcaagcgtcattctccgagcgcttccaatcatcctcaacggcagtaactctcctcacctgccacaaaggtaa

SEQ ID NO: 51448 - protein, 236 aa, Desulfotalea psychrophila
MDFSQGLTPARLIRRYKRFLADVEIEDGTIITVYCPNTGTMRTCSTPNSPVMLSISDNPKRKYAHTLEMIFENHTWIGVNTGRTNSIVAKAILNGSIAEFSGATKVQREITVSKGSRLDLLVDHADQKSYIEIKNCSMAENRRAMFPDAVTARGTKHLRELIKLVKQGENAYIFFLIQREDADSFSPATHIDPLYANTLKEALQQGVQALAYQASVILRALPIILNGSNSPHLPQR

SEQ ID NO: 51449 - DNA, 729 bp, Desulfovibrio vulgaris
  CDS (1)..(729): transl_table=11
atgcgaaagatactgctcccctatccggcaggatgcgcgaccgggacgttcgtgcgccgcgtcaaacgcttcagtgtggagatgacgcgcgacggcgaaagcgtgtgggtacacagcaacaattcaggcagcatgctgggattgctgcgccccggcgccaccatgctggcatcccctgccgccaaccccgaccgcaagctggcgtggacgcatgaggccatgcgctgtcatggcgacgggccgcaaggcttctgggtgggggtcaacacttcggtgcccaaccgcatggtcgaagcggcgttccatgccggacgcctgccatgggcgcagggctacgataccttccggcgtgaacgcaagcggggcgacagccgcctcgacgcccgtctcgacggccccggactgccgacgctgtgggtggagtgcaagaacgtgacgatggtggaggatgatgtggcgtgcttccccgacgcggtgaccgaacgtggcagcaagcacctgcgcgagatgatggacatcgtgtcgcgcggcgaacgcgccgccatgttctacctcgtgcaacgccccgacggactgtgcttcggccccgccgatgtcatcgacccgcagtacgcagccctcttctgggaggcggtggatgcgggggtcgagatgtacccgcaccgtggcatcgtctccccggtaggtatcgaccttagtggggtgctgccgcttacgcgatgcaggtga

SEQ ID NO: 51450 - protein, 242 aa, Desulfovibrio vulgaris
MRKILLPYPAGCATGTFVRRVKRFSVEMTRDGESVWVHSNNSGSMLGLLRPGATMLASPAANPDRKLAWTHEAMRCHGDGPQGFWVGVNTSVPNRMVEAAFHAGRLPWAQGYDTFRRERKRGDSRLDARLDGPGLPTLWVECKNVTMVEDDVACFPDAVTERGSKHLREMMDIVSRGERAAMFYLVQRPDGLCFGPADVIDPQYAALFWEAVDAGVEMYPHRGIVSPVGIDLSGVLPLTRCR

SEQ ID NO: 51451 - DNA, 729 bp, Enterococcus mundtii
  CDS (1)..(729): transl_table=11
ttggactaccaagatgttgaaattgcttacttcattgaacgaccaaatcgctttattgctttttgtttgaacaaaaaaggagaagtagtcaaaactcatgttaagaatacaggtagaggcaaagagttgttgcttcctggtgcagaggtggcgttagtacacattcctggaacaaaacgtaaaactgcctatgatctgattgctgtaaaaaaagagcagcagtggttcaatatcgatagtcagttaccaaaccgattagcgattgatggaattttagatgggacgatccacttaccaaatttaaatagtgatattgagttctacaaacgtgaagtgacctttggaaagtctaaatttgatatttatttagaaacaagttgcggtcaaaaagcatttgtagaagtcaaagggatgaccctggaaaacaaagcaataggtgcttttcccgatgcaccgaccattcgtgggcttaaacacgtcaatgaattgatcggcgcgcatcaagaaggctatgagacctatattctttttattgcacaatttgaacacttgcatcaagcaacgatccatgagcagatgcaaccagaattagccactgcttttcgttttgctcagcaagcaggtgttcaagtaatcgtatataattgtcaagtaacagaaaaacaagtggtattgaaacaagcaatcccatttgacctaaatacagtttttgaagatcctaatttatag

SEQ ID NO: 51452 - protein, 242 aa, Enterococcus mundtii
MDYQDVEIAYFIERPNRFIAFCLNKKGEVVKTHVKNTGRGKELLLPGAEVALVHIPGTKRKTAYDLIAVKKEQQWFNIDSQLPNRLAIDGILDGTIHLPNLNSDIEFYKREVTFGKSKFDIYLETSCGQKAFVEVKGMTLENKAIGAFPDAPTIRGLKHVNELIGAHQEGYETYILFIAQFEHLHQATIHEQMQPELATAFRFAQQAGVQVIVYNCQVTEKQVVLKQAIPFDLNTVFEDPNL

SEQ ID NO: 51453 - DNA, 705 bp, Erwinia carotovora subsp
  CDS (1)..(705): transl_table=11
atggactataccccacgtttacagcccgcccggttgattaaacgttacaaacgctttttggccgatgtcgtaacgccggaaggcgagacgctcacgctgcactgtgccaatacgggtgcaatgacgggctgtgctacgcccggtgataccgtctggtattcaacgtccgataaccctaaacgcaagtatccacaaagttgggaactgactgaaacgcaacaaaatcactggatttgtgtcaatactctgcgtgccaacacattattgtacgaagccttattggaaaatcgcatagaagagctggcgggctattcggacataaaaacagaagtgaaatacggtacggaaaacagccgaatagacctgcttttacaggcgccggacaggattgactgctatattgaggtgaaatccgtcacattattgcaacatgaatgtggttactttcccgatgcggttacactcagagggcaaaagcatctgcgtgagctgcaacaaatggtttccaatggaaaacgcgcggttctttttttcgccgttctccattcagggatccagcaggtttctcccgctcggcatattgactcacgctatgcggaattatttatcgaagcgcaacaggcaggggttgaaattttatgttacggctccacattatgccctgacggtattaaattgacgaataagctaccgttgttgggatga

SEQ ID NO: 51454 - protein, 234 aa, Erwinia carotovora subsp
MDYTPRLQPARLIKRYKRFLADVVTPEGETLTLHCANTGAMTGCATPGDTVWYSTSDNPKRKYPQSWELTETQQNHWICVNTLRANTLLYEALLENRIEELAGYSDIKTEVKYGTENSRIDLLLQAPDRIDCYIEVKSVTLLQHECGYFPDAVTLRGQKHLRELQQMVSNGKRAVLFFAVLHSGIQQVSPARHIDSRYAELFIEAQQAGVEILCYGSTLCPDGIKLTNKLPLLG

SEQ ID NO: 51455 - DNA, 699 bp, Geobacter sulfurreducens
  CDS (1)..(699): transl_table=11
atgattctgccacgacctctttactccggcaccctgatccggcgctaccagcgcttcctggccgacgtacgcctcgacgacgggacggtggtcaccgcccactgcccgaactcggggagcatgaaaggatgctgccagccgggaagcgccgtgttcctttctctcagcgacaatccgaagcggcgcctcgcctacacctgggaactggtcatggctgacggctactgggcggggataaacacgggcctccccaaccggctcgtccgggaggggattgaaaacggcaccgtcgcggaactcctggggtatgagcgcatccggcccgaagtccgctacgggacgaacagccgggtggatctgctgctggaagggcctggccgctgctgggtcgaagtgaaaaatgtgaccctcgtggaagggggaacggccctcttccccgacgccgtgacggaacgggggcaaaaacacctgcgggagttgatggaggtggtgcggcagggggaccggggagtgatcttcttcgtggtccagcgtggcgacgggtctgccgtggccccggcggacgccattgacccggtgtacggccggcttctgcggcaggccgtgactgccggggtagaagccctggcctaccgggcgctcgtaacgccggaggaaatccggctcacggagcggctgccggtgcttgccggggaatga

SEQ ID NO: 51456 - protein, 232 aa, Geobacter sulfurreducens
MILPRPLYSGTLIRRYQRFLADVRLDDGTVVTAHCPNSGSMKGCCQPGSAVFLSLSDNPKRRLAYTWELVMADGYWAGINTGLPNRLVREGIENGTVAELLGYERIRPEVRYGTNSRVDLLLEGPGRCWVEVKNVTLVEGGTALFPDAVTERGQKHLRELMEVVRQGDRGVIFFVVQRGDGSAVAPADAIDPVYGRLLRQAVTAGVEALAYRALVTPEEIRLTERLPVLAGE

SEQ ID NO: 51457 - DNA, 711 bp, Gloeobacter violaceus
  CDS (1)..(711): transl_table=11
atgagtgtgctttttgagtacccgcccctggtacgggggatcctgcgccgtcgctacaagcgattttttgccgaggttgaactggaggacgggcaactggtcaccgcccactgcccgaacaccggtccgatgcgggccatcagcaccctcggaagtccggtatatctgtcgcgctcaccggatccggcccgcaagctcgcctacacctgggagatgatcgacctagacggcacctgggtcggggtgaatacggcccttcccaaccgcatcgtctaccgggctctggtggagcgggtgattgccgaggtgggcacttaccggaccattcgccgcgaagtgccttacggtagtgaaaacagccgcatcgattttttgctcaccggcgagggggagccgctgtacctggaggtcaagagcactaccctcaaccagggcaccctcgccctgtttccggatacggtcaccacccgcggccagaaacacctgcgcgaactgatccgcctttgtgagcacggcacgcgggcagcgatgctgtacttcatcaaccgcggtgactgcacggccttcagcccgggcgattccctcgatccgctttatggacaactgctgcgtgccggtatcgagcgcggtctgctggtcttgccctgccgcttcgagatcaccccccaatcggtgcgctacctgggtacggcctcgattctgcttgcctga

SEQ ID NO: 51458 - protein, 236 aa, Gloeobacter violaceus
MSVLFEYPPLVRGILRRRYKRFFAEVELEDGQLVTAHCPNTGPMRAISTLGSPVYLSRSPDPARKLAYTWEMIDLDGTWVGVNTALPNRIVYRALVERVIAEVGTYRTIRREVPYGSENSRIDFLLTGEGEPLYLEVKSTTLNQGTLALFPDTVTTRGQKHLRELIRLCEHGTRAAMLYFINRGDCTAFSPGDSLDPLYGQLLRAGIERGLLVLPCRFEITPQSVRYLGTASILLA

SEQ ID NO: 51459 - DNA, 717 bp, Haemophilus influenzae
  CDS (1)..(717): transl_table=11
atgcaacttccagctttacaatcggcgacattaattcgtcgttacaaacgatttcttgcggatattgaattgccaactggtgatgttatgacaattcattgtgccaatacaggtgcgatgactggatgcggtgaaaaaggcgataaaatttggtattcacattctgatagtcaaactcgtaaatatccccattcttgggaactcactcaactcgcaaatggacagctttgctgtatcaatacgcatcgttctaatcagcttgtctttgaagcattgcaaaataagcaaatcaaagaattggcaatgtatgatgaaatttaccctgaagtgaaatacggcgaggaaaatagccgaattgatttcttactaaaaggcgaaggcttgcttgattgttatgtagaagtgaaatcaatcacgcttgtaaaaggcaatttaggtatgtcccccgatgcggttactacaagggggcaaaaacatgttcgagagttattggcaatgaaaaaacaaggtcatcgagcagtggtactatttgctgggttacataatgggtttgatcgtttcaaaattgcggaatatatcgatcctgaatatgatcgcttattaaaagaagcaatggaacaaggtgttgaagcctatgcttatgcgggacaatttgaaatttctaatgaaattcctaccgcactttctttgacagaatcggtgtcttatataaaataa

SEQ ID NO: 51460 - protein, 238 aa, Haemophilus influenzae
MQLPALQSATLIRRYKRFLADIELPTGDVMTIHCANTGAMTGCGEKGDKIWYSHSDSQTRKYPHSWELTQLANGQLCCINTHRSNQLVFEALQNKQIKELAMYDEIYPEVKYGEENSRIDFLLKGEGLLDCYVEVKSITLVKGNLGMSPDAVTTRGQKHVRELLAMKKQGHRAVVLFAGLHNGFDRFKIAEYIDPEYDRLLKEAMEQGVEAYAYAGQFEISNEIPTALSLTESVSYIK

SEQ ID NO: 51461 - DNA, 705 bp, Idiomarina loihiensis
  CDS (1)..(705): transl_table=11
atgcaatttaacaagcccctgcgccagggagttttgcaaaaaagatacaaacgttttctcgccgacattgattttggtgacaacgaaacgacgacaacccactgccctaataccggagccatgaccgggtgtgcagagcctggctttacagcctggtgcagtgtttccgataatcccaaacgtaaatactcactgacctgggagctcgctcagaataacaacggtgaaatgattgtagtcaatacacagcacgctaaccgcatggccggagaattactacaaaccaaccttgtacctgaattaagccagtggcaagagctgaaaccagagcaacgctacggtaaggaaaaaagccgcatcgactggtggggcgtagaccagcataaccgtgaatgctttattgaagtaaaaagcgtcactttagcggacgcaagtcaaggttactttcccgacgcagtcagccaacgcgctcacaaacaccttaatgaactgatgcaggttgtggccgatggtcatcgcgcagtgcagctttacatggtaatgcacgacggtatcgaacgagtttctcccgccgcacatattgacagccagtatgctgagctgtgtagaaaagcagcgtcagtcggagtcgagttttatgcagtaaagtgccgcgcgtcggcgaaagaaataaaactggagagaccagttcccgtaagcctttaa

SEQ ID NO: 51462 - protein, 234 aa, Idiomarina loihiensis
MQFNKPLRQGVLQKRYKRFLADIDFGDNETTTTHCPNTGAMTGCAEPGFTAWCSVSDNPKRKYSLTWELAQNNNGEMIVVNTQHANRMAGELLQTNLVPELSQWQELKPEQRYGKEKSRIDWWGVDQHNRECFIEVKSVTLADASQGYFPDAVSQRAHKHLNELMQVVADGHRAVQLYMVMHDGIERVSPAAHIDSQYAELCRKAASVGVEFYAVKCRASAKEIKLERPVPVSL

SEQ ID NO: 51463 - DNA, 720 bp, Mannheimia succiniciproducens
  CDS (1)..(720): transl_table=11
atgcgactccctccccttcaggcggcaaaatttatccgccgttataaacgttttatggcagatgtggaattagccaacggcaatattctgaccattcactgcgccaacaccggtgcgatgacaggctgcgcggaaaaaggcgatacggtttggtattccgactcgaaaagtactacaagaaaatacccatgctcttgggaactcaccgaactgtcaaacggtaatctggtttgcattaatacgcaccgttcgaatcaattagtgcaggaagccttacaaaacaaagtaattaaagaacttgccgggtattcggaaatttaccccgaggttaaatacggcgaagaaaacagccgcattgattttctgctcaaaggcgaaggtttgcccgattgttacgtggaagtaaaatccattaccttggtaaaaaacaatatcggcatgttccccgatgcggtcactacccgcgggcagaaacacgttcgcgaattactagccatgaaaaaacagggttatcgtgctgttgtgttatttgccggcttgcacaacggctttgactgttttaaaaccgccgaatatattgatcccgattatgacaagcttttgcgccaggcaatgaaagaaggcgttgaagtttacgcttatgcgggcaaattcgataaaattcaagaaattccgaccgcactttctttagcggaagtcgtaccgctttgctttaattga

SEQ ID NO: 51464 - protein, 239 aa, Mannheimia succiniciproducens
MRLPPLQAAKFIRRYKRFMADVELANGNILTIHCANTGAMTGCAEKGDTVWYSDSKSTTRKYPCSWELTELSNGNLVCINTHRSNQLVQEALQNKVIKELAGYSEIYPEVKYGEENSRIDFLLKGEGLPDCYVEVKSITLVKNNIGMFPDAVTTRGQKHVRELLAMKKQGYRAVVLFAGLHNGFDCFKTAEYIDPDYDKLLRQAMKEGVEVYAYAGKFDKIQEIPTALSLAEVVPLCFN

SEQ ID NO: 51465 - DNA, 723 bp, Methanobacterium thermoautotrophicum
  CDS (1)..(723): transl_table=11
atgatggttgccatgatcatagagaaccccttaaggggaagctacattgaaaggcccaacaggttcacagtggctgtttatgttgatggtgagaggcggctagcccacctgagggaccctggaaggctcagagaacttctgatacctggaaacgatgttatactgaggaaagcctcctcaggaaaccggaaaacagagtttgatgttatagccctcaggagggatgatgagtgggtgcttgtaaactcgggcttccacagtgacctggctgccagtataatagaatcctcagcagtggatgagtttcgtggcttcagaatagaaaagagggaatgcagcttcggcagaagcaggattgattttctgctggcatctgaaaatgaaaggatgctcgttgaggtcaagggctgcacccttgtcagggaaaaccttgcgcttttccctgacgcacccacagagaggggcaggagacacgttgaggaactggaacgcgccctctctgagggttaccatagcagtgtactcttccttgtatttggcagaagtgcacgcttcttttctccaaatcatgaaatggatcctgagttttcatctgcacttagaagggcccatgaagcaggcgtgaatgtaataccctacaccctggccactgatatcaatgagaaagtccttgtgtatcccctaaggagaatagctgtgcgttggccgggtgaatccccctga

SEQ ID NO: 51466 - protein, 240 aa, Methanobacterium thermoautotrophicum
MMVAMIIENPLRGSYIERPNRFTVAVYVDGERRLAHLRDPGRLRELLIPGNDVILRKASSGNRKTEFDVIALRRDDEWVLVNSGFHSDLAASIIESSAVDEFRGFRIEKRECSFGRSRIDFLLASENERMLVEVKGCTLVRENLALFPDAPTERGRRHVEELERALSEGYHSSVLFLVFGRSARFFSPNHEMDPEFSSALRRAHEAGVNVIPYTLATDINEKVLVYPLRRIAVRWPGESP

SEQ ID NO: 51467 - DNA, 723 bp, Pasteurella multocida
  CDS (1)..(723): transl_table=11
atgcaacttcctccccttcaatccgcgacactgattcgtcgctacaaacgttttctcgcagatgtacaacttgataatggtgaggtgctaaccattcattgtgcaaataccggtgccatgacaggttgtggtgaagcaggagatattgtttggtattcacattccgatagtcaaacacgtaaatacccacattcttgggaattaaccgagctaaaaaatggcaatatggtctgtattaatactcatcgttctaatcaactcactttagaagcactgcaaaataaacaaattaaagcattggcgatgtatgaacagatcctaccagaagtgaaatatggtgaggaaaatagccgaattgattttttactcaaaggcgatggattacccgattgttatgtagaagtgaaatctgtcaccttagtaaaaaacacgattggcatgttccctgatgcagtcactacacgaggacaaaaacatttacgcgaattaatagcaatgaaaaaaagaggacatcgtgccgtagtcttttttgcgggcttacacaatggttttgattgttttaaagtggcagaatatattgacccagaatacgacaagttgttacaagaggcgatacaagaaggcgtagaggtgtatgcctatgcaggtaaatttgatttttctgataaaaaaccaaccgcactttctctcacccattgtgtaccttatatcggtaaaaagtaa

SEQ ID NO: 51468 - protein, 240 aa, Pasteurella multocida
MQLPPLQSATLIRRYKRFLADVQLDNGEVLTIHCANTGAMTGCGEAGDIVWYSHSDSQTRKYPHSWELTELKNGNMVCINTHRSNQLTLEALQNKQIKALAMYEQILPEVKYGEENSRIDFLLKGDGLPDCYVEVKSVTLVKNTIGMFPDAVTTRGQKHLRELIAMKKRGHRAVVFFAGLHNGFDCFKVAEYIDPEYDKLLQEAIQEGVEVYAYAGKFDFSDKKPTALSLTHCVPYIGKK

SEQ ID NO: 51469 - DNA, 708 bp, Photorhabdus luminescens subsp
  CDS (1)..(708): transl_table=11
atggaattccatccacctttacaatctgccacgctaattcgtcgttataaacgcttcctggctgatgtcatcacaccggaaggtgaaacactgactatccactgtgccaatacaggtgccatgaccggctgtgcgacaccgggagatacggtttggtattccacctccgataatccaaaacgtaaatacccaaacagttgggaattgacagaaacaccggctggtcactggatttgtgtcaatacgctcagagcaaatgatttagtcgccgaggctattgcacaaaatgccattccagaattttctgaatataaaaaaatcagccgggaagtgaaatatggcgaagagaacagtcggatagatttactgttacaagcagaacagcaggttaattgctatattgaagtgaaatcagtgacactgctccaagaaaattgtggctatttcccagatgctgtcacgacccgcggacagaaacacttgcgggaattgcagcacatagcagaacaagggcaaagagctgttttattttttgctgttctgcattctgggatcaatcaggtcgcggcggctgcacatattgatcataattattcatctcttttggaacaagcgcaaaactctggggtcgaagttatctgttaccaggccaacatgacgggaaaagggatggttttaggcgataagttaacttttttactgaaatga

SEQ ID NO: 51470 - protein, 235 aa, Photorhabdus luminescens subsp
MEFHPPLQSATLIRRYKRFLADVITPEGETLTIHCANTGAMTGCATPGDTVWYSTSDNPKRKYPNSWELTETPAGHWICVNTLRANDLVAEAIAQNAIPEFSEYKKISREVKYGEENSRIDLLLQAEQQVNCYIEVKSVTLLQENCGYFPDAVTTRGQKHLRELQHIAEQGQRAVLFFAVLHSGINQVAAAAHIDHNYSSLLEQAQNSGVEVICYQANMTGKGMVLGDKLTFLLK

SEQ ID NO: 51471 - DNA, 705 bp, Photobacterium profundum
  CDS (1)..(705): transl_table=11
atgaagtttgatccccctcttcagtcagctacattaataaagcgctataaacgcttccttactgatattgaattacccgatggcgaaatacgcaccattcattgtgccaatacaggagcgatgactggctgtgctgaacccggaaataccgtttggttctcaacatcagaaaataaaaaacgtaaatatcctaatagctgggagctcgctgaaacagcaaatgggcattggatctgtgttaacacagcacaagctaaccgactggttgtagaggcaattaacgctggtaccatcacagaattacaaggctattcgtcgctaagaaccgaagttaagtatggtagtgaaaacagcaggatagatattctgttagaagataaaaataaacctgtctgctatattgaggtgaaaagcgttacattattagataatggtcaaggttttttccccgatgcggtaacaactcgagggcaaaaacacttaagggaattgatcgaagtcgctcaaaatggtcaaagatcagtactttttttcgctattttgcattcaggtattgaaaatgtgtctgcggcacaccacatagacccggactactatcgtttaattaaacaagcagaacaggctggcgttgaaatcatctgttataaagcaacattaaaccaagatgaaatcaaattaaaccactgtatgaatttcaaccaataa

SEQ ID NO: 51472 - protein, 234 aa, Photobacterium profundum
MKFDPPLQSATLIKRYKRFLTDIELPDGEIRTIHCANTGAMTGCAEPGNTVWFSTSENKKRKYPNSWELAETANGHWICVNTAQANRLVVEAINAGTITELQGYSSLRTEVKYGSENSRIDILLEDKNKPVCYIEVKSVTLLDNGQGFFPDAVTTRGQKHLRELIEVAQNGQRSVLFFAILHSGIENVSAAHHIDPDYYRLIKQAEQAGVEIICYKATLNQDEIKLNHCMNFNQ

SEQ ID NO: 51473 - DNA, 681 bp, Picrophilus torridus
  CDS (1)..(681): transl_table=11
atgtcgccatttataaaacgcgggcatggattcatggttttaagttttgaaaatctaattgacgctgtaattgtatcaagaataaaccgcttcgttgtaaaatgcatggtaaacaatgaggaggtctatgcgcatttgcatgatccgggaaggcttaatgaaataatatatccaggaaataaaataaaattaagaaaaactgatggtaaaaaatataattattctgttacctttggccatgacggatttaattacacattaaatgatgcaaggtttcattcaatgatagcatcacagtttttaagactgggcttcaaaaaggagtataaatacatggattccagaatagattttcttcttgatgaatatctaatagaggtaaaatcctgcacccttgtaaattctaaaaaggccatgtttcctgatgctgtaacaaggaggggaacacatcatttaaatgtgctattaaattcgatacaagatggttatagaccatacattatgtttttgatattcaacgagcgtgcggaatgctttacaccaaataaatgcagggatcctgaattttccgggacattttacagggcagttaaaaacggtgtttcatcgaaattcctggttttttatataagggaaaattctatatattttgataaggaaatatcaatgtgcgttgattaa

SEQ ID NO: 51474 - protein, 226 aa, Picrophilus torridus
MSPFIKRGHGFMVLSFENLIDAVIVSRINRFVVKCMVNNEEVYAHLHDPGRLNEIIYPGNKIKLRKTDGKKYNYSVTFGHDGFNYTLNDARFHSMIASQFLRLGFKKEYKYMDSRIDFLLDEYLIEVKSCTLVNSKKAMFPDAVTRRGTHHLNVLLNSIQDGYRPYIMFLIFNERAECFTPNKCRDPEFSGTFYRAVKNGVSSKFLVFYIRENSIYFDKEISMCVD

SEQ ID NO: 51475 - DNA, 756 bp, Prochlorococcus marinus
  CDS (1)..(756): transl_table=11
atgatcggcaaaaccattaccaacttttctccgcttacggaaggcatattactgaaaagatataaacgttttcttgcagatgtggagcttgacactggggaagtagtaactgcacattgtgcgaatacaggacccatgaaaggtgtattacatgttggcggacgtgtcagattaagacactctccttcaccttctaggaagttaagttggtcttgggaacaagctcaggttccttctggtcaatctttttcttgggttggagttaatactgctttacctaataagttggttaggcttgcaattgaggcaggttgcttaaagcaagagttaggtgagatttttgaaattaaaaatgaagtgacgtatggggttgcaaggaaaagtcgaattgatttgctattaactcctcatttcaacaattcagattctcgtaagatttttgtagaaattaaaaatacaacttgggctaaagggtctacagctgttttccctgacacagttacaacaagaggacaaaagcatttgcaagaaatgattaatgaagtgccttcttcacgagcggtcttggttccttgcattagcagaaatgatattgaagtatttgttcctggtgattcagctgatgctaagtatggcgatctttttagattggctctgaatgcaggagtagaagtaataccttgcgcttttgattttcatttggattgcatcacttgggaaggcactaaaccattccttaaaggagaaaatttttga

SEQ ID NO: 51476 - protein, 251 aa, Prochlorococcus marinus
MIGKTITNFSPLTEGILLKRYKRFLADVELDTGEVVTAHCANTGPMKGVLHVGGRVRLRHSPSPSRKLSWSWEQAQVPSGQSFSWVGVNTALPNKLVRLAIEAGCLKQELGEIFEIKNEVTYGVARKSRIDLLLTPHFNNSDSRKIFVEIKNTTWAKGSTAVFPDTVTTRGQKHLQEMINEVPSSRAVLVPCISRNDIEVFVPGDSADAKYGDLFRLALNAGVEVIPCAFDFHLDCITWEGTKPFLKGENF

SEQ ID NO: 51477 - DNA, 747 bp, Prochlorococcus marinus subsp
  CDS (1)..(747): transl_table=11
atgaatgatcgaataattgaatttgaaccattaattgaaggtattttaattaaaagatataaaagatttctcgctgatattcagattgaaaatggagaaatagttactgcccattgtgctaatacaggcccgatgaagggtcttttaaacgaaggagctaacgtaagaattagcttctcttcatcaactaaaagaaagctaccttggacttgggaacaagtaaaagtaataggaagagataacaaagaggtatgggttgggataaatacattatttgcaaataaactgattagaaaagttattgaacaaaacctattcaaagataaactcggggagatagctaaaatcaagtctgaagtaccttatggcaaagataaaaaaagtagaattgattttcttttaactccaaaatcttcaaatcctgataatcgtaacatttatgttgaggttaaaaatactacttggacaaaaaataatgtagctcttttccctgatacggagactaaaagaggacaaaaacatttaatagaattaaaaggcttaattcctgaaagtaaaagtgttttagttccttgcattacaagaaaagatatagattattttgcccctggagatgaatcagatccattgtatggagagctttttcgagaatcaattagtgcaggtatgttactaattccatgctgttttgagtttcattcagatcatgtagcttggaaaggatttaaacccttaaaattaaattaa

SEQ ID NO: 51478 - protein, 248 aa, Prochlorococcus marinus subsp
MNDRIIEFEPLIEGILIKRYKRFLADIQIENGEIVTAHCANTGPMKGLLNEGANVRISFSSSTKRKLPWTWEQVKVIGRDNKEVWVGINTLFANKLIRKVIEQNLFKDKLGEIAKIKSEVPYGKDKKSRIDFLLTPKSSNPDNRNIYVEVKNTTWTKNNVALFPDTETKRGQKHLIELKGLIPESKSVLVPCITRKDIDYFAPGDESDPLYGELFRESISAGMLLIPCCFEFHSDHVAWKGFKPLKLN

SEQ ID NO: 51479 - DNA, 708 bp, Pseudomonas aeruginosa
  CDS (1)..(708): transl_table=11
atgcgtttcgagcagccactggaagaaggccgcctgctgcgtcgctacaagcgtttcctcgccgatatcgagagcgccggcggcgagcgcctgactatccactgtccgaataccggttcgatgctcaattgcatgagcgaaggttgccgggtctggttcagccgctccaacgaccccaagcgcaagctgccggggacctgggagctgagcgagactccgcagggccgcctggcctgcgtcaacacggcgcgggccaaccgcctggtagaggaggcgctgctggccggggacatcgcggagcttgccggtttcaccgctctgcgccgggaagtggcctacggcgtagagaacagtcgcgccgactttcgcctggaataccccacgggcgcactgttcatcgaggtgaagagcgtcaccctgggcttcgacgaaaccgccgtggcggcctttcccgacgcggtgacgctgcgcggtgccaagcacctgcgcgaactggcggcgctggcgcgggaggggatccgcgcggtgcagctgtactgcgtgaacctttccggggtcgaggcggtgcgccccgccgacgagatcgatccagcctatggcaaggcgttgcgcgaggcggcgcaagcgggcgtcgaggtgctggcctatggcgccgaggtgacgacggaaggattgaacctggcgcggcgcctcccggtgcgactctga

SEQ ID NO: 51480 - protein, 235 aa, Pseudomonas aeruginosa
MRFEQPLEEGRLLRRYKRFLADIESAGGERLTIHCPNTGSMLNCMSEGCRVWFSRSNDPKRKLPGTWELSETPQGRLACVNTARANRLVEEALLAGDIAELAGFTALRREVAYGVENSRADFRLEYPTGALFIEVKSVTLGFDETAVAAFPDAVTLRGAKHLRELAALAREGIRAVQLYCVNLSGVEAVRPADEIDPAYGKALREAAQAGVEVLAYGAEVTTEGLNLARRLPVRL

SEQ ID NO: 51481 - DNA, 714 bp, Pseudomonas putida
  CDS (1)..(714): transl_table=11
atgcgtttctctccttcactcgagcagggccgcctgttgcgtcgctacaagcgctttctggccgatatcgaactggccagcggcgagcagatgactatccactgcccgaataccggctccatgctcaactgcatgcgtgaaggtgggcaggtgtggttcagccgctccaacgaccccaagcgcaagctgccagggacctgggaaatcagcgaaaccccccaggggcggttggcctgcgtgaataccgggcgggccaatgcgttggtcgaagaggccctgcgcgccggtacaatcactgaactggccggtttcactgcactcaagcgcgaagtggcctatggcgaggaaggcagccgtatcgactttcgcctggaattcgagggtgccccggcctatgtcgaggtcaagagtgtgacgctgggctaccccgacactgcagttgcggccttccctgatgcggtgactcaacgcggtgcgaaacacctgcgtgagctggcaaagctggcccggcagggcgtgcgggccgtgcagctgtattgcgtgaacctgaccggtatcgacgctgtgcgcccggctgaagaaatcgatacggcctacgcccaggcgctgcgcgctgccgtagcggacggggtggaggtgctggcctatggcactcggctggacgccgagggtatcgtcatcgatcgccgcttgccggtgctgctgaccccttga

SEQ ID NO: 51482 - protein, 237 aa, Pseudomonas putida
MRFSPSLEQGRLLRRYKRFLADIELASGEQMTIHCPNTGSMLNCMREGGQVWFSRSNDPKRKLPGTWEISETPQGRLACVNTGRANALVEEALRAGTITELAGFTALKREVAYGEEGSRIDFRLEFEGAPAYVEVKSVTLGYPDTAVAAFPDAVTQRGAKHLRELAKLARQGVRAVQLYCVNLTGIDAVRPAEEIDTAYAQALRAAVADGVEVLAYGTRLDAEGIVIDRRLPVLLTP

SEQ ID NO: 51483 - DNA, 714 bp, Pseudomonas syringae pv
  CDS (1)..(714): transl_table=11
atgcgtttttccccagagctcgaacagggtcgcctgctggtgcgctacaagcgctttctggctgatatcgaaaccgacagcggtgagttgctgaccattcactgccccaacaccggctcgatgctcaactgcatgatgcccggtgggcgggtatggttcagtcgctccaatgaccccaagcgcaagctgccgggcacttgggaaatcagcgagacgccgcaaggccgcttggcctgtatcaataccggacgggccaatacgctggtcgaagaagcattgcgcgccggggtgatccgcgaacttgaggggtttacagcgctcaagcgtgaggtggcctacgggcaggaaaaaagccgtgtggactttcgtctggaatacccggacggctacctgtacctggaggtaaaaagtgtgaccctgggtttcgccgactctgcggtggcagcgtttcccgacgcggtcacccagcgtggggcgcggcaccttcgcgaactggccacgctggcccgtgaaggcgtgcgagcggtgttgctgtactgcgtcaatctcacgggcatagaggctgtgcgcccggccaaagagatcgacccggcgtacgccgctgcactacgcgaagcggtcgatgccggcgtgcagatcctcgcgtatggggtgcagttgacgccagaagcggtatatatcgaccggcatctcgaggtgcactggccggattga

SEQ ID NO: 51484 - protein, 237 aa, Pseudomonas syringae pv
MRFSPELEQGRLLVRYKRFLADIETDSGELLTIHCPNTGSMLNCMMPGGRVWFSRSNDPKRKLPGTWEISETPQGRLACINTGRANTLVEEALRAGVIRELEGFTALKREVAYGQEKSRVDFRLEYPDGYLYLEVKSVTLGFADSAVAAFPDAVTQRGARHLRELATLAREGVRAVLLYCVNLTGIEAVRPAKEIDPAYAAALREAVDAGVQILAYGVQLTPEAVYIDRHLEVHWPD

SEQ ID NO: 51485 - DNA, 720 bp, Pyrobaculum aerophilum
  CDS (1)..(720): transl_table=11
gtgggaattcccggaggagagatcttacaacttccgacgcctgatgtggagggggtgtttttaaagcgacttaatagatttgccggcgtggcgctgataggggggagggagtcgtatgtacacattcacgatccagggcggctgagggagttgttgttccccggggctaagatatgggctaggagaaccgtcagggggaggaccgagtattacctcgccgccgtggagctagacgacgaattggtcttagttgactcgtcgttgcacaataaaatagctgtgtggcttatagaaaacggctatttgttgaggggctattcgcttgagaagagagagcctgcttttggcagaggccgttttgacctattactgaagtccccggaggggaggcgggcgcttgtagagatcaagggcgtgactttagaagtaggcggcagggcgcttttccctgacgccccaacctcacggggggcccgccacatggaggaactggccagggccgtggccgagggttacgaggctcacgtaatcttcctagtgttgaggaagagggcggagtcgatgtcgccccactgggagatggaccggaaatttgccgagagcctcctccgggctcataaggctggcgttaaaattcacgctgttaagttggagatgtttaaatgggggttgcggttttcaagcgagttgccggtggacttatctcctagagatttctaa

SEQ ID NO: 51486 - protein, 239 aa, Pyrobaculum aerophilum
MGIPGGEILQLPTPDVEGVFLKRLNRFAGVALIGGRESYVHIHDPGRLRELLFPGAKIWARRTVRGRTEYYLAAVELDDELVLVDSSLHNKIAVWLIENGYLLRGYSLEKREPAFGRGRFDLLLKSPEGRRALVEIKGVTLEVGGRALFPDAPTSRGARHMEELARAVAEGYEAHVIFLVLRKRAESMSPHWEMDRKFAESLLRAHKAGVKIHAVKLEMFKWGLRFSSELPVDLSPRDF

SEQ ID NO: 51487 - DNA, 693 bp, Pyrococcus furiosus
  CDS (1)..(693): transl_table=11
atgaaacttatggaagtttctcccctttttccttgtatatttttaagaagagttaaccgatttgtgggattggtgagaattaaggaaagaattgaaagagctcttatcacaaatactggtagactaaatgagttcatgatcccagggagaataggctattgtactccaaaagcgggcggtaaaacaaggtacattcttcttggatttgaagatcatggaaagatagcaatcattgatactagacttcagggaaaagcatttgagaaaataattgagaaggaacttcttcctgaactggaaggttgtagaataataaagagagagccaagggttggagaatccagactagactatttgcttgaatgttcgaaaggagagatattcgtagaaactaagagtgcagttttgagggaaggggaatatgctatgtatccagattgtccatcagttagaggtcaaaggcatataaaagagctaataaagttggcgagagatggaaaaagggccatgattgtgtttataggggccctaccaaatgtaagcaaatttaaaccctacaagaagggagatccgaaaattgctgaattgttaaaggaagctcttgaggctggagtagaaattcgggcgttgggacttcacatggagcttagtggagaaataatatacagaggagagttaggagtagaaatctaa

SEQ ID NO: 51488 - protein, 230 aa, Pyrococcus furiosus
MKLMEVSPLFPCIFLRRVNRFVGLVRIKERIERALITNTGRLNEFMIPGRIGYCTPKAGGKTRYILLGFEDHGKIAIIDTRLQGKAFEKIIEKELLPELEGCRIIKREPRVGESRLDYLLECSKGEIFVETKSAVLREGEYAMYPDCPSVRGQRHIKELIKLARDGKRAMIVFIGALPNVSKFKPYKKGDPKIAELLKEALEAGVEIRALGLHMELSGEIIYRGELGVEI

SEQ ID NO: 51489 - DNA, 720 bp, Rhizobium meliloti
  CDS (1)..(720): transl_table=11
ttgaatttccctcgcccgctcgtacctgcgacgcttgtgcagcgttacaagcgcttcctgttcgacgctattctggccgatggaacggcaatcaccggttcatgcccgaataccggctcgatgcgtggcctgaccataccgggctcgccgatctggctctcggaacacgacagcccaacacgcaagtatcgccacatgctggagatcgtcgaggcggacggcacgctggtcggcatcaacaccggattgccgaaccggatcgccgaagaggcgatcatggccggacaggtgggcaatctccacacctacggcacgctccggcgcgagcagagatacggccgcaattcgaggatcgacattctgctcagcgatgcggaaaagggcctcgcctatgtcgaggtgaagaacgtccatttcagccgcgtccgcggtctcgccgaattcccggacagcccgacacaacgcggcgcgaaacatctagaggaactgggcgatatggtcgaggcgggacaccgcgcgatcatgctctatcttatccagagaggcgattgcagtcgcttccgcatatgccgtgagctcgacccggtttatgctcgtgctttcgaaagggcgagcgcccgcggggtcgaggcctatgcggtcaagtgcgcggtatcgccggggcaaatcgtggcggcaggaccgatcgtagtggacgaaccggtccctgctgttttatga

SEQ ID NO: 51490 - protein, 239 aa, Rhizobium meliloti
MNFPRPLVPATLVQRYKRFLFDAILADGTAITGSCPNTGSMRGLTIPGSPIWLSEHDSPTRKYRHMLEIVEADGTLVGINTGLPNRIAEEAIMAGQVGNLHTYGTLRREQRYGRNSRIDILLSDAEKGLAYVEVKNVHFSRVRGLAEFPDSPTQRGAKHLEELGDMVEAGHRAIMLYLIQRGDCSRFRICRELDPVYARAFERASARGVEAYAVKCAVSPGQIVAAGPIVVDEPVPAVL

SEQ ID NO: 51491 - DNA, 705 bp, Salmonella paratyphi
  CDS (1)..(705): transl_table=11
atgctattctcaccccctttacaacgcgctacgttgattcagcgctataaacgttttttagctgatgtcatcacccctgacggtacgacgcttacgctgcactgtcctaatactggcgcgatgaccggctgcgccacgcctggcgataccgtctggtattcgacatcagaaaatactaaacgcaaatatccgcatacctgggaattgactgaaacgcaattcggcgcattcatttgcgtgaatacgctgcgggcgaaccagctaacgaaagaagcaattcaggagaatcgcctgccggcgctggcggggtacaatattctgaaaagtgaagtcaaatatggcgccgaacgcagccgtatagattttatgttacaggcagatttccgcccggactgctatattgaagtgaaatcggtcacgttagcggaaaaagaaaacggttattttcccgacgccatcaccgaacgagggcaaaaacatcttcgggagttgatgggcgttgcggcggcaggtcatcgcgcggtggtggtgttcgcggtgctgcactccgccattacacgtttttcccccgcacgtcatatcgatataaaatacgcgcagctattgagcgaggctcagaataaaggcgtggaagttttagcttataaagcagaactttcagcccaaaaaatggaactgaacgaaccagtacccataacgttgtag

SEQ ID NO: 51492 - protein, 234 aa, Salmonella paratyphi
MLFSPPLQRATLIQRYKRFLADVITPDGTTLTLHCPNTGAMTGCATPGDTVWYSTSENTKRKYPHTWELTETQFGAFICVNTLRANQLTKEAIQENRLPALAGYNILKSEVKYGAERSRIDFMLQADFRPDCYIEVKSVTLAEKENGYFPDAITERGQKHLRELMGVAAAGHRAVVVFAVLHSAITRFSPARHIDIKYAQLLSEAQNKGVEVLAYKAELSAQKMELNEPVPITL

SEQ ID NO: 51493 - DNA, 705 bp, Salmonella typhimurium
  CDS (1)..(705): transl_table=11
atgctattttcaccccctttacaacgcgctacgctgattcagcgctataaacgttttttagccgatgtgatcacccctgacggtacgacgcttacgctgcactgtcctaataccggcgcgatgaccggctgcgccacgcctggcgataccgtctggtattcgacatcagaaaatactaaacgcaaatatccgcatacctgggaattgactgaaacgcaatccggcgcattcatttgcgtgaatacgctgcgggcgaaccagctaacgaaagaagcgattcaggagaatcgcctgccggcgctggcggggtacaatattctgaaaagtgaagtcaaatatggcgccgagcgcagccgtatagattttatgttacaggcagatttccgcccggactgctatattgaagtgaaatcggtcacgttagcggaaaaagaaaacggttattttcccgacgccatcaccgaacgagggcaaaaacatcttcgggaattgatgggcgttgcggcggcaggtcatcgcgcagtggtggtgttcgcggtgctgcactccgccattacacgtttttcccccgcacgtcatatcgatataaaatacgcgcagctattgagcgaggctcagaataaaggcgtggaagttttagcttataaagcagaactttcagcccaaaaaatggaactgaacgaaccagtacccataacgttgtag

SEQ ID NO: 51494 - protein, 234 aa, Salmonella typhimurium
MLFSPPLQRATLIQRYKRFLADVITPDGTTLTLHCPNTGAMTGCATPGDTVWYSTSENTKRKYPHTWELTETQSGAFICVNTLRANQLTKEAIQENRLPALAGYNILKSEVKYGAERSRIDFMLQADFRPDCYIEVKSVTLAEKENGYFPDAITERGQKHLRELMGVAAAGHRAVVVFAVLHSAITRFSPARHIDIKYAQLLSEAQNKGVEVLAYKAELSAQKMELNEPVPITL

SEQ ID NO: 51495 - DNA, 705 bp, Shewanella oneidensis
  CDS (1)..(705): transl_table=11
atgcactttactccagcactgaaaccgggaaaattactcaaacgttacaagcgttttctcgccgatgttcaactcgaagacggcagtgaaatcaccgtccactgtccgaatacaggctcaatgcgtaactgcctgttcccgggtgaaaccctgtggttctcaacgtccagcaatactaaacgtaagtatgcccacacgtgggaattaatgacgaccccaacaggtgcgctgattggcattcactcaggcaatgccaacgccctggtcgaggaagcgcttaataaaggcatcatcaccgaactgacaggctacgacagtttacgccgcgaagtgaagtatggagatgaaaatagccgtattgatatcttgctagagtgcgctcaaaaaaccgcctgctatatagaagtcaaaagttgtactttgcaggaaaatggccaaggttatttccccgatgcagtgagtcttcgcggccaaaaacacctgcgagaattaatgcatatggctagccttgggcatagagcggtattgttatttgtggtgcaacatactgacattatgagtgtggctcccgcagcacacatcgaccctgaatacgctaacttattgaaaaaatctgttttatcaggagtagaagtactagcgtatcgctgtgaaatatcccctagtgagatacatctagcccaatcgtgtccagtccgagtatga

SEQ ID NO: 51496 - protein, 234 aa, Shewanella oneidensis
MHFTPALKPGKLLKRYKRFLADVQLEDGSEITVHCPNTGSMRNCLFPGETLWFSTSSNTKRKYAHTWELMTTPTGALIGIHSGNANALVEEALNKGIITELTGYDSLRREVKYGDENSRIDILLECAQKTACYIEVKSCTLQENGQGYFPDAVSLRGQKHLRELMHMASLGHRAVLLFVVQHTDIMSVAPAAHIDPEYANLLKKSVLSGVEVLAYRCEISPSEIHLAQSCPVRV

SEQ ID NO: 51497 - DNA, 693 bp, Silicibacter pomeroyi
  CDS (1)..(693): transl_table=11
atgcgctttcaaacaactcttgtccccgcccgcctgatccgtcgctacaaacgctttctggccgattgccagttggaagacgggcgcgaggtgaccgcccattgcgccaatcccggctcgatgatggggctggcggaccccggaacgaaaatctggctggaacccaatgacgatccgaagaagaagctgaagttcggctggcggttggtcgatcacgagaacggccatttcaccggtgtcgatacctcggtcccgaaccgggccttgaagaccgcgctcgagcgccgcgccattccgtcgctggccgcctatgaaacggtgcggcccgaggtgaaatacggccagaacagccgcatcgactttctgctgagcgggcccggcctggcggacgcctatgtcgaggtcaaaagcgtgacactgtgccgtgagcccggcctggccgagtttcccgacagcgtgaccgcgcgcggcgccaagcatctggcagagctggctgcgatggccgggctggggcatcgggcgatcatgctttatctggtacagcggaccgattgcgacagattcaccctggccgcggatatcgacccggcctatgcgcgcgcctttgaaacggcccgcgcgcagggtgtggaaaagctgatcctgaccacccatatctctcctcaaggagtcgaaatcgccgatatgctttga

SEQ ID NO: 51498 - protein, 230 aa, Silicibacter pomeroyi
MRFQTTLVPARLIRRYKRFLADCQLEDGREVTAHCANPGSMMGLADPGTKIWLEPNDDPKKKLKFGWRLVDHENGHFTGVDTSVPNRALKTALERRAIPSLAAYETVRPEVKYGQNSRIDFLLSGPGLADAYVEVKSVTLCREPGLAEFPDSVTARGAKHLAELAAMAGLGHRAIMLYLVQRTDCDRFTLAADIDPAYARAFETARAQGVEKLILTTHISPQGVEIADML

SEQ ID NO: 51499 - DNA, 723 bp, Sulfolobus solfataricus
  CDS (1)..(723): transl_table=11
atgaatgaaagcaactcccaagatctaactagagtctcgcccttttatattaaagaggggtttagcgtatacgagtttactgaaaaattatttgaggcatatgttatagaacgaataaatagattcttagttaaagtaacccttgacggggaagaaatccttgtacatttacacgatcctggcagattaaaagaattaatttaccctggaaacttagttctaataagggaaacaaaaggtaataagacaaaattttcaataactgcagcttacgctaactcaagatttatagtattagatagtagattacataacattatagcctctaaatttataccaaaaatctacgaaaaggaggttaaggtaggaaatagtagaattgacttcaagtatgataatacatacttggaagtaaaaggctgtacattggtggaaaacgagatagcttatttcccagacgctccaaccgaaagaggcagaaagcacctaaaagagttgagagaattaatgagaaagggatttaacgcaatactattgattctagtaatgaggaacgacgctaaatgcttcttacctaatgagaaaaccgatcccaaattttctgttgagttttgggattcaataaaggaaggattaaaagtctacataaagacttttagcttaatcggaaataagatagtctatgtcggagatattccactatgcaaaacaaatttaacttaa

SEQ ID NO: 51500 - protein, 240 aa, Sulfolobus solfataricus
MNESNSQDLTRVSPFYIKEGFSVYEFTEKLFEAYVIERINRFLVKVTLDGEEILVHLHDPGRLKELIYPGNLVLIRETKGNKTKFSITAAYANSRFIVLDSRLHNIIASKFIPKIYEKEVKVGNSRIDFKYDNTYLEVKGCTLVENEIAYFPDAPTERGRKHLKELRELMRKGFNAILLILVMRNDAKCFLPNEKTDPKFSVEFWDSIKEGLKVYIKTFSLIGNKIVYVGDIPLCKTNLT

SEQ ID NO: 51501 - DNA, 678 bp, Sulfolobus tokodaii
  CDS (1)..(678): transl_table=11
atgattgtttatagttttcccacactatatgaggagattgtgaaagctaggattaaccgttttacagtagtaacagagagtgagaaaatttgtcaccttcacgatcctggaagacttaaggagcttatttatcctggtaacaaaatattaataagaaacgttaacggaaaaagaaaaaccaattgtcaagttacagcagcatggagcggtaaagaatgggttgtaacagattccagtatacataacgaaatagctagaaggtttttacccagtgatgccaaatctgaagtaacggtagggaaaagtaggattgactttgcatttgataatacatatgttgaggttaagggctgtactcttgctagagatggtatagctcttttccctgatgctccgactaagagaggaaaaagacatctagatgagttgatagagcttaggagaaatggatattcagttttactcatgattctcgtttttagaactgatgttgtgtgcttttctcctaattttgatacagaccgagatttttctaatacatttattaaagcattaaaagagggcgtaaatgttgaagttaaagtgtttcaattagataaagaaaatatagtatataagggagaaattcctgtttgtcaccaaattcttgaaaaatcaactaatttctccttaccctaa

SEQ ID NO: 51502 - protein, 225 aa, Sulfolobus tokodaii
MIVYSFPTLYEEIVKARINRFTVVTESEKICHLHDPGRLKELIYPGNKILIRNVNGKRKTNCQVTAAWSGKEWVVTDSSIHNEIARRFLPSDAKSEVTVGKSRIDFAFDNTYVEVKGCTLARDGIALFPDAPTKRGKRHLDELIELRRNGYSVLLMILVFRTDVVCFSPNFDTDRDFSNTFIKALKEGVNVEVKVFQLDKENIVYKGEIPVCHQILEKSTNFSLP

SEQ ID NO: 51503 - DNA, 756 bp, Symbiobacterium thermophilum
  CDS (1)..(756): transl_table=11
gtgaaaggagcagaaccgttggctgaacttcgtctgcgggccacctttctcgaacgccccaaccgcttcgtcgcccgggtccgcctggaggacggccgggaggtgccggtgcacgtggcctcatcgggccgtatgaaggagcttctggtgcccggtgcgccggtgatcgtgacgctgcaaggcgacgcgtctgcgcagccaacccggccgttcgggggccggaagaccgccggcaggctgctcatggtccgtaccgggtccacctgggtctcggtggatacatccttgcccgggaagctcttccaccaggcggtggtcgcggggagctgcgctcccttcgccgggtacaccgaggtacgtcccgagtaccggtacggcggcagccgcatcgatttcctgctgaccgcgccggacctgcccccgtgcctggtggaggtgaagtccgtcacctccgtgctgccggacgcggacggcgcccgcgtggcgcggttcccggacgcgccgacggcccgcggcgcccgccacctggacgaactggccggggccgtgcgggaagggtacagggcggccgtctgcttcatcacgcagcgggacgacgcccaggccttcggcccgtgggacgagatcgatccgttcttcggtgaaaccctgcgcaaagtggctcgggccggggtggagatccgggccttcgtcacgcacgtgaccccggagggcgccgtcctgggcggggagcttcccgtacggctggcgcggtga

SEQ ID NO: 51504 - protein, 251 aa, Symbiobacterium thermophilum
MKGAEPLAELRLRATFLERPNRFVARVRLEDGREVPVHVASSGRMKELLVPGAPVIVTLQGDASAQPTRPFGGRKTAGRLLMVRTGSTWVSVDTSLPGKLFHQAVVAGSCAPFAGYTEVRPEYRYGGSRIDFLLTAPDLPPCLVEVKSVTSVLPDADGARVARFPDAPTARGARHLDELAGAVREGYRAAVCFITQRDDAQAFGPWDEIDPFFGETLRKVARAGVEIRAFVTHVTPEGAVLGGELPVRLAR

SEQ ID NO: 51505 - DNA, 726 bp, Synechococcus elongatus
  CDS (1)..(726): transl_table=11
gtgactcccccattctgttggtactatccaccgctccaagaaggaattctctgtcggcgctatcagcgattttttgctgagattgagttgacctcgggcgatcgcgttacggcccactgcccaaatacagggccaatgacagggatttgccaagtaggtgctcccgttcaagtctcctaccatgcggatcccaagcgtaagctagcctatacgtgggaaatgatttttgttgacggtacctgggtaggggtgaataccagtctgcccaatcgggtcattgcttcggcgttggcggcaggcatcctaccggaactggctggctacggcactcagcagcgagaggtggcctacggtcaagagcgcagccgcattgacttttacttaacggatcatcctcaagagccccccgcctatgttgaggtgaaaaataccacttgggcgcaagggggtttagccctgtttcctgatacggtcaccagccgcggtcaaaaacatctgcgggaactgcaacggctgcggcaaacccaaccagaaactcgggtgtgtatgctctactttattaatcgcggcgattgcgatcgctttgcgcccggagatagtgctgatcccacctatggacagctcctacgcgctgcctacaaccaaggggtggaaattttgccctaccgcttcgccattgaaccaaggggcattcagttcttgggaactgccaagctgttgctctag

SEQ ID NO: 51506 - protein, 241 aa, Synechococcus elongatus
MTPPFCWYYPPLQEGILCRRYQRFFAEIELTSGDRVTAHCPNTGPMTGICQVGAPVQVSYHADPKRKLAYTWEMIFVDGTWVGVNTSLPNRVIASALAAGILPELAGYGTQQREVAYGQERSRIDFYLTDHPQEPPAYVEVKNTTWAQGGLALFPDTVTSRGQKHLRELQRLRQTQPETRVCMLYFINRGDCDRFAPGDSADPTYGQLLRAAYNQGVEILPYRFAIEPRGIQFLGTAKLLL

SEQ ID NO: 51507 - DNA, 711 bp, Synechococcus sp
  CDS (1)..(711): transl_table=11
atgcctcagcggctctatacctatccccctctgttgcgggggcgcttgctccagcgctacaaacgcttttttgctgatattgaactcgacagtggcgagacgatcacggctcactgcccgaacacggggccaatgacgggcgtttgtcagatgggcaatctggtttatgtctctaaatcagacaatcccaaacggaagttggcctacacctgggaactgattgaggtcacggataacgaaccgacttgggtgggtgtcaatacggggctaccgaatcgggtggttcaagccctgctcgagcagcgttgcttgccggtgttgggcgactatggcgaggtgcagcgcgaggtcccgtatggcgagaacagtcggattgatttccgattaacgggcgatcgccccatctatgtcgaggtgaaaaatacgacttggacggctggtcgcctcgcgcttttcccagataccgtcacgactcgcggccagaagcacttgcgggagctgacagcgattttgctggaagcgcgagcggtcatgctctacttcatcaatcggggcgattgcactgctttcgcgccgggagatagcgccgacccaacctatgggcagctgttgcggactggcattgctgccggtcttgaagtctatccctgccaatttcagatcagtcctgaaggcattgattttttaggcgttgcccctttgcaactctaa

SEQ ID NO: 51508 - protein, 236 aa, Synechococcus sp
MPQRLYTYPPLLRGRLLQRYKRFFADIELDSGETITAHCPNTGPMTGVCQMGNLVYVSKSDNPKRKLAYTWELIEVTDNEPTWVGVNTGLPNRVVQALLEQRCLPVLGDYGEVQREVPYGENSRIDFRLTGDRPIYVEVKNTTWTAGRLALFPDTVTTRGQKHLRELTAILLEARAVMLYFINRGDCTAFAPGDSADPTYGQLLRTGIAAGLEVYPCQFQISPEGIDFLGVAPLQL

SEQ ID NO: 51509 - DNA, 765 bp, Synechococcus sp
  CDS (1)..(765): transl_table=11
atgaccggctgcacgacccccggcgatgccctgcttagctttgaaccgcttgaagaaggcgttctgatcaagcgctacaagcgttttctggcggatgtagaactcagcagcggagaggtgatcaccgcccactgcgccaacaccggcccgatgactggggtgttaatcccaggccagcgggttcgactgcgccatgccccctcacccaagcgcaagctggcttggacctgggagcaagccgaggtgccaggggcggacggtgccccctgctgggtgggcatcaacacggcgctgcccaaccgcttgataagggccacgatcgaagccggctgcttggccgctcagctggggcccatcgccagcatccgcgccgaagtggcctacggagccaacaaacgcagccggattgatctgctgctcacgccgaccgactccaatcctgatcagcggccgatctatctcgaggtgaaaaacaccacctggaccgatggcaccacagccctgttcccagacacggtgactgaacgtggccagaagcacctggtggagctgatgggtgttcttccagattccagagcggtgttggttccctgtctgagtcgtccggatgtgacggagttcgcgccaggggacagcgcggatccgcgctatggagaactgttccgcgaggcgatcaaagccggcgtggaggtgctgccctgccgcttccgcttccaggcagatggaattcgctgggaagggatcagacccttgaaacaactttga

SEQ ID NO: 51510 - protein, 254 aa, Synechococcus sp
MTGCTTPGDALLSFEPLEEGVLIKRYKRFLADVELSSGEVITAHCANTGPMTGVLIPGQRVRLRHAPSPKRKLAWTWEQAEVPGADGAPCWVGINTALPNRLIRATIEAGCLAAQLGPIASIRAEVAYGANKRSRIDLLLTPTDSNPDQRPIYLEVKNTTWTDGTTALFPDTVTERGQKHLVELMGVLPDSRAVLVPCLSRPDVTEFAPGDSADPRYGELFREAIKAGVEVLPCRFRFQADGIRWEGIRPLKQL

SEQ ID NO: 51511 - DNA, 714 bp, Synechocystis sp
  CDS (1)..(714): transl_table=11
atggactttctctatccctatccgcctctaattagtggcattttggtaaaacgctacaaacgctttttagctgatgtggagttagataatggtgagatagtcacagctcattgtcctaacactggccccatgacaggggtgtgccaagttggggcgcaggtctacctgtctaagagtgataatccccagcgtaaattagcctatacctgggaaatgatccaaattgatggtacgtgggttggggtaaacactgccttgcccaatcgggtcatcaagcaggctttggctgataggatttttcctaacttaacgaacagctacgatacttttaagcccgaagttccctatggtaaagataaaaaaagtcgtattgactttttgctcactaagccagaagaaaagtcaatttatgtagaagtaaaaaatactaccttgtcccaagaaaaattggctttatttcccgatacggaaaccaccagagggcaaaaacatctccaggagttaatagatattctccctacagcccgggcagtgatgctttacttcatcaatcggggtgattgtacccatttttcccccggagatgcctacgatcgccgttatggagaactattccgtcaggcgatcgccgctggggtggaggtaatgccctgtcgatttatggttaatccggagggggttaaattccttggcatggcagagttagtggtttga

SEQ ID NO: 51512 - protein, 237 aa, Synechocystis sp
MDFLYPYPPLISGILVKRYKRFLADVELDNGEIVTAHCPNTGPMTGVCQVGAQVYLSKSDNPQRKLAYTWEMIQIDGTWVGVNTALPNRVIKQALADRIFPNLTNSYDTFKPEVPYGKDKKSRIDFLLTKPEEKSIYVEVKNTTLSQEKLALFPDTETTRGQKHLQELIDILPTARAVMLYFINRGDCTHFSPGDAYDRRYGELFRQAIAAGVEVMPCRFMVNPEGVKFLGMAELVV

SEQ ID NO: 51513 - DNA, 669 bp, Thermoplasma acidophilum
  CDS (1)..(669)
atgcggtttgagggtctgataggagcgagaattttgaagaggatcaacaggttcgccgtacagatcgatgtggaaggcaggacggaactggcgcatctgcacgatcctggcaggcttctggagatcgtttatcccggaaatgaggtccttgtgaggaggacggatggcccaaagctgaaatggaggattgagttcgggaagatcaacggaagatacgtgttaatagattccgggctgcactcggatatagccagaaggttccttcccgagggcgcggttccagaggtcagggttggaaggaaacgaatagatttcaggtacggggacgattacatagaggtcaaggggtgcaccctcatggcgaacggaatcgccatgtttccagacgctcctacgaagaggggcctggaacacctgaagacgctcgaaacgctcgcctcatcaggatacagatcgcatgtaatgatgataataaccagggacgacgtgagatgcttctaccccaacttcgaaaccgatcccaagttcgcagaggcgttcctgaggctggtgccggcatacgtgaaggcacacttcctgaccttcggcttcgacggcctttacctgaggtatgccggcagcatcggcctctgcgctgatgtcggtcatggcaccaacggaagattgtga

SEQ ID NO: 51514 - protein, 222 aa, Thermoplasma acidophilum
MRFEGLIGARILKRINRFAVQIDVEGRTELAHLHDPGRLLEIVYPGNEVLVRRTDGPKLKWRIEFGKINGRYVLIDSGLHSDIARRFLPEGAVPEVRVGRKRIDFRYGDDYIEVKGCTLMANGIAMFPDAPTKRGLEHLKTLETLASSGYRSHVMMIITRDDVRCFYPNFETDPKFAEAFLRLVPAYVKAHFLTFGFDGLYLRYAGSIGLCADVGHGTNGRL

SEQ ID NO: 51515 - DNA, 669 bp, Thermotoga maritima
  CDS (1)..(669): transl_table=11
atgagactgatacttccagctgatacggaagggatctttctggaaagaaagagcagatttacgggagttgctcttgtcgaagggaaaaagaccctgatacacatccacaatacagggcgccttccgcttttgaaaaaaggaaaaagagttctcctgaagcgtgcagaatccgatcgaaggaagaccggctgggaccttctggcagtcgaacacagaaatgaattcgtctttgtccattcgggtttccacagtatcgtggccgggaagattctggaagaactgttcccgggctccacgatagaaagcgagaaacgctttgaaaacagcaggttcgatttcctgatcgacaggaggacctttgtggaagtgaagggatgtacgtacgaagaagatggtgtcgcgatgtttccagacgcacccacaggacgcggaagaagacacatcgaggagctgatcaggtctgtgaaaagcggttttaaggctcttttgttgatcctggttttcctcgaaagcgactgttttcttccgaacagaagcgttgacccggctttttcagagattttctggcgcgctctaaacagcggtgttaatatcgacgtgttcagggtaaaatacgatggagagtacctgtgttcaacagagaaactgtcgatctgtgaggaggtgtag

SEQ ID NO: 51516 - protein, 222 aa, Thermotoga maritima
MRLILPADTEGIFLERKSRFTGVALVEGKKTLIHIHNTGRLPLLKKGKRVLLKRAESDRRKTGWDLLAVEHRNEFVFVHSGFHSIVAGKILEELFPGSTIESEKRFENSRFDFLIDRRTFVEVKGCTYEEDGVAMFPDAPTGRGRRHIEELIRSVKSGFKALLLILVFLESDCFLPNRSVDPAFSEIFWRALNSGVNIDVFRVKYDGEYLCSTEKLSICEEV

SEQ ID NO: 51517 - DNA, 690 bp, Thermoanaerobacter tengcongensis
  CDS (1)..(690): transl_table=11
atgattattaaaaatccgataataaaagggaaattcatagaaaggttaaatagatttgaagcctatgttgaaatagatggcattaaaaccctggttcatgtcccaaatacagggcgactgaaagagatcctcgtaaaaggggcagatgtgcttttagaagtgagagaaaaaaaggggagaaaaactccttatgagcttgcctttgcctataaagggaaaaggcttatatcaattgattctcaagtgccaaataaagtgtttctggagagcataaaaaaagggatagttgaagagtttagaggatatgaactggtggaaaaggaaaaaagctttgggaacagtaaatttgacataaaacttacaaatggaaaggaaatttgctacatagaagtgaagggtgttactttggaggtagatggagtagccaagtttcctgatgcgccgacagaaagaggtagaaagcatttaaaggagctcataaaagtcaaagaagaagggatgagagcggcagttgttttcttaattcaaatggatgacatcaaatactttactccaaatgacgaacaggaccctcaatttggacaatttttaagagaagctttcacaaaaggcgtagaagtttatgcctatacctgcgatgtgggagaaaattttattaatttaaaaaacagggtacaggtagtgctgtaa

SEQ ID NO: 51518 - protein, 229 aa, Thermoanaerobacter tengcongensis
MIIKNPIIKGKFIERLNRFEAYVEIDGIKTLVHVPNTGRLKEILVKGADVLLEVREKKGRKTPYELAFAYKGKRLISIDSQVPNKVFLESIKKGIVEEFRGYELVEKEKSFGNSKFDIKLTNGKEICYIEVKGVTLEVDGVAKFPDAPTERGRKHLKELIKVKEEGMRAAVVFLIQMDDIKYFTPNDEQDPQFGQFLREAFTKGVEVYAYTCDVGENFINLKNRVQVVL

SEQ ID NO: 51519 - DNA, 651 bp, Thermoplasma volcanium
  CDS (1)..(651)
atggaatttactgatctgttgccttgtactgttgtagaacgcgtaaacaggtttctcgtaaatgtcaaattaaacgataagatcgtagaggcgcatcttcacgatcctgggaggcttaaagaaataatatatacaggaaataaagtattagttcggagaaaaagcggtaaaaagacaggttataggattacatttggcctaagagaagatcaatatatactcattgattctgggcttcattcacaaatagctagtcacttcgtaagtcaggagtgtaaaccagaagtaaaaatagacgataggaggttggattttgcttgtaatgatatattcatagaggtaaaaggctgcacactttccattgacggagtcgcaatcttcccagatgctccaactctacgaggatacgaacaccttcgtcttttagagagattggcgcaggaagggaagggagcatacgtactttttctaatattcagtgatgctacttcatttaggccgaactcggaaactgatccacgtttttcagatgaattttacaaggctctaaagaatggtgtgaaattttcttttaaaaggttcagcttcgatggtaaatacctcaaatattctggtgatatacttacatttgatggagatgataaaagttga

SEQ ID NO: 51520 - protein, 216 aa, Thermoplasma volcanium
MEFTDLLPCTVVERVNRFLVNVKLNDKIVEAHLHDPGRLKEIIYTGNKVLVRRKSGKKTGYRITFGLREDQYILIDSGLHSQIASHFVSQECKPEVKIDDRRLDFACNDIFIEVKGCTLSIDGVAIFPDAPTLRGYEHLRLLERLAQEGKGAYVLFLIFSDATSFRPNSETDPRFSDEFYKALKNGVKFSFKRFSFDGKYLKYSGDILTFDGDDKS

SEQ ID NO: 51521 - DNA, 735 bp, Vibrio cholerae
  CDS (1)..(735)
atgcacttttccccacctctacaaaaaggaaccttactcaaacgttacaaacgctttttggccgatgtcacgctggaagatggttcggtgatcaccatgcattgtgcgaacacaggcgccatgactggctgcgccgagccgggcagtacggtgtggttttctacatcggataatcccaaacgcaaatacgcccacagttgggaactgacgcagacccaagcaggtcactggatttgcgtgaataccgcgcgagccaacgcattggtggtcgaagcgattttggcaggagagatcccacaactgcggggttatgacgcactcagtacggaggtgaagtacggtcatgaaaatagccgtatcgatatcttgctaaagtcagattctcaaccacactgctttatagaagtaaaaagcgtcactcttttggatgagattcaaggcgataaagggcaaggttactttcctgatgcggtgacaacccgtggtcagaagcatctgcgtgagctggcggaagtcgctaaagatggaagcaggtcgatacttttatttgccgttttgcattcagggattgaaaaagtcgctcccgctctccatatagacgcgaactattcacagttactaaaagcggcacaagaagccggagtggaagtgttgtgctacaaagcgtcactttcaaaacacgagatccgaatggtatctgaggtcaaatttgcccatcaagtgacaaaaaattga

SEQ ID NO: 51522 - protein, 244 aa, Vibrio cholerae
MHFSPPLQKGTLLKRYKRFLADVTLEDGSVITMHCANTGAMTGCAEPGSTVWFSTSDNPKRKYAHSWELTQTQAGHWICVNTARANALVVEAILAGEIPQLRGYDALSTEVKYGHENSRIDILLKSDSQPHCFIEVKSVTLLDEIQGDKGQGYFPDAVTTRGQKHLRELAEVAKDGSRSILLFAVLHSGIEKVAPALHIDANYSQLLKAAQEAGVEVLCYKASLSKHEIRMVSEVKFAHQVTKN

SEQ ID NO: 51523 - DNA, 717 bp, Vibrio parahaemolyticus
  CDS (1)..(717): transl_table=11
atgcaattcaaacccgctttagagtcagccactctacttaaacgctacaaacgcttccttgctgatatcgaatttgataatggtgaggtgcgcaccatccactgtgcgaacaccggtgcgatgacaggttgcgcgacacccggtaataaagtttggttttcaacgtccgacaacccaaaacgcaaataccccaacagctgggagctaagtgaaaccgagcaagggcatcgtatttgtatcaatactgcccgcgccaaccaattagccgttgaggctattgaaaataatgtcatttcagagctttgcggatatgacacacttcaaactgaagtgaaatatggcaatgaaaatagtcgaattgatatcttgctcagcgcaagcgacaagccaaagtgctatatagaagtgaaaagcgtcactcttcttgatgagacaggctcagctggacaaggatacttcccagatgccgtcacgactcgtggtcaaaagcacctgagagagctcacagaaatggcacaaaatggaagtagagccatacttttattcactgttttacattcaggtattgaaaaagtatccgcggcacaccatatagacgcgaaatattcactattactcaaacaagcacaagacgccggagtagaagttctctgctataaagccgaactgagcaatactgaaatgaagctaatttccgctattgattttatcaattaa

SEQ ID NO: 51524 - protein, 238 aa, Vibrio parahaemolyticus
MQFKPALESATLLKRYKRFLADIEFDNGEVRTIHCANTGAMTGCATPGNKVWFSTSDNPKRKYPNSWELSETEQGHRICINTARANQLAVEAIENNVISELCGYDTLQTEVKYGNENSRIDILLSASDKPKCYIEVKSVTLLDETGSAGQGYFPDAVTTRGQKHLRELTEMAQNGSRAILLFTVLHSGIEKVSAAHHIDAKYSLLLKQAQDAGVEVLCYKAELSNTEMKLISAIDFIN

SEQ ID NO: 51525 - DNA, 717 bp, Vibrio vulnificus
  CDS (1)..(717): transl_table=11
atgcatttcgaacccgcgctagattgcgccctattacaaaaacgctataaacgctttctcgccgatgtgacctatcaaagcggcgatacaggcacgattcattgtgccaataccggcgctatgactggttgcgcaacccctggtgataaagtgtggtattccacttccaacaacaccaaacgaaaatacccccacagttgggaaattacagaaacggagcagggtcatcttatctgtgtcaataccattcgcgccaaccaactcgcggtggaagccattgagcaaggctggattaaagagctctcagggtatgagcgacttcaaactgaagtgaaatatggtcatgaaaatagtcgaattgatatcttgctcagcgcaagcgaccgaccagcgtgctatatagaagtaaagagtgtcaccttgctagatgacaccgagcctggacaaggcttctttcctgatgcagtgaccacccgtggacaaaaacacctgcgagagctcacagaaatggcacaaaatggaagtagagccatacttttatttgctgttttacattcaggtattgaaaaagttgctgcggcgctccatatagacgccaaatattcccaattactcaaacaagcacaaaaagccggagttgaagtcctctgctataaagcagagatcagcaatactgaaatcaaactcaattctgctattgcgtttaacaatagctag

SEQ ID NO: 51526 - protein, 238 aa, Vibrio vulnificus
MHFEPALDCALLQKRYKRFLADVTYQSGDTGTIHCANTGAMTGCATPGDKVWYSTSNNTKRKYPHSWEITETEQGHLICVNTIRANQLAVEAIEQGWIKELSGYERLQTEVKYGHENSRIDILLSASDRPACYIEVKSVTLLDDTEPGQGFFPDAVTTRGQKHLRELTEMAQNGSRAILLFAVLHSGIEKVAAALHIDAKYSQLLKQAQKAGVEVLCYKAEISNTEIKLNSAIAFNNS

SEQ ID NO: 51527 - DNA, 717 bp, Vibrio vulnificus
  CDS (1)..(717): transl_table=11
atgcatttcgaacccgcgctagattgcgccctattacaaaaacgctataaacgctttctcgccgatgtgacctatcaaagcggcgatacaggcacgattcattgtgccaataccggcgccatgactggttgcgcaacccctggtgataaagtgtggtattccacttccaacaacaccaaacgaaaatacccccacagttgggaaattacagaaacgcagcagggtcatcttatctgtgtcaataccattcgcgccaaccagctcacggtggaagccattgagcaaggctggattaaagagctctcagggtatgagcaacttcaaactgaagtgaaatatggtcatgaaaatagtcgaattgatatcttgctcagcgcaagcgaccgaccagcatgctatatagaagtaaagagtgtcaccttgctagatgacaccgagcctggacaaggcttctttcctgatgcagtgaccacccgtggacaaaaacacctgcgagagctcacagaaatggcacaaaatggaagtagagccatacttttatttgctgttttacattcaggtattgaaaaagttgctgcggcgctccatatagacgccaaatattcccaattactcaaacaagcacaaaaagccggagttgaagtcctctgctataaagcagagatcagcaatactgaaatcaaactcaattctgctattgcgtttaacaatagctag

SEQ ID NO: 51528 - protein, 238 aa, Vibrio vulnificus
MHFEPALDCALLQKRYKRFLADVTYQSGDTGTIHCANTGAMTGCATPGDKVWYSTSNNTKRKYPHSWEITETQQGHLICVNTIRANQLTVEAIEQGWIKELSGYEQLQTEVKYGHENSRIDILLSASDRPACYIEVKSVTLLDDTEPGQGFFPDAVTTRGQKHLRELTEMAQNGSRAILLFAVLHSGIEKVAAALHIDAKYSQLLKQAQKAGVEVLCYKAEISNTEIKLNSAIAFNNS

SEQ ID NO: 51529 - DNA, 738 bp, Yersinia pestis
  CDS (1)..(738): transl_table=11
ttgctgcaatttactcccccgttacaacccgccacacttattctgcggtacaaacgctttttagctgatattgtgacgcccgctggagaggcgctgactattcattgcgcgaatactggagcaatgacgggttgtgctacgcctggagataccatctggtattcaacatcagataatccgaaacggaagtatcctcagagctgggagctgacacagacccaaaccggtgattggatttgtgtcaatacgatgcgcgccaatgagttagtgaacttggcaattgaaaaaaatcagattgctgaattatctggttacaattttgtcagaaaagaagttaagtatggcgaagagaacagccgtatagacttgttattgcaggcagaagatagacgtgactgctatattgaagtcaaatcagtcaccttattacaacaacagtgtggttattttccagatgcggttactctaaggggccagaagcatcttcgggaattacaaaacagggttgtcaacggccaccgggcagtacttttctttgcggtattgcatacgggaatcaaacaagttgcaccagcccgacacattgatcgtcgctatgcagagttgctagtccaggctcagcaggcaggagtagaggttatttgttatggttttcaactatcgcctgacggtatcgagctaaacacccgtttaccgttattactggacgaaatgctttcatcagaaaacgctgaataa

SEQ ID NO: 51530 - protein, 245 aa, Yersinia pestis
MLQFTPPLQPATLILRYKRFLADIVTPAGEALTIHCANTGAMTGCATPGDTIWYSTSDNPKRKYPQSWELTQTQTGDWICVNTMRANELVNLAIEKNQIAELSGYNFVRKEVKYGEENSRIDLLLQAEDRRDCYIEVKSVTLLQQQCGYFPDAVTLRGQKHLRELQNRVVNGHRAVLFFAVLHTGIKQVAPARHIDRRYAELLVQAQQAGVEVICYGFQLSPDGIELNTRLPLLLDEMLSSENAE

SEQ ID NO: 51531 - DNA, 738 bp, Yersinia pseudotuberculosis
  CDS (1)..(738)
atgctacaatttactcccccgttacaacccgccacacttattctgcggtacaaacgctttttagctgatattgtgacgcccgctggagaggcgctgactattcattgcgcgaatactggagcaatgacgggttgtgctacgcctggagataccatctggtattcaacatcagataatccgaaacggaagtatcctcagagctgggagctgacacagacccaaaccggtgattggatttgtgtcaatacgatgcgcgccaatgagttagtgaacttggcaattgaaaaaaatcagattgctgaattatctggttacaattttgtcagaaaagaagttaagtatggcgaagagaacagccgtatagacttgttattgcaggcagaagatagacgtgactgctatattgaagtcaaatcagtcaccttattacaacaacagtgtggttattttccagatgcggttactctaaggggccagaagcatcttcgggaattacaaaacagggttgtcaacggccaccgggcagtacttttctttgcggtattgcatacgggaatcaaacaagttgcaccagcccgacacattgatcgtcgctatgcagagttgctagtccaggctcagcaggcaggagtagaggttatttgttatggttttcaactatcgcctgacggtatcgagctaaacacccgtttaccgttattacaggacgaaatgctttcatcagaaaacgctgaataa

SEQ ID NO: 51532 - protein, 245 aa, Yersinia pseudotuberculosis
MLQFTPPLQPATLILRYKRFLADIVTPAGEALTIHCANTGAMTGCATPGDTIWYSTSDNPKRKYPQSWELTQTQTGDWICVNTMRANELVNLAIEKNQIAELSGYNFVRKEVKYGEENSRIDLLLQAEDRRDCYIEVKSVTLLQQQCGYFPDAVTLRGQKHLRELQNRVVNGHRAVLFFAVLHTGIKQVAPARHIDRRYAELLVQAQQAGVEVICYGFQLSPDGIELNTRLPLLQDEMLSSENAE

SEQ ID NO: 51533 - DNA, 24 bp, Artificial sequence
  Primer sequence
atggaattttctccccctctacag

SEQ ID NO: 51534 - DNA, 24 bp, Artificial sequence
  Primer sequence
ttacaatgtaaccggcagtgattt

SEQ ID NO: 51535 - protein, 261 aa, Artificial sequence
  Consensus
  Variant (2)..(3): Xaa in position 2 to 3 is any amino acid
  Variant (5)..(6): Xaa in position 5 to 6 is any amino acid
  Variant (8)..(8): Xaa in position 8 is any amino acid
  Variant (10)..(11): Xaa in position 10 to 11 is any amino acid
  Variant (14)..(16): Xaa in position 14 to 16 is any amino acid
  Variant (18)..(22): Xaa in position 18 to 22 is any amino acid
  Variant (23)..(32): Xaa in position 23 to 32 is any or no amino acid
  Variant (34)..(35): Xaa in position 34 to 35 is any amino acid
  Variant (39)..(39): Xaa in position 39 is any amino acid
  Variant (41)..(45): Xaa in position 41 to 45 is any amino acid
  Variant (46)..(46): Xaa in position 46 is any or no amino acid
  Variant (48)..(49): Xaa in position 48 to 49 is any amino acid
  Variant (51)..(58): Xaa in position 51 to 58 is any amino acid
  Variant (59)..(60): Xaa in position 59 to 60 is any or no amino acid
  Variant (63)..(76): Xaa in position 63 to 76 is any amino acid
  Variant (77)..(87): Xaa in position 77 to 87 is any or no amino acid
  Variant (89)..(89): Xaa in position 89 is any amino acid
  Variant (91)..(93): Xaa in position 91 to 93 is any amino acid
  Variant (95)..(95): Xaa in position 95 is any amino acid
  Variant (97)..(100): Xaa in position 97 to 100 is any amino acid
  Variant (102)..(107): Xaa in position 102 to 107 is any amino acid
  Variant (108)..(124): Xaa in position 108 to 124 is any or no amino acid
  Variant (126)..(128): Xaa in position 126 to 128 is any amino acid
  Variant (130)..(130): Xaa in position 130 is any amino acid
  Variant (131)..(133): Xaa in position 131 to 133 is any or no amino acid
  Variant (138)..(139): Xaa in position 138 to 139 is any amino acid
  Variant (141)..(143): Xaa in position 141 to 143 is any amino acid
  Variant (144)..(155): Xaa in position 144 to 155 is any or no amino acid
  Variant (161)..(162): Xaa in position 161 to 162 is any amino acid
  Variant (164)..(169): Xaa in position 164 to 169 is any amino acid
  Variant (170)..(174): Xaa in position 170 to 174 is any or no amino acid
  Variant (176)..(176): Xaa in position 176 is any amino acid
  Variant (180)..(181): Xaa in position 180 to 181 is any amino acid
  Variant (183)..(183): Xaa in position 183 is any amino acid
  Variant (186)..(186): Xaa in position 186 is any amino acid
  Variant (190)..(190): Xaa in position 190 is any amino acid
  Variant (193)..(198): Xaa in position 193 to 198 is any amino acid
  Variant (200)..(200): Xaa in position 200 is any amino acid
  Variant (201)..(203): Xaa in position 201 to 203 is any or no amino acid
  Variant (205)..(205): Xaa in position 205 is any amino acid
  Variant (207)..(207): Xaa in position 207 is any amino acid
  Variant (209)..(209): Xaa in position 209 is any amino acid
  Variant (211)..(224): Xaa in position 211 to 224 is any amino acid
  Variant (225)..(225): Xaa in position 225 is any or no amino acid
  Variant (227)..(228): Xaa in position 227 to 228 is any amino acid
  Variant (230)..(235): Xaa in position 230 to 235 is any amino acid
  Variant (237)..(239): Xaa in position 237 to 239 is any amino acid
  Variant (242)..(251): Xaa in position 242 to 251 is any amino acid
  Variant (252)..(260): Xaa in position 252 to 260 is any or no amino acid
LXXAXXIXRXXRFXXXVXXXXXXXXXXXXXXXHXXNTGXMXXXXXXGXXVXXXXXXXXXXRKXXXXXXXXXXXXXXXXXXXXXXXXXVXTXXXNXLXXXXLXXXXXXXXXXXXXXXXXXXXXXXEXXXGXXXXSRIDXXLXXXXXXXXXXXXXXXYVEVKXXTXXXXXXXXXXXAXFPDXXTXRGXKHLXELXXXXXXGXXXXAXLXFXVXXXXXXXXXXXXXXXDXXYXXXXXXAXXXGVXXXXXXXXXXXXXXXXXXXI

SEQ ID NO: 51536 - protein, 35 aa, Artificial sequence
  Consensus
  Variant (2)..(3): Xaa in position 2 to 3 is any amino acid
  Variant (4)..(4): Xaa in position 4 is any or no amino acid
  Variant (7)..(13): Xaa in position 7 to 13 is any amino acid
  Variant (14)..(14): Xaa in position 14 is any or no amino acid
  Variant (16)..(23): Xaa in position 16 to 23 is any amino acid
  Variant (24)..(24): Xaa in position 24 is Asp or Asn
  Variant (25)..(25): Xaa in position 25 is Pro, Ser or Thr
  Variant (27)..(29): Xaa in position 27 to 29 is any amino acid
  Variant (30)..(30): Xaa in position 30 is Ala, Glu, Gly, Asn, Gln, Ser or Thr
  Variant (31)..(34): Xaa in position 31 to 34 is any amino acid
  Variant (35)..(35): Xaa in position 35 is Asp, Glu, Gly, Asn or Gln
RXXXRFXXXXXXXXGXXXXXXXXXXGXXXXXXXXX

SEQ ID NO: 51537 - protein, 7 aa, Artificial sequence
  Consensus
  Variant (3)..(3): Xaa in position 3 is any amino acid
  Variant (5)..(5): Xaa in position 5 is any amino acid
  Variant (6)..(6): Xaa in position 6 is any or no amino acid
SRXDXXL

SEQ ID NO: 51538 - protein, 5 aa, Artificial sequence
  Consensus
  Variant (4)..(4): Xaa in position 4 is Gly, Asn or Ser
  Variant (5)..(5): Xaa in position 5 is Ala, Cys, Thr or Val
EVKXX

SEQ ID NO: 51539 - protein, 16 aa, Artificial sequence
  Consensus
  Variant (4)..(4): Xaa in position 4 is Ala, Ser or Thr
  Variant (5)..(5): Xaa in position 5 is any amino acid
  Variant (6)..(6): Xaa in position 6 is Ser or Thr
  Variant (7)..(7): Xaa in position 7 is any amino acid
  Variant (10)..(10): Xaa in position 10 is any amino acid
  Variant (11)..(11): Xaa in position 11 is Lys or Arg
  Variant (13)..(13): Xaa in position 13 is Ile, Leu, Met or Val
  Variant (14)..(14): Xaa in position 14 is any amino acid
  Variant (16)..(16): Xaa in position 16 is Leu or Met
FPDXXXXRGXXHXXEX

SEQ ID NO: 51540 - DNA, 612 bp, Escherichia coli; identical to SEQ ID NO: 15395
  CDS (1)..(612)

SEQ ID NO: 51541 - protein, 203 aa, Escherichia coli; identical to SEQ ID NO: 15396

SEQ ID NO: 51542 - DNA, 558 bp, Mesorhizobium loti MAFF303099; identical to SEQ ID NO: 15397
  CDS (1)..(558): transl_table=11

SEQ ID NO: 51543 - protein, 185 aa, Mesorhizobium loti MAFF303099; identical to SEQ ID NO: 15398

SEQ ID NO: 51544 - DNA, 591 bp, Mesorhizobium loti MAFF303099; identical to SEQ ID NO: 15399
  CDS (1)..(591): transl_table=11

SEQ ID NO: 51545 - protein, 196 aa, Mesorhizobium loti MAFF303099; identical to SEQ ID NO: 15400

SEQ ID NO: 51546 - DNA, 558 bp, Mesorhizobium loti MAFF303099; identical to SEQ ID NO: 15401
  CDS (1)..(558): transl_table=11

SEQ ID NO: 51547 - protein, 185 aa, Mesorhizobium loti MAFF303099; identical to SEQ ID NO: 15402

SEQ ID NO: 51548 - DNA, 579 bp, Vibrio cholerae O1 biovar eltor str. N16961; identical to SEQ ID NO: 15403
  CDS (1)..(579): transl_table=11

SEQ ID NO: 51549 - protein, 192 aa, Vibrio cholerae O1 biovar eltor str. N16961; identical to SEQ ID NO: 15404

SEQ ID NO: 51550 - DNA, 561 bp, Bacillus halodurans C-125; identical to SEQ ID NO: 15405
  CDS (1)..(561): transl_table=11

SEQ ID NO: 51551 - protein, 186 aa, Bacillus halodurans C-125; identical to SEQ ID NO: 15406

SEQ ID NO: 51552 - DNA, 612 bp, Pasteurella multocida subsp. multocida str. Pm70; identical to SEQ ID NO: 15407
  CDS (1)..(612): transl_table=11

SEQ ID NO: 51553 - protein, 203 aa, Pasteurella multocida subsp. multocida str. Pm70; identical to SEQ ID NO: 15408

SEQ ID NO: 51554 - DNA, 771 bp, Lactococcus lactis subsp. lactis Il1403; identical to SEQ ID NO: 15409
  CDS (1)..(771): transl_table=11

SEQ ID NO: 51555 - protein, 256 aa, Lactococcus lactis subsp. lactis Il1403; identical to SEQ ID NO: 15410

SEQ ID NO: 51556 - DNA, 612 bp, Lactococcus lactis subsp. lactis Il1403; identical to SEQ ID NO: 15411
  CDS (1)..(612): transl_table=11

SEQ ID NO: 51557 - protein, 203 aa, Lactococcus lactis subsp. lactis Il1403; identical to SEQ ID NO: 15412

SEQ ID NO: 51558 - DNA, 603 bp, Lactococcus lactis subsp. lactis Il1403; identical to SEQ ID NO: 15413
  CDS (1)..(603): transl_table=11

SEQ ID NO: 51559 - protein, 200 aa, Lactococcus lactis subsp. lactis Il1403; identical to SEQ ID NO: 15414

SEQ ID NO: 51560 - DNA, 612 bp, Lactococcus lactis subsp. lactis Il1403; identical to SEQ ID NO: 15415
  CDS (1)..(612): transl_table=11

SEQ ID NO: 51561 - protein, 203 aa, Lactococcus lactis subsp. lactis Il1403; identical to SEQ ID NO: 15416

SEQ ID NO: 51562 - DNA, 462 bp, Lactococcus lactis subsp. lactis Il1403; identical to SEQ ID NO: 15417
  CDS (1)..(462): transl_table=11

SEQ ID NO: 51563 - protein, 153 aa, Lactococcus lactis subsp. lactis Il1403; identical to SEQ ID NO: 15418

SEQ ID NO: 51564 - DNA, 567 bp, Streptococcus pyogenes M1 GAS; identical to SEQ ID NO: 15419
  CDS (1)..(567): transl_table=11

SEQ ID NO: 51565 - protein, 188 aa, Streptococcus pyogenes M1 GAS; identical to SEQ ID NO: 15420

SEQ ID NO: 51566 - DNA, 513 bp, Neisseria meningitidis Z2491; identical to SEQ ID NO: 15421
  CDS (1)..(513): transl_table=11

SEQ ID NO: 51567 - protein, 170 aa, Neisseria meningitidis Z2491; identical to SEQ ID NO: 15422

SEQ ID NO: 51568 - DNA, 549 bp, Escherichia coli O157:H7; identical to SEQ ID NO: 15423
  CDS (1)..(549): transl_table=11

SEQ ID NO: 51569 - protein, 182 aa, Escherichia coli O157:H7; identical to SEQ ID NO: 15424

SEQ ID NO: 51570 - DNA, 558 bp, Streptococcus pneumoniae TIGR4; identical to SEQ ID NO: 15425
  CDS (1)..(558): transl_table=11

SEQ ID NO: 51571 - protein, 185 aa, Streptococcus pneumoniae TIGR4; identical to SEQ ID NO: 15426

SEQ ID NO: 51572 - DNA, 561 bp, Clostridium acetobutylicum ATCC 824; identical to SEQ ID NO: 15427
  CDS (1)..(561): transl_table=11

SEQ ID NO: 51573 - protein, 186 aa, Clostridium acetobutylicum ATCC 824; identical to SEQ ID NO: 15428

SEQ ID NO: 51574 - DNA, 615 bp, Clostridium acetobutylicum ATCC 824; identical to SEQ ID NO: 15429
  CDS (1)..(615): transl_table=11

SEQ ID NO: 51575 - protein, 204 aa, Clostridium acetobutylicum ATCC 824; identical to SEQ ID NO: 15430

SEQ ID NO: 51576 - DNA, 600 bp, Staphylococcus aureus subsp. aureus Mu50; identical to SEQ ID NO: 15431
  CDS (1)..(600): transl_table=11

SEQ ID NO: 51577 - protein, 199 aa, Staphylococcus aureus subsp. aureus Mu50; identical to SEQ ID NO: 15432

SEQ ID NO: 51578 - DNA, 552 bp, Escherichia coli K12; identical to SEQ ID NO: 15433
  CDS (1)..(552): transl_table=11

SEQ ID NO: 51579 - protein, 183 aa, Escherichia coli K12; identical to SEQ ID NO: 15434

SEQ ID NO: 51580 - DNA, 615 bp, Sinorhizobium meliloti 1021; identical to SEQ ID NO: 15435
  CDS (1)..(615): transl_table=11

SEQ ID NO: 51581 - protein, 204 aa, Sinorhizobium meliloti 1021; identical to SEQ ID NO: 15436

SEQ ID NO: 51582 - DNA, 552 bp, Salmonella typhimurium LT2; identical to SEQ ID NO: 15437
  CDS (1)..(552): transl_table=11

SEQ ID NO: 51583 - protein, 183 aa, Salmonella typhimurium LT2; identical to SEQ ID NO: 15438

SEQ ID NO: 51584 - DNA, 564 bp, Listeria monocytogenes EGD-e; identical to SEQ ID NO: 15439
  CDS (1)..(564): transl_table=11

SEQ ID NO: 51585 - protein, 187 aa, Listeria monocytogenes EGD-e; identical to SEQ ID NO: 15440

SEQ ID NO: 51586 - DNA, 570 bp, Listeria innocua Clip11262; identical to SEQ ID NO: 15441
  CDS (1)..(570): transl_table=11

SEQ ID NO: 51587 - protein, 189 aa, Listeria innocua Clip11262; identical to SEQ ID NO: 15442

SEQ ID NO: 51588 - DNA, 564 bp, Listeria innocua Clip11262; identical to SEQ ID NO: 15443
  CDS (1)..(564): transl_table=11

SEQ ID NO: 51589 - protein, 187 aa, Listeria innocua Clip11262; identical to SEQ ID NO: 15444

SEQ ID NO: 51590 - DNA, 579 bp, Nostoc sp. PCC 7120; identical to SEQ ID NO: 15445
  CDS (1)..(579): transl_table=11

SEQ ID NO: 51591 - protein, 192 aa, Nostoc sp. PCC 7120; identical to SEQ ID NO: 15446

SEQ ID NO: 51592 - DNA, 828 bp, Nostoc sp. PCC 7120; identical to SEQ ID NO: 15447
  CDS (1)..(828): transl_table=11

SEQ ID NO: 51593 - protein, 275 aa, Nostoc sp. PCC 7120; identical to SEQ ID NO: 15448

SEQ ID NO: 51594 - DNA, 513 bp, Ralstonia solanacearum GMI1000; identical to SEQ ID NO: 15449
  CDS (1)..(513): transl_table=11

SEQ ID NO: 51595 - protein, 170 aa, Ralstonia solanacearum GMI1000; identical to SEQ ID NO: 15450

SEQ ID NO: 51596 - DNA, 618 bp, Agrobacterium tumefaciens str. C58; identical to SEQ ID NO: 15451
  CDS (1)..(618): transl_table=11

SEQ ID NO: 51597 - protein, 205 aa, Agrobacterium tumefaciens str. C58; identical to SEQ ID NO: 15452

SEQ ID NO: 51598 - DNA, 561 bp, Agrobacterium tumefaciens str. C58; identical to SEQ ID NO: 15453
  CDS (1)..(561): transl_table=11

SEQ ID NO: 51599 - protein, 186 aa, Agrobacterium tumefaciens str. C58; identical to SEQ ID NO: 15454

SEQ ID NO: 51600 - DNA, 633 bp, Agrobacterium tumefaciens str. C58; identical to SEQ ID NO: 15455
  CDS (1)..(633): transl_table=11

SEQ ID NO: 51601 - protein, 210 aa, Agrobacterium tumefaciens str. C58; identical to SEQ ID NO: 15456

SEQ ID NO: 51602 - DNA, 687 bp, Brucella melitensis 16M; identical to SEQ ID NO: 15457
  CDS (1)..(687): transl_table=11

SEQ ID NO: 51603 - protein, 228 aa, Brucella melitensis 16M; identical to SEQ ID NO: 15458

SEQ ID NO: 51604 - DNA, 681 bp, Pyrobaculum aerophilum str. IM2; identical to SEQ ID NO: 15459
  CDS (1)..(681): transl_table=11

SEQ ID NO: 51605 - protein, 226 aa, Pyrobaculum aerophilum str. IM2; identical to SEQ ID NO: 15460

SEQ ID NO: 51606 - DNA, 585 bp, Clostridium perfringens str. 13; identical to SEQ ID NO: 15461
  CDS (1)..(585): transl_table=11

SEQ ID NO: 51607 - protein, 194 aa, Clostridium perfringens str. 13; identical to SEQ ID NO: 15462

SEQ ID NO: 51608 - DNA, 501 bp, Pyrococcus furiosus DSM 3638; identical to SEQ ID NO: 15463
  CDS (1)..(501): transl_table=11

SEQ ID NO: 51609 - protein, 166 aa, Pyrococcus furiosus DSM 3638; identical to SEQ ID NO: 15464

SEQ ID NO: 51610 - DNA, 687 bp, Corynebacterium glutamicum ATCC 13032; identical to SEQ ID NO: 15465
  CDS (1)..(687): transl_table=11

SEQ ID NO: 51611 - protein, 228 aa, Corynebacterium glutamicum ATCC 13032; identical to SEQ ID NO: 15466

SEQ ID NO: 51612 - DNA, 576 bp, Methanosarcina acetivorans C2A; identical to SEQ ID NO: 15467
  CDS (1)..(576): transl_table=11

SEQ ID NO: 51613 - protein, 191 aa, Methanosarcina acetivorans C2A; identical to SEQ ID NO: 15468

SEQ ID NO: 51614 - DNA, 600 bp, Methanosarcina acetivorans C2A; identical to SEQ ID NO: 15469
  CDS (1)..(600): transl_table=11

SEQ ID NO: 51615 - protein, 199 aa, Methanosarcina acetivorans C2A; identical to SEQ ID NO: 15470

SEQ ID NO: 51616 - DNA, 525 bp, Methanosarcina acetivorans C2A; identical to SEQ ID NO: 15471
  CDS (1)..(525): transl_table=11

SEQ ID NO: 51617 - protein, 174 aa, Methanosarcina acetivorans C2A; identical to SEQ ID NO: 15472

SEQ ID NO: 51618 - DNA, 555 bp, Methanosarcina acetivorans C2A; identical to SEQ ID NO: 15473
  CDS (1)..(555): transl_table=11

SEQ ID NO: 51619 - protein, 184 aa, Methanosarcina acetivorans C2A; identical to SEQ ID NO: 15474

SEQ ID NO: 51620 - DNA, 663 bp, Thermoanaerobacter tengcongensis MB4; identical to SEQ ID NO: 15475
  CDS (1)..(663): transl_table=11

SEQ ID NO: 51621 - protein, 220 aa, Thermoanaerobacter tengcongensis MB4; identical to SEQ ID NO: 15476

SEQ ID NO: 51622 - DNA, 528 bp, Streptomyces coelicolor A3(2); identical to SEQ ID NO: 15477
  CDS (1)..(528)

SEQ ID NO: 51623 - protein, 175 aa, Streptomyces coelicolor A3(2); identical to SEQ ID NO: 15478

SEQ ID NO: 51624 - DNA, 804 bp, Streptomyces coelicolor A3(2); identical to SEQ ID NO: 15479
  CDS (1)..(804)

SEQ ID NO: 51625 - protein, 267 aa, Streptomyces coelicolor A3(2); identical to SEQ ID NO: 15480

SEQ ID NO: 51626 - DNA, 582 bp, Streptomyces coelicolor A3(2); identical to SEQ ID NO: 15481
  CDS (1)..(582)

SEQ ID NO: 51627 - protein, 193 aa, Streptomyces coelicolor A3(2); identical to SEQ ID NO: 15482

SEQ ID NO: 51628 - DNA, 564 bp, Methanosarcina mazei Go1; identical to SEQ ID NO: 15483
  CDS (1)..(564): transl_table=11

SEQ ID NO: 51629 - protein, 187 aa, Methanosarcina mazei Go1; identical to SEQ ID NO: 15484

SEQ ID NO: 51630 - DNA, 702 bp, Methanosarcina mazei Go1; identical to SEQ ID NO: 15485
  CDS (1)..(702): transl_table=11

SEQ ID NO: 51631 - protein, 233 aa, Methanosarcina mazei Go1; identical to SEQ ID NO: 15486

SEQ ID NO: 51632 - DNA, 579 bp, Xanthomonas campestris pv. campestris str. ATCC 33913; identical to SEQ ID NO: 15487
  CDS (1)..(579): transl_table=11

SEQ ID NO: 51633 - protein, 192 aa, Xanthomonas campestris pv. campestris str. ATCC 33913; identical to SEQ ID NO: 15488

SEQ ID NO: 51634 - DNA, 579 bp, Xanthomonas axonopodis pv. citri str. 306; identical to SEQ ID NO: 15489
  CDS (1)..(579): transl_table=11

SEQ ID NO: 51635 - protein, 192 aa, Xanthomonas axonopodis pv. citri str. 306; identical to SEQ ID NO: 15490

SEQ ID NO: 51636 - DNA, 639 bp, Streptococcus agalactiae 2603V/R; identical to SEQ ID NO: 15491
  CDS (1)..(639): transl_table=11

SEQ ID NO: 51637 - protein, 212 aa, Streptococcus agalactiae 2603V/R; identical to SEQ ID NO: 15492

SEQ ID NO: 51638 - DNA, 549 bp, Streptococcus agalactiae 2603V/R; identical to SEQ ID NO: 15493
  CDS (1)..(549): transl_table=11

SEQ ID NO: 51639 - protein, 182 aa, Streptococcus agalactiae 2603V/R; identical to SEQ ID NO: 15494

SEQ ID NO: 51640 - DNA, 540 bp, Oceanobacillus iheyensis HTE831; identical to SEQ ID NO: 15495
  CDS (1)..(540): transl_table=11

SEQ ID NO: 51641 - protein, 179 aa, Oceanobacillus iheyensis HTE831; identical to SEQ ID NO: 15496

SEQ ID NO: 51642 - DNA, 675 bp, Bifidobacterium longum NCC2705; identical to SEQ ID NO: 15497
  CDS (1)..(675): transl_table=11

SEQ ID NO: 51643 - protein, 224 aa, Bifidobacterium longum NCC2705; identical to SEQ ID NO: 15498

SEQ ID NO: 51644 - DNA, 678 bp, Bifidobacterium longum NCC2705; identical to SEQ ID NO: 15499
  CDS (1)..(678): transl_table=11

SEQ ID NO: 51645 - protein, 225 aa, Bifidobacterium longum NCC2705; identical to SEQ ID NO: 15500

SEQ ID NO: 51646 - DNA, 597 bp, Leptospira interrogans serovar Lai str. 56601; identical to SEQ ID NO: 15501
  CDS (1)..(597): transl_table=11

SEQ ID NO: 51647 - protein, 198 aa, Leptospira interrogans serovar Lai str. 56601; identical to SEQ ID NO: 15502

SEQ ID NO: 51648 - DNA, 579 bp, Shewanella oneidensis MR-1; identical to SEQ ID NO: 15503
  CDS (1)..(579): transl_table=11

SEQ ID NO: 51649 - protein, 192 aa, Shewanella oneidensis MR-1; identical to SEQ ID NO: 15504

SEQ ID NO: 51650 - DNA, 630 bp, Shewanella oneidensis MR-1; identical to SEQ ID NO: 15505
  CDS (1)..(630): transl_table=11

SEQ ID NO: 51651 - protein, 209 aa, Shewanella oneidensis MR-1; identical to SEQ ID NO: 15506

SEQ ID NO: 51652 - DNA, 699 bp, Streptococcus mutans UA159; identical to SEQ ID NO: 15507
  CDS (1)..(699): transl_table=11

SEQ ID NO: 51653 - protein, 232 aa, Streptococcus mutans UA159; identical to SEQ ID NO: 15508

SEQ ID NO: 51654 - DNA, 648 bp, Streptomyces coelicolor A3(2); identical to SEQ ID NO: 15509
  CDS (1)..(648)

SEQ ID NO: 51655 - protein, 215 aa, Streptomyces coelicolor A3(2); identical to SEQ ID NO: 15510

SEQ ID NO: 51656 - DNA, 567 bp, Pseudomonas putida KT2440; identical to SEQ ID NO: 15511
  CDS (1)..(567): transl_table=11

SEQ ID NO: 51657 - protein, 188 aa, Pseudomonas putida KT2440; identical to SEQ ID NO: 15512

SEQ ID NO: 51658 - DNA, 552 bp, Escherichia coli CFT073; identical to SEQ ID NO: 15513
  CDS (1)..(552): transl_table=11

SEQ ID NO: 51659 - protein, 183 aa, Escherichia coli CFT073; identical to SEQ ID NO: 15514

SEQ ID NO: 51660 - DNA, 549 bp, Escherichia coli CFT073; identical to SEQ ID NO: 15515
  CDS (1)..(549): transl_table=11

SEQ ID NO: 51661 - protein, 182 aa, Escherichia coli CFT073; identical to SEQ ID NO: 15516

SEQ ID NO: 51662 - DNA, 588 bp, Mycoplasma penetrans HF-2; identical to SEQ ID NO: 15517
  CDS (1)..(588): transl_table=4

SEQ ID NO: 51663 - protein, 195 aa, Mycoplasma penetrans HF-2; identical to SEQ ID NO: 15518

SEQ ID NO: 51664 - DNA, 771 bp, Vibrio vulnificus CMCP6; identical to SEQ ID NO: 15519
  CDS (1)..(771): transl_table=11

SEQ ID NO: 51665 - protein, 256 aa, Vibrio vulnificus CMCP6; identical to SEQ ID NO: 15520

SEQ ID NO: 51666 - DNA, 594 bp, Vibrio vulnificus CMCP6; identical to SEQ ID NO: 15521
  CDS (1)..(594): transl_table=11

SEQ ID NO: 51667 - protein, 197 aa, Vibrio vulnificus CMCP6; identical to SEQ ID NO: 15522

SEQ ID NO: 51668 - DNA, 549 bp, Vibrio vulnificus CMCP6; identical to SEQ ID NO: 15523
  CDS (1)..(549): transl_table=11

SEQ ID NO: 51669 - protein, 182 aa, Vibrio vulnificus CMCP6; identical to SEQ ID NO: 15524

SEQ ID NO: 51670 - DNA, 621 bp, Bradyrhizobium japonicum USDA 110; identical to SEQ ID NO: 15525
  CDS (1)..(621)

SEQ ID NO: 51671 - protein, 206 aa, Bradyrhizobium japonicum USDA 110; identical to SEQ ID NO: 15526

SEQ ID NO: 51672 - DNA, 564 bp, Clostridium tetani E88; identical to SEQ ID NO: 15527
  CDS (1)..(564): transl_table=11

SEQ ID NO: 51673 - protein, 187 aa, Clostridium tetani E88; identical to SEQ ID NO: 15528

SEQ ID NO: 51674 - DNA, 618 bp, Lactobacillus plantarum WCFS1; identical to SEQ ID NO: 15529
  CDS (1)..(618): transl_table=11

SEQ ID NO: 51675 - protein, 205 aa, Lactobacillus plantarum WCFS1; identical to SEQ ID NO: 15530

SEQ ID NO: 51676 - DNA, 609 bp, Lactobacillus plantarum WCFS1; identical to SEQ ID NO: 15531
  CDS (1)..(609): transl_table=11

SEQ ID NO: 51677 - protein, 202 aa, Lactobacillus plantarum WCFS1; identical to SEQ ID NO: 15532

SEQ ID NO: 51678 - DNA, 555 bp, Lactobacillus plantarum WCFS1; identical to SEQ ID NO: 15533
  CDS (1)..(555): transl_table=11

SEQ ID NO: 51679 - protein, 184 aa, Lactobacillus plantarum WCFS1; identical to SEQ ID NO: 15534

SEQ ID NO: 51680 - DNA, 603 bp, Lactobacillus plantarum WCFS1; identical to SEQ ID NO: 15535
  CDS (1)..(603): transl_table=11

SEQ ID NO: 51681 - protein, 200 aa, Lactobacillus plantarum WCFS1; identical to SEQ ID NO: 15536

SEQ ID NO: 51682 - DNA, 621 bp, Lactobacillus plantarum WCFS1; identical to SEQ ID NO: 15537
  CDS (1)..(621): transl_table=11

SEQ ID NO: 51683 - protein, 206 aa, Lactobacillus plantarum WCFS1; identical to SEQ ID NO: 15538

SEQ ID NO: 51684 - DNA, 570 bp, Lactobacillus plantarum WCFS1; identical to SEQ ID NO: 15539
  CDS (1)..(570): transl_table=11

SEQ ID NO: 51685 - protein, 189 aa, Lactobacillus plantarum WCFS1; identical to SEQ ID NO: 15540

SEQ ID NO: 51686 - DNA, 561 bp, Lactobacillus plantarum WCFS1; identical to SEQ ID NO: 15541
  CDS (1)..(561): transl_table=11

SEQ ID NO: 51687 - protein, 186 aa, Lactobacillus plantarum WCFS1; identical to SEQ ID NO: 15542

SEQ ID NO: 51688 - DNA, 555 bp, Vibrio parahaemolyticus RIMD 2210633; identical to SEQ ID NO: 15543
  CDS (1)..(555): transl_table=11

SEQ ID NO: 51689 - protein, 184 aa, Vibrio parahaemolyticus RIMD 2210633; identical to SEQ ID NO: 15544

SEQ ID NO: 51690 - DNA, 549 bp, Vibrio parahaemolyticus RIMD 2210633; identical to SEQ ID NO: 15545
  CDS (1)..(549): transl_table=11

SEQ ID NO: 51691 - protein, 182 aa, Vibrio parahaemolyticus RIMD 2210633; identical to SEQ ID NO: 15546

SEQ ID NO: 51692 - DNA, 552 bp, Salmonella enterica subsp. enterica serovar Typhi Ty2; identical to SEQ ID NO: 15547
  CDS (1)..(552): transl_table=11

SEQ ID NO: 51693 - protein, 183 aa, Salmonella enterica subsp. enterica serovar Typhi Ty2; identical to SEQ ID NO: 15548

SEQ ID NO: 51694 - DNA, 759 bp, Bacteroides thetaiotaomicron VPI-5482; identical to SEQ ID NO: 15549
  CDS (1)..(759): transl_table=11

SEQ ID NO: 51695 - protein, 252 aa, Bacteroides thetaiotaomicron VPI-5482; identical to SEQ ID NO: 15550

SEQ ID NO: 51696 - DNA, 624 bp, Bacteroides thetaiotaomicron VPI-5482; identical to SEQ ID NO: 15551
  CDS (1)..(624): transl_table=11

SEQ ID NO: 51697 - protein, 207 aa, Bacteroides thetaiotaomicron VPI-5482; identical to SEQ ID NO: 15552

SEQ ID NO: 51698 - DNA, 564 bp, Bacteroides thetaiotaomicron VPI-5482; identical to SEQ ID NO: 15553
  CDS (1)..(564): transl_table=11

SEQ ID NO: 51699 - protein, 187 aa, Bacteroides thetaiotaomicron VPI-5482; identical to SEQ ID NO: 15554

SEQ ID NO: 51700 - DNA, 606 bp, Bacteroides thetaiotaomicron VPI-5482; identical to SEQ ID NO: 15555
  CDS (1)..(606): transl_table=11

SEQ ID NO: 51701 - protein, 201 aa, Bacteroides thetaiotaomicron VPI-5482; identical to SEQ ID NO: 15556

SEQ ID NO: 51702 - DNA, 552 bp, Bacteroides thetaiotaomicron VPI-5482; identical to SEQ ID NO: 15557
  CDS (1)..(552): transl_table=11

SEQ ID NO: 51703 - protein, 183 aa, Bacteroides thetaiotaomicron VPI-5482; identical to SEQ ID NO: 15558

SEQ ID NO: 51704 - DNA, 846 bp, Enterococcus faecalis V583; identical to SEQ ID NO: 15559
  CDS (1)..(846): transl_table=11

SEQ ID NO: 51705 - protein, 281 aa, Enterococcus faecalis V583; identical to SEQ ID NO: 15560

SEQ ID NO: 51706 - DNA, 639 bp, Enterococcus faecalis V583; identical to SEQ ID NO: 15561
  CDS (1)..(639): transl_table=11

SEQ ID NO: 51707 - protein, 212 aa, Enterococcus faecalis V583; identical to SEQ ID NO: 15562

SEQ ID NO: 51708 - DNA, 582 bp, Enterococcus faecalis V583; identical to SEQ ID NO: 15563
  CDS (1)..(582): transl_table=11

SEQ ID NO: 51709 - protein, 193 aa, Enterococcus faecalis V583; identical to SEQ ID NO: 15564

SEQ ID NO: 51710 - DNA, 723 bp, Bacillus cereus ATCC 14579; identical to SEQ ID NO: 15565
  CDS (1)..(723): transl_table=11

SEQ ID NO: 51711 - protein, 240 aa, Bacillus cereus ATCC 14579; identical to SEQ ID NO: 15566

SEQ ID NO: 51712 - DNA, 561 bp, Bacillus cereus ATCC 14579; identical to SEQ ID NO: 15567
  CDS (1)..(561): transl_table=11

SEQ ID NO: 51713 - protein, 186 aa, Bacillus cereus ATCC 14579; identical to SEQ ID NO: 15568

SEQ ID NO: 51714 - DNA, 666 bp, Bacillus anthracis str. Ames; identical to SEQ ID NO: 15569
  CDS (1)..(666): transl_table=11

SEQ ID NO: 51715 - protein, 221 aa, Bacillus anthracis str. Ames; identical to SEQ ID NO: 15570

SEQ ID NO: 51716 - DNA, 564 bp, Bacillus anthracis str. Ames; identical to SEQ ID NO: 15571
  CDS (1)..(564): transl_table=11

SEQ ID NO: 51717 - protein, 187 aa, Bacillus anthracis str. Ames; identical to SEQ ID NO: 15572

SEQ ID NO: 51718 - DNA, 723 bp, Bacillus anthracis str. Ames; identical to SEQ ID NO: 15573
  CDS (1)..(723): transl_table=11

SEQ ID NO: 51719 - protein, 240 aa, Bacillus anthracis str. Ames; identical to SEQ ID NO: 15574

SEQ ID NO: 51720 - DNA, 618 bp, Helicobacter hepaticus ATCC 51449; identical to SEQ ID NO: 15575
  CDS (1)..(618): transl_table=11

SEQ ID NO: 51721 - protein, 205 aa, Helicobacter hepaticus ATCC 51449; identical to SEQ ID NO: 15576

SEQ ID NO: 51722 - DNA, 555 bp, Rhodopirellula baltica SH 1; identical to SEQ ID NO: 15577
  CDS (1)..(555): transl_table=11

SEQ ID NO: 51723 - protein, 184 aa, Rhodopirellula baltica SH 1; identical to SEQ ID NO: 15578

SEQ ID NO: 51724 - DNA, 522 bp, Chromobacterium violaceum ATCC 12472; identical to SEQ ID NO: 15579
  CDS (1)..(522): transl_table=11

SEQ ID NO: 51725 - protein, 173 aa, Chromobacterium violaceum ATCC 12472; identical to SEQ ID NO: 15580

SEQ ID NO: 51726 - DNA, 561 bp, Gloeobacter violaceus PCC 7421; identical to SEQ ID NO: 15581
  CDS (1)..(561): transl_table=11

SEQ ID NO: 51727 - protein, 186 aa, Gloeobacter violaceus PCC 7421; identical to SEQ ID NO: 15582

SEQ ID NO: 51728 - DNA, 771 bp, Vibrio vulnificus YJ016; identical to SEQ ID NO: 15583
  CDS (1)..(771): transl_table=11

SEQ ID NO: 51729 - protein, 256 aa, Vibrio vulnificus YJ016; identical to SEQ ID NO: 15584

SEQ ID NO: 51730 - DNA, 558 bp, Vibrio vulnificus YJ016; identical to SEQ ID NO: 15585
  CDS (1)..(558): transl_table=11

SEQ ID NO: 51731 - protein, 185 aa, Vibrio vulnificus YJ016; identical to SEQ ID NO: 15586

SEQ ID NO: 51732 - DNA, 657 bp, Vibrio vulnificus YJ016; identical to SEQ ID NO: 15587
  CDS (1)..(657): transl_table=11

SEQ ID NO: 51733 - protein, 218 aa, Vibrio vulnificus YJ016; identical to SEQ ID NO: 15588

SEQ ID NO: 51734 - DNA, 621 bp, Vibrio vulnificus YJ016; identical to SEQ ID NO: 15589
  CDS (1)..(621): transl_table=11

SEQ ID NO: 51735 - protein, 206 aa, Vibrio vulnificus YJ016; identical to SEQ ID NO: 15590

SEQ ID NO: 51736 - DNA, 570 bp, Corynebacterium diphtheriae NCTC 13129; identical to SEQ ID NO: 15591
  CDS (1)..(570): transl_table=11

SEQ ID NO: 51737 - protein, 189 aa, Corynebacterium diphtheriae NCTC 13129; identical to SEQ ID NO: 15592

SEQ ID NO: 51738 - DNA, 573 bp, Rhodopseudomonas palustris CGA009; identical to SEQ ID NO: 15593
  CDS (1)..(573): transl_table=11

SEQ ID NO: 51739 - protein, 190 aa, Rhodopseudomonas palustris CGA009; identical to SEQ ID NO: 15594

SEQ ID NO: 51740 - DNA, 615 bp, Lactobacillus johnsonii NCC 533; identical to SEQ ID NO: 15595
  CDS (1)..(615): transl_table=11

SEQ ID NO: 51741 - protein, 204 aa, Lactobacillus johnsonii NCC 533; identical to SEQ ID NO: 15596

SEQ ID NO: 51742 - DNA, 564 bp, Bacillus cereus ATCC 10987; identical to SEQ ID NO: 15597
  CDS (1)..(564): transl_table=11

SEQ ID NO: 51743 - protein, 187 aa, Bacillus cereus ATCC 10987; identical to SEQ ID NO: 15598

SEQ ID NO: 51744 - DNA, 2154 bp, Neurospora crassa; identical to SEQ ID NO: 15599
  CDS (1)..(2154)

SEQ ID NO: 51745 - protein, 717 aa, Neurospora crassa; identical to SEQ ID NO: 15600

SEQ ID NO: 51746 - DNA, 660 bp, Magnaporthe grisea 70-15; identical to SEQ ID NO: 15601
  CDS (1)..(660)

SEQ ID NO: 51747 - protein, 219 aa, Magnaporthe grisea 70-15; identical to SEQ ID NO: 15602

SEQ ID NO: 51748 - DNA, 699 bp, Gibberella zeae PH-1; identical to SEQ ID NO: 15603
  CDS (1)..(699)

SEQ ID NO: 51749 - protein, 232 aa, Gibberella zeae PH-1; identical to SEQ ID NO: 15604

SEQ ID NO: 51750 - DNA, 699 bp, Gibberella zeae PH-1; identical to SEQ ID NO: 15605
  CDS (1)..(699)

SEQ ID NO: 51751 - protein, 232 aa, Gibberella zeae PH-1; identical to SEQ ID NO: 15606

SEQ ID NO: 51752 - DNA, 690 bp, Ustilago maydis 521; identical to SEQ ID NO: 15607
  CDS (1)..(690)

SEQ ID NO: 51753 - protein, 229 aa, Ustilago maydis 521; identical to SEQ ID NO: 15608

SEQ ID NO: 51754 - DNA, 702 bp, Aspergillus nidulans FGSC A4; identical to SEQ ID NO: 15609
  CDS (1)..(702)

SEQ ID NO: 51755 - protein, 233 aa, Aspergillus nidulans FGSC A4; identical to SEQ ID NO: 15610

SEQ ID NO: 51756 - DNA, 618 bp, Aspergillus nidulans FGSC A4; identical to SEQ ID NO: 15611
  CDS (1)..(618)

SEQ ID NO: 51757 - protein, 205 aa, Aspergillus nidulans FGSC A4; identical to SEQ ID NO: 15612

SEQ ID NO: 51758 - DNA, 573 bp, Candida glabrata CBS138; identical to SEQ ID NO: 15613
  CDS (1)..(573)

SEQ ID NO: 51759 - protein, 190 aa, Candida glabrata CBS138; identical to SEQ ID NO: 15614

SEQ ID NO: 51760 - DNA, 570 bp, Kluyveromyces lactis NRRL Y-1140; identical to SEQ ID NO: 15615
  CDS (1)..(570)

SEQ ID NO: 51761 - protein, 189 aa, Kluyveromyces lactis NRRL Y-1140; identical to SEQ ID NO: 15616

SEQ ID NO: 51762 - DNA, 693 bp, Debaryomyces hansenii CBS767; identical to SEQ ID NO: 15617
  CDS (1)..(693)

SEQ ID NO: 51763 - protein, 230 aa, Debaryomyces hansenii CBS767; identical to SEQ ID NO: 15618

SEQ ID NO: 51764 - DNA, 690 bp, Debaryomyces hansenii CBS767; identical to SEQ ID NO: 15619
  CDS (1)..(690)

SEQ ID NO: 51765 - protein, 229 aa, Debaryomyces hansenii CBS767; identical to SEQ ID NO: 15620

SEQ ID NO: 51766 - DNA, 666 bp, Yarrowia lipolytica CLIB99; identical to SEQ ID NO: 15621
  CDS (1)..(666)

SEQ ID NO: 51767 - protein, 221 aa, Yarrowia lipolytica CLIB99; identical to SEQ ID NO: 15622

SEQ ID NO: 51768 - DNA, 840 bp, Yarrowia lipolytica CLIB99; identical to SEQ ID NO: 15623
  CDS (1)..(840)

SEQ ID NO: 51769 - protein, 279 aa, Yarrowia lipolytica CLIB99; identical to SEQ ID NO: 15624

SEQ ID NO: 51770 - DNA, 642 bp, Cryptococcus neoformans var. neoformans JEC21; identical to SEQ ID NO: 15625
  CDS (1)..(642)

SEQ ID NO: 51771 - protein, 213 aa, Cryptococcus neoformans var. neoformans JEC21; identical to SEQ ID NO: 15626

SEQ ID NO: 51772 - DNA, 546 bp, Dictyostelium discoideum; identical to SEQ ID NO: 15627
  CDS (1)..(546)

SEQ ID NO: 51773 - protein, 181 aa, Dictyostelium discoideum; identical to SEQ ID NO: 15628

SEQ ID NO: 51774 - DNA, 576 bp, Dictyostelium discoideum; identical to SEQ ID NO: 15629
  CDS (1)..(576)

SEQ ID NO: 51775 - protein, 191 aa, Dictyostelium discoideum; identical to SEQ ID NO: 15630

SEQ ID NO: 51776 - DNA, 591 bp, Dictyostelium discoideum; identical to SEQ ID NO: 15631
  CDS (1)..(591)

SEQ ID NO: 51777 - protein, 196 aa, Dictyostelium discoideum; identical to SEQ ID NO: 15632

SEQ ID NO: 51778 - DNA, 573 bp, Dictyostelium discoideum; identical to SEQ ID NO: 15633
  CDS (1)..(573)

SEQ ID NO: 51779 - protein, 190 aa, Dictyostelium discoideum; identical to SEQ ID NO: 15634

SEQ ID NO: 51780 - DNA, 459 bp, Entamoeba histolytica HM-1:IMSS; identical to SEQ ID NO: 15635
  CDS (1)..(459)

SEQ ID NO: 51781 - protein, 152 aa, Entamoeba histolytica HM-1:IMSS; identical to SEQ ID NO: 15636

SEQ ID NO: 51782 - DNA, 609 bp, Entamoeba histolytica HM-1:IMSS; identical to SEQ ID NO: 15637
  CDS (1)..(609)

SEQ ID NO: 51783 - protein, 202 aa, Entamoeba histolytica HM-1:IMSS; identical to SEQ ID NO: 15638

SEQ ID NO: 51784 - DNA, 609 bp, Entamoeba histolytica HM-1:IMSS; identical to SEQ ID NO: 15639
  CDS (1)..(609)

SEQ ID NO: 51785 - protein, 202 aa, Entamoeba histolytica HM-1:IMSS; identical to SEQ ID NO: 15640

SEQ ID NO: 51786 - DNA, 549 bp, Entamoeba histolytica HM-1:IMSS; identical to SEQ ID NO: 15641
  CDS (1)..(549)

SEQ ID NO: 51787 - protein, 182 aa, Entamoeba histolytica HM-1:IMSS; identical to SEQ ID NO: 15642

SEQ ID NO: 51788 - DNA, 612 bp, Entamoeba histolytica HM-1:IMSS; identical to SEQ ID NO: 15643
  CDS (1)..(612)

SEQ ID NO: 51789 - protein, 203 aa, Entamoeba histolytica HM-1:IMSS; identical to SEQ ID NO: 15644

SEQ ID NO: 51790 - DNA, 615 bp, Entamoeba histolytica HM-1:IMSS; identical to SEQ ID NO: 15645
  CDS (1)..(615)

SEQ ID NO: 51791 - protein, 204 aa, Entamoeba histolytica HM-1:IMSS; identical to SEQ ID NO: 15646

SEQ ID NO: 51792 - DNA, 924 bp, Candida albicans SC5314; identical to SEQ ID NO: 15647
  CDS (1)..(924): transl_table=12

SEQ ID NO: 51793 - protein, 307 aa, Candida albicans SC5314; identical to SEQ ID NO: 15648

SEQ ID NO: 51794 - DNA, 888 bp, Thermus thermophilus HB27; identical to SEQ ID NO: 15649
  CDS (1)..(888): transl_table=11

SEQ ID NO: 51795 - protein, 295 aa, Thermus thermophilus HB27; identical to SEQ ID NO: 15650

SEQ ID NO: 51796 - DNA, 594 bp, Desulfovibrio vulgaris subsp. vulgaris str. Hildenborough; identical to SEQ ID NO: 15651
  CDS (1)..(594): transl_table=11

SEQ ID NO: 51797 - protein, 197 aa, Desulfovibrio vulgaris subsp. vulgaris str. Hildenborough; identical to SEQ ID NO: 15652

SEQ ID NO: 51798 - DNA, 570 bp, Listeria monocytogenes str. 4b F2365; identical to SEQ ID NO: 15653
  CDS (1)..(570): transl_table=11

SEQ ID NO: 51799 - protein, 189 aa, Listeria monocytogenes str. 4b F2365; identical to SEQ ID NO: 15654

SEQ ID NO: 51800 - DNA, 564 bp, Listeria monocytogenes str. 4b F2365; identical to SEQ ID NO: 15655
  CDS (1)..(564): transl_table=11

SEQ ID NO: 51801 - protein, 187 aa, Listeria monocytogenes str. 4b F2365; identical to SEQ ID NO: 15656

SEQ ID NO: 51802 - DNA, 564 bp, Bacillus thuringiensis serovar konkukian str. 97-27; identical to SEQ ID NO: 15657
  CDS (1)..(564): transl_table=11

SEQ ID NO: 51803 - protein, 187 aa, Bacillus thuringiensis serovar konkukian str. 97-27; identical to SEQ ID NO: 15658

SEQ ID NO: 51804 - DNA, 486 bp, Staphylococcus aureus subsp. aureus MRSA252; identical to SEQ ID NO: 15659
  CDS (1)..(486): transl_table=11

SEQ ID NO: 51805 - protein, 161 aa, Staphylococcus aureus subsp. aureus MRSA252; identical to SEQ ID NO: 15660

SEQ ID NO: 51806 - DNA, 600 bp, Staphylococcus aureus subsp. aureus MRSA252; identical to SEQ ID NO: 15661
  CDS (1)..(600): transl_table=11

SEQ ID NO: 51807 - protein, 199 aa, Staphylococcus aureus subsp. aureus MRSA252; identical to SEQ ID NO: 15662

SEQ ID NO: 51808 - DNA, 627 bp, Erwinia carotovora subsp. atroseptica SCRI1043; identical to SEQ ID NO: 15663
  CDS (1)..(627)

SEQ ID NO: 51809 - protein, 208 aa, Erwinia carotovora subsp. atroseptica SCRI1043; identical to SEQ ID NO: 15664

SEQ ID NO: 51810 - DNA, 573 bp, Propionibacterium acnes KPA171202; identical to SEQ ID NO: 15665
  CDS (1)..(573): transl_table=11

SEQ ID NO: 51811 - protein, 190 aa, Propionibacterium acnes KPA171202; identical to SEQ ID NO: 15666

SEQ ID NO: 51812 - DNA, 510 bp, Desulfotalea psychrophila LSv54; identical to SEQ ID NO: 15667
  CDS (1)..(510): transl_table=11

SEQ ID NO: 51813 - protein, 169 aa, Desulfotalea psychrophila LSv54; identical to SEQ ID NO: 15668

SEQ ID NO: 51814 - DNA, 579 bp, Bacillus licheniformis ATCC 14580; identical to SEQ ID NO: 15669
  CDS (1)..(579): transl_table=11

SEQ ID NO: 51815 - protein, 192 aa, Bacillus licheniformis ATCC 14580; identical to SEQ ID NO: 15670

SEQ ID NO: 51816 - DNA, 564 bp, Bacillus cereus E33L; identical to SEQ ID NO: 15671
  CDS (1)..(564): transl_table=11

SEQ ID NO: 51817 - protein, 187 aa, Bacillus cereus E33L; identical to SEQ ID NO: 15672

SEQ ID NO: 51818 - DNA, 603 bp, Mannheimia succiniciproducens MBEL55E; identical to SEQ ID NO: 15673
  CDS (1)..(603): transl_table=11

SEQ ID NO: 51819 - protein, 200 aa, Mannheimia succiniciproducens MBEL55E; identical to SEQ ID NO: 15674

SEQ ID NO: 51820 - DNA, 597 bp, Mannheimia succiniciproducens MBEL55E; identical to SEQ ID NO: 15675
  CDS (1)..(597): transl_table=11

SEQ ID NO: 51821 - protein, 198 aa, Mannheimia succiniciproducens MBEL55E; identical to SEQ ID NO: 15676

SEQ ID NO: 51822 - DNA, 606 bp, Bacteroides fragilis YCH46; identical to SEQ ID NO: 15677
  CDS (1)..(606): transl_table=11

SEQ ID NO: 51823 - protein, 201 aa, Bacteroides fragilis YCH46; identical to SEQ ID NO: 15678

SEQ ID NO: 51824 - DNA, 630 bp, Bacteroides fragilis YCH46; identical to SEQ ID NO: 15679
  CDS (1)..(630): transl_table=11

SEQ ID NO: 51825 - protein, 209 aa, Bacteroides fragilis YCH46; identical to SEQ ID NO: 15680

SEQ ID NO: 51826 - DNA, 627 bp, Bacteroides fragilis YCH46; identical to SEQ ID NO: 15681
  CDS (1)..(627): transl_table=11

SEQ ID NO: 51827 - protein, 208 aa, Bacteroides fragilis YCH46; identical to SEQ ID NO: 15682

SEQ ID NO: 51828 - DNA, 591 bp, Methylococcus capsulatus str. Bath; identical to SEQ ID NO: 15683
  CDS (1)..(591): transl_table=11

SEQ ID NO: 51829 - protein, 196 aa, Methylococcus capsulatus str. Bath; identical to SEQ ID NO: 15684

SEQ ID NO: 51830 - DNA, 648 bp, Photobacterium profundum SS9; identical to SEQ ID NO: 15685
  CDS (1)..(648): transl_table=11

SEQ ID NO: 51831 - protein, 215 aa, Photobacterium profundum SS9; identical to SEQ ID NO: 15686

SEQ ID NO: 51832 - DNA, 549 bp, Photobacterium profundum SS9; identical to SEQ ID NO: 15687
  CDS (1)..(549): transl_table=11

SEQ ID NO: 51833 - protein, 182 aa, Photobacterium profundum SS9; identical to SEQ ID NO: 15688

SEQ ID NO: 51834 - DNA, 564 bp, Photobacterium profundum SS9; identical to SEQ ID NO: 15689
  CDS (1)..(564): transl_table=11

SEQ ID NO: 51835 - protein, 187 aa, Photobacterium profundum SS9; identical to SEQ ID NO: 15690

SEQ ID NO: 51836 - DNA, 561 bp, Haloarcula marismortui ATCC 43049; identical to SEQ ID NO: 15691
  CDS (1)..(561): transl_table=11

SEQ ID NO: 51837 - protein, 186 aa, Haloarcula marismortui ATCC 43049; identical to SEQ ID NO: 15692

SEQ ID NO: 51838 - DNA, 675 bp, Geobacillus kaustophilus HTA426; identical to SEQ ID NO: 15693
  CDS (1)..(675): transl_table=11

SEQ ID NO: 51839 - protein, 224 aa, Geobacillus kaustophilus HTA426; identical to SEQ ID NO: 15694

SEQ ID NO: 51840 - DNA, 558 bp, Geobacillus kaustophilus HTA426; identical to SEQ ID NO: 15695
  CDS (1)..(558): transl_table=11

SEQ ID NO: 51841 - protein, 185 aa, Geobacillus kaustophilus HTA426; identical to SEQ ID NO: 15696

SEQ ID NO: 51842 - DNA, 552 bp, Azoarcus sp. EbN1; identical to SEQ ID NO: 15697
  CDS (1)..(552): transl_table=11

SEQ ID NO: 51843 - protein, 183 aa, Azoarcus sp. EbN1; identical to SEQ ID NO: 15698

SEQ ID NO: 51844 - DNA, 600 bp, Zymomonas mobilis subsp. mobilis ZM4; identical to SEQ ID NO: 15699
  CDS (1)..(600): transl_table=11

SEQ ID NO: 51845 - protein, 199 aa, Zymomonas mobilis subsp. mobilis ZM4; identical to SEQ ID NO: 15700

SEQ ID NO: 51846 - DNA, 693 bp, Dehalococcoides ethenogenes 195; identical to SEQ ID NO: 15701
  CDS (1)..(693): transl_table=11

SEQ ID NO: 51847 - protein, 230 aa, Dehalococcoides ethenogenes 195; identical to SEQ ID NO: 15702

SEQ ID NO: 51848 - DNA, 486 bp, Staphylococcus aureus subsp. aureus COL; identical to SEQ ID NO: 15703
  CDS (1)..(486): transl_table=11

SEQ ID NO: 51849 - protein, 161 aa, Staphylococcus aureus subsp. aureus COL; identical to SEQ ID NO: 15704

SEQ ID NO: 51850 - DNA, 600 bp, Staphylococcus aureus subsp. aureus COL; identical to SEQ ID NO: 15705
  CDS (1)..(600): transl_table=11

SEQ ID NO: 51851 - protein, 199 aa, Staphylococcus aureus subsp. aureus COL; identical to SEQ ID NO: 15706

SEQ ID NO: 51852 - DNA, 615 bp, Lactobacillus acidophilus NCFM; identical to SEQ ID NO: 15707
  CDS (1)..(615): transl_table=11

SEQ ID NO: 51853 - protein, 204 aa, Lactobacillus acidophilus NCFM; identical to SEQ ID NO: 15708

SEQ ID NO: 51854 - DNA, 600 bp, Vibrio fischeri ES114; identical to SEQ ID NO: 15709
  CDS (1)..(600): transl_table=11

SEQ ID NO: 51855 - protein, 199 aa, Vibrio fischeri ES114; identical to SEQ ID NO: 15710

SEQ ID NO: 51856 - DNA, 546 bp, Vibrio fischeri ES114; identical to SEQ ID NO: 15711
  CDS (1)..(546): transl_table=11

SEQ ID NO: 51857 - protein, 181 aa, Vibrio fischeri ES114; identical to SEQ ID NO: 15712

SEQ ID NO: 51858 - DNA, 552 bp, Vibrio fischeri ES114; identical to SEQ ID NO: 15713
  CDS (1)..(552): transl_table=11

SEQ ID NO: 51859 - protein, 183 aa, Vibrio fischeri ES114; identical to SEQ ID NO: 15714

SEQ ID NO: 51860 - DNA, 756 bp, Vibrio fischeri ES114; identical to SEQ ID NO: 15715
  CDS (1)..(756): transl_table=11

SEQ ID NO: 51861 - protein, 251 aa, Vibrio fischeri ES114; identical to SEQ ID NO: 15716

SEQ ID NO: 51862 - DNA, 522 bp, Bacteroides fragilis NCTC 9343; identical to SEQ ID NO: 15717
  CDS (1)..(522): transl_table=11

SEQ ID NO: 51863 - protein, 173 aa, Bacteroides fragilis NCTC 9343; identical to SEQ ID NO: 15718

SEQ ID NO: 51864 - DNA, 600 bp, Bacteroides fragilis NCTC 9343; identical to SEQ ID NO: 15719
  CDS (1)..(600): transl_table=11

SEQ ID NO: 51865 - protein, 199 aa, Bacteroides fragilis NCTC 9343; identical to SEQ ID NO: 15720

SEQ ID NO: 51866 - DNA, 630 bp, Bacteroides fragilis NCTC 9343; identical to SEQ ID NO: 15721
  CDS (1)..(630): transl_table=11

SEQ ID NO: 51867 - protein, 209 aa, Bacteroides fragilis NCTC 9343; identical to SEQ ID NO: 15722

SEQ ID NO: 51868 - DNA, 624 bp, Bacteroides fragilis NCTC 9343; identical to SEQ ID NO: 15723
  CDS (1)..(624): transl_table=11

SEQ ID NO: 51869 - protein, 207 aa, Bacteroides fragilis NCTC 9343; identical to SEQ ID NO: 15724

SEQ ID NO: 51870 - DNA, 552 bp, Bacteroides fragilis NCTC 9343; identical to SEQ ID NO: 15725
  CDS (1)..(552): transl_table=11

SEQ ID NO: 51871 - protein, 183 aa, Bacteroides fragilis NCTC 9343; identical to SEQ ID NO: 15726

SEQ ID NO: 51872 - DNA, 588 bp, Bacteroides fragilis NCTC 9343; identical to SEQ ID NO: 15727
  CDS (1)..(588): transl_table=11

SEQ ID NO: 51873 - protein, 195 aa, Bacteroides fragilis NCTC 9343; identical to SEQ ID NO: 15728

SEQ ID NO: 51874 - DNA, 690 bp, Brucella abortus biovar 1 str. 9-941; identical to SEQ ID NO: 15729
  CDS (1)..(690): transl_table=11

SEQ ID NO: 51875 - protein, 229 aa, Brucella abortus biovar 1 str. 9-941; identical to SEQ ID NO: 15730

SEQ ID NO: 51876 - DNA, 690 bp, Chloroflexus aurantiacus; identical to SEQ ID NO: 15731
  CDS (1)..(690)

SEQ ID NO: 51877 - protein, 229 aa, Chloroflexus aurantiacus; identical to SEQ ID NO: 15732

SEQ ID NO: 51878 - DNA, 564 bp, Chloroflexus aurantiacus; identical to SEQ ID NO: 15733
  CDS (1)..(564)

SEQ ID NO: 51879 - protein, 187 aa, Chloroflexus aurantiacus; identical to SEQ ID NO: 15734

SEQ ID NO: 51880 - DNA, 615 bp, Lactobacillus gasseri; identical to SEQ ID NO: 15735
  CDS (1)..(615)

SEQ ID NO: 51881 - protein, 204 aa, Lactobacillus gasseri; identical to SEQ ID NO: 15736

SEQ ID NO: 51882 - DNA, 606 bp, Magnetospirillum magnetotacticum MS-1; identical to SEQ ID NO: 15737
  CDS (1)..(606)

SEQ ID NO: 51883 - protein, 201 aa, Magnetospirillum magnetotacticum MS-1; identical to SEQ ID NO: 15738

SEQ ID NO: 51884 - DNA, 702 bp, Leuconostoc mesenteroides subsp. mesenteroides ATCC 8293; identical to SEQ ID NO: 15739
  CDS (1)..(702)

SEQ ID NO: 51885 - protein, 233 aa, Leuconostoc mesenteroides subsp. mesenteroides ATCC 8293; identical to SEQ ID NO: 15740

SEQ ID NO: 51886 - DNA, 561 bp, Nostoc punctiforme PCC 73102; identical to SEQ ID NO: 15741
  CDS (1)..(561)

SEQ ID NO: 51887 - protein, 186 aa, Nostoc punctiforme PCC 73102; identical to SEQ ID NO: 15742

SEQ ID NO: 51888 - DNA, 594 bp, Nostoc punctiforme PCC 73102; identical to SEQ ID NO: 15743
  CDS (1)..(594)

SEQ ID NO: 51889 - protein, 197 aa, Nostoc punctiforme PCC 73102; identical to SEQ ID NO: 15744

SEQ ID NO: 51890 - DNA, 702 bp, Nostoc punctiforme PCC 73102; identical to SEQ ID NO: 15745
  CDS (1)..(702)

SEQ ID NO: 51891 - protein, 233 aa, Nostoc punctiforme PCC 73102; identical to SEQ ID NO: 15746

SEQ ID NO: 51892 - DNA, 675 bp, Bifidobacterium longum DJO10A; identical to SEQ ID NO: 15747
  CDS (1)..(675)

SEQ ID NO: 51893 - protein, 224 aa, Bifidobacterium longum DJO10A; identical to SEQ ID NO: 15748

SEQ ID NO: 51894 - DNA, 633 bp, Bifidobacterium longum DJO10A; identical to SEQ ID NO: 15749
  CDS (1)..(633)

SEQ ID NO: 51895 - protein, 210 aa, Bifidobacterium longum DJO10A; identical to SEQ ID NO: 15750

SEQ ID NO: 51896 - DNA, 609 bp, Desulfovibrio desulfuricans G20; identical to SEQ ID NO: 15751
  CDS (1)..(609)

SEQ ID NO: 51897 - protein, 202 aa, Desulfovibrio desulfuricans G20; identical to SEQ ID NO: 15752

SEQ ID NO: 51898 - DNA, 558 bp, Desulfovibrio desulfuricans G20; identical to SEQ ID NO: 15753
  CDS (1)..(558)

SEQ ID NO: 51899 - protein, 185 aa, Desulfovibrio desulfuricans G20; identical to SEQ ID NO: 15754

SEQ ID NO: 51900 - DNA, 576 bp, Anabaena variabilis ATCC 29413; identical to SEQ ID NO: 15755
  CDS (1)..(576)

SEQ ID NO: 51901 - protein, 191 aa, Anabaena variabilis ATCC 29413; identical to SEQ ID NO: 15756

SEQ ID NO: 51902 - DNA, 561 bp, Anabaena variabilis ATCC 29413; identical to SEQ ID NO: 15757
  CDS (1)..(561)

SEQ ID NO: 51903 - protein, 186 aa, Anabaena variabilis ATCC 29413; identical to SEQ ID NO: 15758

SEQ ID NO: 51904 - DNA, 576 bp, Actinobacillus pleuropneumoniae serovar 1 str. 4074; identical to SEQ ID NO: 15759
  CDS (1)..(576)

SEQ ID NO: 51905 - protein, 191 aa, Actinobacillus pleuropneumoniae serovar 1 str. 4074; identical to SEQ ID NO: 15760

SEQ ID NO: 51906 - DNA, 501 bp, Burkholderia cepacia R18194; identical to SEQ ID NO: 15761
  CDS (1)..(501)

SEQ ID NO: 51907 - protein, 166 aa, Burkholderia cepacia R18194; identical to SEQ ID NO: 15762

SEQ ID NO: 51908 - DNA, 609 bp, Burkholderia cepacia R18194; identical to SEQ ID NO: 15763
  CDS (1)..(609)

SEQ ID NO: 51909 - protein, 202 aa, Burkholderia cepacia R18194; identical to SEQ ID NO: 15764

SEQ ID NO: 51910 - DNA, 528 bp, Listeria monocytogenes str. 4b H7858; identical to SEQ ID NO: 15765
  CDS (1)..(528): transl_table=11

SEQ ID NO: 51911 - protein, 175 aa, Listeria monocytogenes str. 4b H7858; identical to SEQ ID NO: 15766

SEQ ID NO: 51912 - DNA, 570 bp, Listeria monocytogenes str. 4b H7858; identical to SEQ ID NO: 15767
  CDS (1)..(570): transl_table=11

SEQ ID NO: 51913 - protein, 189 aa, Listeria monocytogenes str. 4b H7858; identical to SEQ ID NO: 15768

SEQ ID NO: 51914 - DNA, 564 bp, Bacillus cereus G9241; identical to SEQ ID NO: 15769
  CDS (1)..(564): transl_table=11

SEQ ID NO: 51915 - protein, 187 aa, Bacillus cereus G9241; identical to SEQ ID NO: 15770

SEQ ID NO: 51916 - DNA, 558 bp, Bacillus cereus G9241; identical to SEQ ID NO: 15771
  CDS (1)..(558): transl_table=11

SEQ ID NO: 51917 - protein, 185 aa, Bacillus cereus G9241; identical to SEQ ID NO: 15772

SEQ ID NO: 51918 - DNA, 588 bp, Burkholderia fungorum LB400; identical to SEQ ID NO: 15773
  CDS (1)..(588)

SEQ ID NO: 51919 - protein, 195 aa, Burkholderia fungorum LB400; identical to SEQ ID NO: 15774

SEQ ID NO: 51920 - DNA, 555 bp, Thermobifida fusca; identical to SEQ ID NO: 15775
  CDS (1)..(555)

SEQ ID NO: 51921 - protein, 184 aa, Thermobifida fusca; identical to SEQ ID NO: 15776

SEQ ID NO: 51922 - DNA, 513 bp, Cytophaga hutchinsonii; identical to SEQ ID NO: 15777
  CDS (1)..(513)

SEQ ID NO: 51923 - protein, 170 aa, Cytophaga hutchinsonii; identical to SEQ ID NO: 15778

SEQ ID NO: 51924 - DNA, 654 bp, Cytophaga hutchinsonii; identical to SEQ ID NO: 15779
  CDS (1)..(654)

SEQ ID NO: 51925 - protein, 217 aa, Cytophaga hutchinsonii; identical to SEQ ID NO: 15780

SEQ ID NO: 51926 - DNA, 744 bp, Microbulbifer degradans 2-40; identical to SEQ ID NO: 15781
  CDS (1)..(744)

SEQ ID NO: 51927 - protein, 247 aa, Microbulbifer degradans 2-40; identical to SEQ ID NO: 15782

SEQ ID NO: 51928 - DNA, 549 bp, Microbulbifer degradans 2-40; identical to SEQ ID NO: 15783
  CDS (1)..(549)

SEQ ID NO: 51929 - protein, 182 aa, Microbulbifer degradans 2-40; identical to SEQ ID NO: 15784

SEQ ID NO: 51930 - DNA, 417 bp, Oenococcus oeni PSU-1; identical to SEQ ID NO: 15785
  CDS (1)..(417)

SEQ ID NO: 51931 - protein, 138 aa, Oenococcus oeni PSU-1; identical to SEQ ID NO: 15786

SEQ ID NO: 51932 - DNA, 567 bp, Pediococcus pentosaceus ATCC 25745; identical to SEQ ID NO: 15787
  CDS (1)..(567)

SEQ ID NO: 51933 - protein, 188 aa, Pediococcus pentosaceus ATCC 25745; identical to SEQ ID NO: 15788

SEQ ID NO: 51934 - DNA, 555 bp, Pediococcus pentosaceus ATCC 25745; identical to SEQ ID NO: 15789
  CDS (1)..(555)

SEQ ID NO: 51935 - protein, 184 aa, Pediococcus pentosaceus ATCC 25745; identical to SEQ ID NO: 15790

SEQ ID NO: 51936 - DNA, 552 bp, Pediococcus pentosaceus ATCC 25745; identical to SEQ ID NO: 15791
  CDS (1)..(552)

SEQ ID NO: 51937 - protein, 183 aa, Pediococcus pentosaceus ATCC 25745; identical to SEQ ID NO: 15792

SEQ ID NO: 51938 - DNA, 465 bp, Streptococcus suis 89/1591; identical to SEQ ID NO: 15793
  CDS (1)..(465)

SEQ ID NO: 51939 - protein, 154 aa, Streptococcus suis 89/1591; identical to SEQ ID NO: 15794

SEQ ID NO: 51940 - DNA, 606 bp, Desulfovibrio desulfuricans G20; identical to SEQ ID NO: 15795
  CDS (1)..(606)

SEQ ID NO: 51941 - protein, 201 aa, Desulfovibrio desulfuricans G20; identical to SEQ ID NO: 15796

SEQ ID NO: 51942 - DNA, 543 bp, Chloroflexus aurantiacus; identical to SEQ ID NO: 15797
  CDS (1)..(543)

SEQ ID NO: 51943 - protein, 180 aa, Chloroflexus aurantiacus; identical to SEQ ID NO: 15798

SEQ ID NO: 51944 - DNA, 186 bp, Brevibacterium linens BL2; identical to SEQ ID NO: 15799
  CDS (1)..(186)

SEQ ID NO: 51945 - protein, 61 aa, Brevibacterium linens BL2; identical to SEQ ID NO: 15800

SEQ ID NO: 51946 - DNA, 612 bp, Lactococcus lactis subsp. cremoris SK11; identical to SEQ ID NO: 15801
  CDS (1)..(612)

SEQ ID NO: 51947 - protein, 203 aa, Lactococcus lactis subsp. cremoris SK11; identical to SEQ ID NO: 15802

SEQ ID NO: 51948 - DNA, 588 bp, Lactococcus lactis subsp. cremoris SK11; identical to SEQ ID NO: 15803
  CDS (1)..(588)

SEQ ID NO: 51949 - protein, 195 aa, Lactococcus lactis subsp. cremoris SK11; identical to SEQ ID NO: 15804

SEQ ID NO: 51950 - DNA, 597 bp, Lactobacillus casei ATCC 334; identical to SEQ ID NO: 15805
  CDS (1)..(597)

SEQ ID NO: 51951 - protein, 198 aa, Lactobacillus casei ATCC 334; identical to SEQ ID NO: 15806

SEQ ID NO: 51952 - DNA, 705 bp, Lactobacillus casei ATCC 334; identical to SEQ ID NO: 15807
  CDS (1)..(705)

SEQ ID NO: 51953 - protein, 234 aa, Lactobacillus casei ATCC 334; identical to SEQ ID NO: 15808

SEQ ID NO: 51954 - DNA, 591 bp, Lactobacillus delbrueckii subsp. bulgaricus ATCC BAA-365; identical to SEQ ID NO: 15809
  CDS (1)..(591)

SEQ ID NO: 51955 - protein, 196 aa, Lactobacillus delbrueckii subsp. bulgaricus ATCC BAA-365; identical to SEQ ID NO: 15810

SEQ ID NO: 51956 - DNA, 609 bp, Bacillus anthracis str. A2012; identical to SEQ ID NO: 15811
  CDS (1)..(609): Xaa of translated CDS can stand for any naturally occuring amino acid which can be translated from respective CDS-codon

SEQ ID NO: 51957 - protein, 202 aa, Bacillus anthracis str. A2012; identical to SEQ ID NO: 15812
  misc_feature (136)..(136): Xaa can be any naturally occuring amino acid

SEQ ID NO: 51958 - DNA, 534 bp, Anaeromyxobacter dehalogenans 2CP-C; identical to SEQ ID NO: 15813
  CDS (1)..(534): transl_table=11

SEQ ID NO: 51959 - protein, 177 aa, Anaeromyxobacter dehalogenans 2CP-C; identical to SEQ ID NO: 15814

SEQ ID NO: 51960 - DNA, 663 bp, Streptococcus pneumoniae TIGR4; identical to SEQ ID NO: 15815
  CDS (1)..(663)

SEQ ID NO: 51961 - protein, 220 aa, Streptococcus pneumoniae TIGR4; identical to SEQ ID NO: 15816

SEQ ID NO: 51962 - DNA, 558 bp, Burkholderia vietnamiensis G4; identical to SEQ ID NO: 15817
  CDS (1)..(558): transl_table=11

SEQ ID NO: 51963 - protein, 185 aa, Burkholderia vietnamiensis G4; identical to SEQ ID NO: 15818

SEQ ID NO: 51964 - DNA, 576 bp, Crocosphaera watsonii WH 8501; identical to SEQ ID NO: 15819
  CDS (1)..(576): transl_table=11

SEQ ID NO: 51965 - protein, 191 aa, Crocosphaera watsonii WH 8501; identical to SEQ ID NO: 15820

SEQ ID NO: 51966 - DNA, 555 bp, Chlorobium phaeobacteroides DSM 266; identical to SEQ ID NO: 15821
  CDS (1)..(555): transl_table=11

SEQ ID NO: 51967 - protein, 184 aa, Chlorobium phaeobacteroides DSM 266; identical to SEQ ID NO: 15822

SEQ ID NO: 51968 - DNA, 618 bp, Chlorobium phaeobacteroides BS1; identical to SEQ ID NO: 15823
  CDS (1)..(618): transl_table=11

SEQ ID NO: 51969 - protein, 205 aa, Chlorobium phaeobacteroides BS1; identical to SEQ ID NO: 15824

SEQ ID NO: 51970 - DNA, 576 bp, Exiguobacterium sp. 255-15; identical to SEQ ID NO: 15825
  CDS (1)..(576): transl_table=11

SEQ ID NO: 51971 - protein, 191 aa, Exiguobacterium sp. 255-15; identical to SEQ ID NO: 15826

SEQ ID NO: 51972 - DNA, 552 bp, Exiguobacterium sp. 255-15; identical to SEQ ID NO: 15827
  CDS (1)..(552): transl_table=11

SEQ ID NO: 51973 - protein, 183 aa, Exiguobacterium sp. 255-15; identical to SEQ ID NO: 15828

SEQ ID NO: 51974 - DNA, 702 bp, Exiguobacterium sp. 255-15; identical to SEQ ID NO: 15829
  CDS (1)..(702): transl_table=11

SEQ ID NO: 51975 - protein, 233 aa, Exiguobacterium sp. 255-15; identical to SEQ ID NO: 15830

SEQ ID NO: 51976 - DNA, 642 bp, Methanosarcina barkeri str. fusaro; identical to SEQ ID NO: 15831
  CDS (1)..(642): transl_table=11

SEQ ID NO: 51977 - protein, 213 aa, Methanosarcina barkeri str. fusaro; identical to SEQ ID NO: 15832

SEQ ID NO: 51978 - DNA, 600 bp, Methanosarcina barkeri str. fusaro; identical to SEQ ID NO: 15833
  CDS (1)..(600): transl_table=11

SEQ ID NO: 51979 - protein, 199 aa, Methanosarcina barkeri str. fusaro; identical to SEQ ID NO: 15834

SEQ ID NO: 51980 - DNA, 549 bp, Methanosarcina barkeri str. fusaro; identical to SEQ ID NO: 15835
  CDS (1)..(549): transl_table=11

SEQ ID NO: 51981 - protein, 182 aa, Methanosarcina barkeri str. fusaro; identical to SEQ ID NO: 15836

SEQ ID NO: 51982 - DNA, 609 bp, Methanosarcina barkeri str. fusaro; identical to SEQ ID NO: 15837
  CDS (1)..(609): transl_table=11

SEQ ID NO: 51983 - protein, 202 aa, Methanosarcina barkeri str. fusaro; identical to SEQ ID NO: 15838

SEQ ID NO: 51984 - DNA, 531 bp, Desulfuromonas acetoxidans DSM 684; identical to SEQ ID NO: 15839
  CDS (1)..(531): transl_table=11

SEQ ID NO: 51985 - protein, 176 aa, Desulfuromonas acetoxidans DSM 684; identical to SEQ ID NO: 15840

SEQ ID NO: 51986 - DNA, 555 bp, Jannaschia sp. CCS1; identical to SEQ ID NO: 15841
  CDS (1)..(555): transl_table=11

SEQ ID NO: 51987 - protein, 184 aa, Jannaschia sp. CCS1; identical to SEQ ID NO: 15842

SEQ ID NO: 51988 - DNA, 630 bp, Frankia sp. EAN1pec; identical to SEQ ID NO: 15843
  CDS (1)..(630): transl_table=11

SEQ ID NO: 51989 - protein, 209 aa, Frankia sp. EAN1pec; identical to SEQ ID NO: 15844

SEQ ID NO: 51990 - DNA, 555 bp, Shewanella baltica OS155; identical to SEQ ID NO: 15845
  CDS (1)..(555): transl_table=11

SEQ ID NO: 51991 - protein, 184 aa, Shewanella baltica OS155; identical to SEQ ID NO: 15846

SEQ ID NO: 51992 - DNA, 585 bp, Shewanella baltica OS155; identical to SEQ ID NO: 15847
  CDS (1)..(585): transl_table=11

SEQ ID NO: 51993 - protein, 194 aa, Shewanella baltica OS155; identical to SEQ ID NO: 15848

SEQ ID NO: 51994 - DNA, 726 bp, Ralstonia metallidurans CH34; identical to SEQ ID NO: 15849
  CDS (1)..(726): transl_table=11

SEQ ID NO: 51995 - protein, 241 aa, Ralstonia metallidurans CH34; identical to SEQ ID NO: 15850

SEQ ID NO: 51996 - DNA, 549 bp, Paracoccus denitrificans PD1222; identical to SEQ ID NO: 15851
  CDS (1)..(549): transl_table=11

SEQ ID NO: 51997 - protein, 182 aa, Paracoccus denitrificans PD1222; identical to SEQ ID NO: 15852

SEQ ID NO: 51998 - DNA, 615 bp, Shewanella frigidimarina NCIMB 400; identical to SEQ ID NO: 15853
  CDS (1)..(615): transl_table=11

SEQ ID NO: 51999 - protein, 204 aa, Shewanella frigidimarina NCIMB 400; identical to SEQ ID NO: 15854

SEQ ID NO: 52000 - DNA, 777 bp, Escherichia coli; identical to SEQ ID NO: 15855
  CDS (1)..(777): transl_table=11

SEQ ID NO: 52001 - protein, 258 aa, Escherichia coli; identical to SEQ ID NO: 15856

SEQ ID NO: 52002 - DNA, 651 bp, Pseudomonas fluorescens; identical to SEQ ID NO: 15857
  CDS (1)..(651): transl_table=11

SEQ ID NO: 52003 - protein, 216 aa, Pseudomonas fluorescens; identical to SEQ ID NO: 15858

SEQ ID NO: 52004 - DNA, 579 bp, Staphylococcus haemolyticus; identical to SEQ ID NO: 15859
  CDS (1)..(579): transl_table=11

SEQ ID NO: 52005 - protein, 192 aa, Staphylococcus haemolyticus; identical to SEQ ID NO: 15860

SEQ ID NO: 52006 - DNA, 648 bp, Aspergillus fumigatus Af293; identical to SEQ ID NO: 15861
  CDS (1)..(648)

SEQ ID NO: 52007 - protein, 215 aa, Aspergillus fumigatus Af293; identical to SEQ ID NO: 15862

SEQ ID NO: 52008 - DNA, 747 bp, Aspergillus fumigatus Af293; identical to SEQ ID NO: 15863
  CDS (1)..(747)

SEQ ID NO: 52009 - protein, 248 aa, Aspergillus fumigatus Af293; identical to SEQ ID NO: 15864

SEQ ID NO: 52010 - DNA, 687 bp, Aspergillus fumigatus Af293; identical to SEQ ID NO: 15865
  CDS (1)..(687)

SEQ ID NO: 52011 - protein, 228 aa, Aspergillus fumigatus Af293; identical to SEQ ID NO: 15866

SEQ ID NO: 52012 - DNA, 603 bp, Lactobacillus crispatus; identical to SEQ ID NO: 15867
  CDS (1)..(603): transl_table=11

SEQ ID NO: 52013 - protein, 200 aa, Lactobacillus crispatus; identical to SEQ ID NO: 15868

SEQ ID NO: 52014 - DNA, 642 bp, Cryptococcus neoformans var; identical to SEQ ID NO: 15869
  CDS (1)..(642)

SEQ ID NO: 52015 - protein, 213 aa, Cryptococcus neoformans var; identical to SEQ ID NO: 15870

SEQ ID NO: 52016 - DNA, 513 bp, Klebsiella pneumoniae; identical to SEQ ID NO: 15871
  CDS (1)..(513): transl_table=11

SEQ ID NO: 52017 - protein, 170 aa, Klebsiella pneumoniae; identical to SEQ ID NO: 15872

SEQ ID NO: 52018 - DNA, 555 bp, Vibrio cholerae non; identical to SEQ ID NO: 15873
  CDS (1)..(555): transl_table=11

SEQ ID NO: 52019 - protein, 184 aa, Vibrio cholerae non; identical to SEQ ID NO: 15874

SEQ ID NO: 52020 - DNA, 645 bp, Rhizobium etli; identical to SEQ ID NO: 15875
  CDS (1)..(645): transl_table=11

SEQ ID NO: 52021 - protein, 214 aa, Rhizobium etli; identical to SEQ ID NO: 15876

SEQ ID NO: 52022 - DNA, 558 bp, Bacillus stearothermophilus; identical to SEQ ID NO: 15877
  CDS (1)..(558): transl_table=11

SEQ ID NO: 52023 - protein, 185 aa, Bacillus stearothermophilus; identical to SEQ ID NO: 15878

SEQ ID NO: 52024 - DNA, 594 bp, Rhizobium leguminosarum bv; identical to SEQ ID NO: 15879
  CDS (1)..(594): transl_table=11

SEQ ID NO: 52025 - protein, 197 aa, Rhizobium leguminosarum bv; identical to SEQ ID NO: 15880

SEQ ID NO: 52026 - DNA, 573 bp, Dictyostelium discoideum; identical to SEQ ID NO: 15881
  CDS (1)..(573)

SEQ ID NO: 52027 - protein, 190 aa, Dictyostelium discoideum; identical to SEQ ID NO: 15882

SEQ ID NO: 52028 - DNA, 657 bp, Physcomitrella patens; identical to SEQ ID NO: 15883
  CDS (1)..(657)

SEQ ID NO: 52029 - protein, 218 aa, Physcomitrella patens; identical to SEQ ID NO: 15884

SEQ ID NO: 52030 - DNA, 636 bp, Aeromonas hydrophila; identical to SEQ ID NO: 15885
  CDS (1)..(636): transl_table=11

SEQ ID NO: 52031 - protein, 211 aa, Aeromonas hydrophila; identical to SEQ ID NO: 15886

SEQ ID NO: 52032 - DNA, 600 bp, Aeromonas hydrophila; identical to SEQ ID NO: 15887
  CDS (1)..(600): transl_table=11

SEQ ID NO: 52033 - protein, 199 aa, Aeromonas hydrophila; identical to SEQ ID NO: 15888

SEQ ID NO: 52034 - DNA, 678 bp, Corynebacterium glutamicum; identical to SEQ ID NO: 15889
  CDS (1)..(678): transl_table=11

SEQ ID NO: 52035 - protein, 225 aa, Corynebacterium glutamicum; identical to SEQ ID NO: 15890

SEQ ID NO: 52036 - DNA, 624 bp, Lactococcus lactis; identical to SEQ ID NO: 15891
  CDS (1)..(624): transl_table=11

SEQ ID NO: 52037 - protein, 207 aa, Lactococcus lactis; identical to SEQ ID NO: 15892

SEQ ID NO: 52038 - DNA, 621 bp, Candida albicans; identical to SEQ ID NO: 15893
  CDS (1)..(621): transl_table=12

SEQ ID NO: 52039 - protein, 206 aa, Candida albicans; identical to SEQ ID NO: 15894

SEQ ID NO: 52040 - DNA, 519 bp, Staphylococcus aureus; identical to SEQ ID NO: 15895
  CDS (1)..(519): transl_table=11

SEQ ID NO: 52041 - protein, 172 aa, Staphylococcus aureus; identical to SEQ ID NO: 15896

SEQ ID NO: 52042 - DNA, 555 bp, Bacillus subtilis; identical to SEQ ID NO: 15897
  CDS (1)..(555): transl_table=11

SEQ ID NO: 52043 - protein, 184 aa, Bacillus subtilis; identical to SEQ ID NO: 15898

SEQ ID NO: 52044 - DNA, 552 bp, Escherichia coli; identical to SEQ ID NO: 15433
  CDS (1)..(552)

SEQ ID NO: 52045 - protein, 183 aa, Escherichia coli; identical to SEQ ID NO: 15434

SEQ ID NO: 52046 - DNA, 573 bp, Rhizobium leguminosarum bv; identical to SEQ ID NO: 15901
  CDS (1)..(573): transl_table=11

SEQ ID NO: 52047 - protein, 190 aa, Rhizobium leguminosarum bv; identical to SEQ ID NO: 15902

SEQ ID NO: 52048 - DNA, 552 bp, Rhizobium meliloti; identical to SEQ ID NO: 15903
  CDS (1)..(552): transl_table=11

SEQ ID NO: 52049 - protein, 183 aa, Rhizobium meliloti; identical to SEQ ID NO: 15904

SEQ ID NO: 52050 - DNA, 624 bp, Lactococcus lactis subsp; identical to SEQ ID NO: 15905
  CDS (1)..(624): transl_table=11

SEQ ID NO: 52051 - protein, 207 aa, Lactococcus lactis subsp; identical to SEQ ID NO: 15906

SEQ ID NO: 52052 - DNA, 645 bp, Methanococcus jannaschii; identical to SEQ ID NO: 15907
  CDS (1)..(645): transl_table=11

SEQ ID NO: 52053 - protein, 214 aa, Methanococcus jannaschii; identical to SEQ ID NO: 15908

SEQ ID NO: 52054 - DNA, 624 bp, Schizosaccharomyces pombe; identical to SEQ ID NO: 15909
  CDS (1)..(624)

SEQ ID NO: 52055 - protein, 207 aa, Schizosaccharomyces pombe; identical to SEQ ID NO: 15910

SEQ ID NO: 52056 - DNA, 591 bp, Saccharomyces cerevisiae; identical to SEQ ID NO: 15911
  CDS (1)..(591)

SEQ ID NO: 52057 - protein, 196 aa, Saccharomyces cerevisiae; identical to SEQ ID NO: 15912

SEQ ID NO: 52058 - DNA, 25 bp, Artificial sequence
  Primer sequence
atgaacatgccaatgaccgaaagaa

SEQ ID NO: 52059 - DNA, 28 bp, Artificial sequence
  Primer sequence
ttaaactgacgattcaactttataatct

SEQ ID NO: 52060 - protein, 204 aa, Artificial sequence; identical to SEQ ID NO: 15915
  Consensus
  Variant (2)..(4): Xaa in position 2 to 4 is any amino acid
  Variant (5)..(9): Xaa in position 5 to 9 is any or no amino acid
  Variant (11)..(26): Xaa in position 11 to 26 is any or no amino acid
  Variant (28)..(28): Xaa in position 28 is any amino acid
  Variant (31)..(41): Xaa in position 31 to 41 is any amino acid
  Variant (42)..(92): Xaa in position 42 to 92 is any or no amino acid
  Variant (94)..(94): Xaa in position 94 is any or no amino acid
  Variant (97)..(97): Xaa in position 97 is any amino acid
  Variant (98)..(101): Xaa in position 98 to 101 is any or no amino acid
  Variant (103)..(106): Xaa in position 103 to 106 is any amino acid
  Variant (108)..(109): Xaa in position 108 to 109 is any amino acid
  Variant (110)..(112): Xaa in position 110 to 112 is any or no amino acid
  Variant (114)..(119): Xaa in position 114 to 119 is any amino acid
  Variant (120)..(152): Xaa in position 120 to 152 is any or no amino acid
  Variant (154)..(154): Xaa in position 154 is any amino acid
  Variant (156)..(159): Xaa in position 156 to 159 is any amino acid
  Variant (163)..(166): Xaa in position 163 to 166 is any or no amino acid
  Variant (168)..(169): Xaa in position 168 to 169 is any or no amino acid
  Variant (172)..(172): Xaa in position 172 is any or no amino acid
  Variant (175)..(177): Xaa in position 175 to 177 is any or no amino acid
  Variant (188)..(188): Xaa in position 188 is any amino acid
  Variant (191)..(193): Xaa in position 191 to 193 is any amino acid
  Variant (195)..(196): Xaa in position 195 to 196 is any amino acid
  Variant (198)..(198): Xaa in position 198 is any amino acid
  Variant (200)..(200): Xaa in position 200 is any amino acid

SEQ ID NO: 52061 - protein, 12 aa, Artificial sequence
  Consensus
  Variant (2)..(2): Xaa in position 2 is any or no amino acid
  Variant (4)..(5): Xaa in position 4 to 5 is any amino acid
  Variant (6)..(6): Xaa in position 6 is Ala, Cys, Thr or Val
  Variant (7)..(7): Xaa in position 7 is any amino acid
  Variant (8)..(8): Xaa in position 8 is Phe, Ile, Leu, Met or Val
  Variant (9)..(11): Xaa in position 9 to 11 is any amino acid
  Variant (12)..(12): Xaa in position 12 is Ala, Cys, Asp, Gly, Asn, Ser, Thr or Val
IXGXXXXXXXXX

SEQ ID NO: 52062 - protein, 43 aa, Artificial sequence; identical to SEQ ID NO: 15917
  Consensus
  Variant (2)..(2): Xaa in position 2 is any amino acid
  Variant (3)..(4): Xaa in position 3 to 4 is any or no amino acid
  Variant (6)..(10): Xaa in position 6 to 10 is any amino acid
  Variant (11)..(12): Xaa in position 11 to 12 is any or no amino acid
  Variant (14)..(14): Xaa in position 14 is Ala, Ile or Val
  Variant (15)..(15): Xaa in position 15 is any amino acid
  Variant (16)..(16): Xaa in position 16 is Ile, Leu or Val
  Variant (17)..(17): Xaa in position 17 is Asp, Gly or Thr
  Variant (18)..(19): Xaa in position 18 to 19 is any amino acid
  Variant (20)..(20): Xaa in position 20 is Ala, Cys, Gly, Ser, Thr or Val
  Variant (21)..(21): Xaa in position 21 is any amino acid
  Variant (22)..(22): Xaa in position 22 is Ala, Ile, Leu or Val
  Variant (23)..(23): Xaa in position 23 is Ala, Gly or Ser
  Variant (24)..(25): Xaa in position 24 to 25 is any amino acid
  Variant (26)..(26): Xaa in position 26 is Ala, Cys, Ser or Thr
  Variant (27)..(27): Xaa in position 27 is any amino acid
  Variant (28)..(28): Xaa in position 28 is Ala, Ile or Val
  Variant (29)..(31): Xaa in position 29 to 31 is any amino acid
  Variant (32)..(32): Xaa in position 32 is Phe, Ile, Leu, Met or Val
  Variant (33)..(39): Xaa in position 33 to 39 is any amino acid
  Variant (41)..(41): Xaa in position 41 is any amino acid
  Variant (43)..(43): Xaa in position 43 is Ala, Cys or Gly

SEQ ID NO: 52063 - DNA, 510 bp, Escherichia coli
  CDS (1)..(510)
atgtcttcccgcaataatccggcgcgtgtcgccatcgtgatggggtccaaaagcgactgggctaccatgcagttcgccgccgaaatcttcgaaatcctgaatgtcccgcaccacgttgaagtggtttctgctcaccgcacccccgataaactattcagcttcgccgaaagtgccgaagagaacggttatcaggtgattattgcgggcgcaggcggcgcagcgcacctgccaggcatgattgccgccaaaacgctggtgccagtgctgggcgtgccagtacagagcgccgcactgagcggtgtcgatagcctctactccatcgtacaaatgccacgcggcattccggtgggtacgctggcgattggtaaagctggcgcggcaaacgcggcattactggcagcacaaattcttgcgactcatgataaagaactgcaccagcgtctgaatgactggcgcaaagcacaaactgatgaagtgctggaaaacccggacccgcgaggtgcggcatga

SEQ ID NO: 52064 - protein, 169 aa, Escherichia coli
MSSRNNPARVAIVMGSKSDWATMQFAAEIFEILNVPHHVEVVSAHRTPDKLFSFAESAEENGYQVIIAGAGGAAHLPGMIAAKTLVPVLGVPVQSAALSGVDSLYSIVQMPRGIPVGTLAIGKAGAANAALLAAQILATHDKELHQRLNDWRKAQTDEVLENPDPRGAA

SEQ ID NO: 52065 - DNA, 498 bp, Mesorhizobium loti MAFF303099
  CDS (1)..(498): transl_table=11
ttgaacgatcaacgcgccgacgtcgccatcatcatgggcagccagtccgactgggcgacgatgcgccaggcggccgaaacgctggaggcgctgggcgtcccgcacaaacggctgatcatctcggcgcatcgcacgcccgaccggctctatgaattcgccaagggcgcaaaggccgccggctacaaggtgatcatcgccggcgccggcggtgccgcgcacctgcccggcatgacggcggcgatgacgccgctgccggtgttcggcgtgccggtggaatcgaaggcgctgtcggggcaggattcgctgctctccatcgtccagatgccagccggcattcctgtcgggacattggccatcggcaaggcgggtgcggccaatgcggccctgttggcagccgccgtgctggcgctcaacgacgacaagcttgcccagcgcctcgacgcctggcgcgcctcgcagaccgccaaggtcgccgacgaaccgacggacacgccgtga

SEQ ID NO: 52066 - protein, 165 aa, Mesorhizobium loti MAFF303099
MNDQRADVAIIMGSQSDWATMRQAAETLEALGVPHKRLIISAHRTPDRLYEFAKGAKAAGYKVIIAGAGGAAHLPGMTAAMTPLPVFGVPVESKALSGQDSLLSIVQMPAGIPVGTLAIGKAGAANAALLAAAVLALNDDKLAQRLDAWRASQTAKVADEPTDTP

SEQ ID NO: 52067 - DNA, 471 bp, Thermoplasma volcanium GSS1
  CDS (1)..(471): transl_table=11
atgccaaaggttgcagtaatcatggggagttcaagcgattacgaagtaatgaaagccgccatagatacactcaacgagttcggtgtagatgtaatctcgaaagtggtctctgcacataggactccagagtttatgatgcagtttgcaaaggaggcagcttcctctggaatagaagctataatagctggagcaggcggagctgcacacctgcctggcatggttgctgcgatgactccattgccggtgattggagtgccagttcctacgaaaaacctaggagggatggattccctgctatcaatagtgcaaatgccttctggtgtgccagtagctactgttgctattggcaattcgaagaatgcagctctgttggcaattcgaatactgtcaataaaatatcccgatcttatggccaaaatgtctgaatttatggaatctgaaaaacagcgggttcttcaagaaaagatctga

SEQ ID NO: 52068 - protein, 156 aa, Thermoplasma volcanium GSS1
MPKVAVIMGSSSDYEVMKAAIDTLNEFGVDVISKVVSAHRTPEFMMQFAKEAASSGIEAIIAGAGGAAHLPGMVAAMTPLPVIGVPVPTKNLGGMDSLLSIVQMPSGVPVATVAIGNSKNAALLAIRILSIKYPDLMAKMSEFMESEKQRVLQEKI

SEQ ID NO: 52069 - DNA, 489 bp, Arabidopsis thaliana
  CDS (1)..(489)
atgggttcagacacggatcttcttgttatgaaggatgctgccaaaattctggacatgtttggtgtcacacatgaggtaaagatagtttctgctcatcgcaccccagagatgatgtatacatatgcaacctcagctcatagtcgaggcgttcaagtcatcattgcaggtgctggtggtgctgctcacttaccaggtatggttgcttcactcactcctttgcctgtgattggtgtccctgtccaagctacccgtttggatggagttgattcacttctctccatcgttcagatgcctagaggtgttcctgttgcgacagttgcaataaacaatgcgaccaacgcagccttgcttgcagtccggatgttgggaatctctgataatgatcttgtctcaaggatgagacagtaccaagaagacatgagagatgagaacctgaataaaggagagaaacttgagacacaaggttgggaatcatatttgaaccagtga

SEQ ID NO: 52070 - protein, 162 aa, Arabidopsis thaliana
MGSDTDLLVMKDAAKILDMFGVTHEVKIVSAHRTPEMMYTYATSAHSRGVQVIIAGAGGAAHLPGMVASLTPLPVIGVPVQATRLDGVDSLLSIVQMPRGVPVATVAINNATNAALLAVRMLGISDNDLVSRMRQYQEDMRDENLNKGEKLETQGWESYLNQ

SEQ ID NO: 52071 - DNA, 1929 bp, Arabidopsis thaliana
  CDS (1)..(1929)
atgttgcttttgaaacaaagctcagctgctgttcttgtcgttggaaatacaactccagtccttcacacttctcgctccacctacagagttggaccttttccagtgaccagaacgcagtcgttccagagtttgactatggcaaatttgcagaagcttcccacttcttcgtctgggaaattgaatacggcttcagctgtgccctgtagctctcacgatgcttctcctatcagtgagaatcgcgagaataaacatgtccatggagtttctgagaaaattgtgggagttcttgggggtggacaattgggtcgtatgctttgccaagctgcttctcagttggctatcaaagtgatgattttagatccttctaaaaattgttcagcaagtgcattgtcctacggtcacatggttgatagctttgacgacagtgctacagtagaagaatttgcaaaaagatgtggagtcttaactgtagaaattgaacatgttgacgtggacacactagagaagcttgagaaacaaggagtggattgccaacccaaagcttctactattaggataatacaggataaatacatgcaaaaggttcatttctctcagcatggcatcccacttccagaatttatggagataagcgatattgaaggagcaagaaaagcaggtgaacttttcggttaccctcttatgatcaagagcaaacgattggcttatgatggacgtggaaatgcagttgccaacaaccaagatgagctttcttctgctgtaacggctcttggaggtttcagtcgtggtttgtatattgagaaatgggcaccttttgttaaggagttagctgttattgtggctagggggagagatggttctatggtttgttatcccgttgttgaaaccattcacagggataacatatgccatatagttaaagcacctgcagatgtgccttggaagattaacaaacttgccaccgatgttgcccaaaaggctgtcggttctttagaaggtgctggtgtttttgcagttgaactgttcttgacagaggatagtcagattctgctaaacgaagttgcacctagaccacacaacagtggccatcaaacgatcgagtgctgttatacttcacagtttgaacaacacttgcgagctgtggttggtcttccacttggtgatccgtcaatgagaactccggcgtccattatgtacaatattctgggagaagatgatggagaagcaggtttcaaattggctcatcggcttattgcaagggctctgtgtattccaggtgcatctgttcattggtatgacaagccagaaatgagaaagcagagaaagatgggtcacatcactcttgttgggcagtctatgggcattttggaacaaaggttacaatgcatattaagtgagcaaagccaccaagtacacgagacacctcgtgttgctatcatcatgggttcagacacggatcttcctgttatgaaggatgctgccaaaattctggacctgtttggtgtgacacatgaggtaaagatagtttctgctcatcgcaccccagagatgatgtatacatatgcaacctcagctcatagtcgaggcgttcaagtcattattgcaggtgctggtggtgctgctcacttaccaggtatggttgcttcactcactcctttgcctgtgattggtgtccctgtccgtgctacccgtttggatggagttgattcacttctttccatcgttcagatgcctagaggtgttcctgttgcgacagttgcaataaacaatgcgaccaacgcagccttgcttgcagttcggatgttgggaatctctgatacggatcttgtctcaaggatgaggcagtaccaggaagacatgagagatgagaacctgaataaaggagagaaactggagacagaaggttgggaatcatatttgaaccagtga

SEQ ID NO: 52072 - protein, 642 aa, Arabidopsis thaliana
MLLLKQSSAAVLVVGNTTPVLHTSRSTYRVGPFPVTRTQSFQSLTMANLQKLPTSSSGKLNTASAVPCSSHDASPISENRENKHVHGVSEKIVGVLGGGQLGRMLCQAASQLAIKVMILDPSKNCSASALSYGHMVDSFDDSATVEEFAKRCGVLTVEIEHVDVDTLEKLEKQGVDCQPKASTIRIIQDKYMQKVHFSQHGIPLPEFMEISDIEGARKAGELFGYPLMIKSKRLAYDGRGNAVANNQDELSSAVTALGGFSRGLYIEKWAPFVKELAVIVARGRDGSMVCYPVVETIHRDNICHIVKAPADVPWKINKLATDVAQKAVGSLEGAGVFAVELFLTEDSQILLNEVAPRPHNSGHQTIECCYTSQFEQHLRAVVGLPLGDPSMRTPASIMYNILGEDDGEAGFKLAHRLIARALCIPGASVHWYDKPEMRKQRKMGHITLVGQSMGILEQRLQCILSEQSHQVHETPRVAIIMGSDTDLPVMKDAAKILDLFGVTHEVKIVSAHRTPEMMYTYATSAHSRGVQVIIAGAGGAAHLPGMVASLTPLPVIGVPVRATRLDGVDSLLSIVQMPRGVPVATVAINNATNAALLAVRMLGISDTDLVSRMRQYQEDMRDENLNKGEKLETEGWESYLNQ

SEQ ID NO: 52073 - DNA, 486 bp, Bacillus halodurans C-125
  CDS (1)..(486): transl_table=11
atggagccagtcgttggcgtcatcatgggaagtacatccgattgggagacgatgcagcacgcatgtgaaatactcgaagaattagaggtaccgtacgaaaaaaaagtcgtgtcagcccaccgtacacctgatttaatgtttcaatatgcagaaaccgcacaggaacgcgggttgaaggtgattatcgcaggtgctggaggagctgctcatcttccagggatggtagcggccaaaacggtcgttcctgtcattggggtgccggttcaatcaaaggcactgaacgggcttgactcattactttcaatcgtacaaatgccgggcggtgttccggttgcgaccgttgcgattggaaaagctggagccacaaacgcggggctactggcggcgcaaatgatcggtgcctttgatcatcaagtggctgagcgagttcgcctgcgccgtgaaaaagtggaacaagctgtgctggaaagtagtgaatcgctatga

SEQ ID NO: 52074 - protein, 161 aa, Bacillus halodurans C-125
MEPVVGVIMGSTSDWETMQHACEILEELEVPYEKKVVSAHRTPDLMFQYAETAQERGLKVIIAGAGGAAHLPGMVAAKTVVPVIGVPVQSKALNGLDSLLSIVQMPGGVPVATVAIGKAGATNAGLLAAQMIGAFDHQVAERVRLRREKVEQAVLESSESL

SEQ ID NO: 52075 - DNA, 501 bp, Pasteurella multocida subsp. multocida str. Pm70
  CDS (1)..(501): transl_table=11
atgtcaaattgcacacctcaaattgcgattgtaatgggctcaaaaagtgactgggcaaccatgcaagaagcaacccatattcttgatgaattacaaattccttaccacgttgaagtggtgtctgcacatcgtaccccagataaattatttacctttgcagaaacagcgagtgcgaaaggttacaaagtgattattgcaggtgccggcggtgctgcccatttaccgggtatgatcgcgtcaaaaactttagtccctgtattgggcgtaccggtcaaaagttcgatgttaagtggcgttgatagtttgtattcgattgtgcaaatgcctaaggggattcctgtcggaaccttagcgattggtcctgcaggagcggctaatgcaggcttattagcagctcaaatcttagcagcctttgacacttcgctcctgacaagattgacggcatttcgagaaaagcaaacaaatagcgtactagaaaatccagatccacggatgccatag

SEQ ID NO: 52076 - protein, 166 aa, Pasteurella multocida subsp. multocida str. Pm70
MSNCTPQIAIVMGSKSDWATMQEATHILDELQIPYHVEVVSAHRTPDKLFTFAETASAKGYKVIIAGAGGAAHLPGMIASKTLVPVLGVPVKSSMLSGVDSLYSIVQMPKGIPVGTLAIGPAGAANAGLLAAQILAAFDTSLLTRLTAFREKQTNSVLENPDPRMP

SEQ ID NO: 52077 - DNA, 486 bp, Lactococcus lactis subsp. lactis Il1403
  CDS (1)..(486): transl_table=11
atggcagaagtagcaattatcatgggttcgagctcagattgggcgacaatgaaagaaacagcaaaaattttagatgactttggtttagcttatgaaaaaaaggtcgtatcagcacaccgaacaccagctttgatggctgaattttcgagccaagcccgtgaggcaggttataaagttatcatcgcaggtgctggtggagccgctcatttgccaggaatggtatctgctcagactctcgttccagtcattggcgttccaataaaatcacgcgctttatctggtctggattcactttattcaattgttcaaatgccggcaggggttcctgtagcgacaatggcaattggagaggctggagcaaaaaatgctgctttatttgctttgcaacttttggcgaatacaaacgagaatttataccaaaaattgttggtctatcgggctgctgcgcaagaaatggttgaggaatcaaacaaagcattactttaa

SEQ ID NO: 52078 - protein, 161 aa, Lactococcus lactis subsp. lactis Il1403
MAEVAIIMGSSSDWATMKETAKILDDFGLAYEKKVVSAHRTPALMAEFSSQAREAGYKVIIAGAGGAAHLPGMVSAQTLVPVIGVPIKSRALSGLDSLYSIVQMPAGVPVATMAIGEAGAKNAALFALQLLANTNENLYQKLLVYRAAAQEMVEESNKALL

SEQ ID NO: 52079 - DNA, 492 bp, Streptococcus pyogenes M1 GAS
  CDS (1)..(492): transl_table=11
atgaaaactccaattatttctattatcatgggctccaaatctgactgggcaaccatgcaaaaaacggctgaagttctagacaactttggcattgcttacgagaagaaagtcgtctctgcccaccgtacgccagacctcatgttcaagcatgctgaggaagcacgtggtcgtggcatcaaaatcatcatcgcaggagcaggtggggcagctcacttgcctggtatggtggcagctaaaacaacgctgcctgttatcggtgtgcctgtcaaatcacgtgccctttcaggtttggattcgctatattccattgtgcagatgcctggcggtgtgcctgtggcaaccatggctatcggagaagcgggagcgactaacgctgccctgacagccctccgtatcctctctatcgaggaccaaaatctggctgatgcgctagctcatttccatgaggaacaaggaaaaatcgcagaggagtcaagtggtgaactcatttaa

SEQ ID NO: 52080 - protein, 163 aa, Streptococcus pyogenes M1 GAS
MKTPIISIIMGSKSDWATMQKTAEVLDNFGIAYEKKVVSAHRTPDLMFKHAEEARGRGIKIIIAGAGGAAHLPGMVAAKTTLPVIGVPVKSRALSGLDSLYSIVQMPGGVPVATMAIGEAGATNAALTALRILSIEDQNLADALAHFHEEQGKIAEESSGELI

SEQ ID NO: 52081 - DNA, 486 bp, Neisseria meningitidis MC58
  CDS (1)..(486): transl_table=11
atgatacaaatcggcatcatcatgggcagcaacagcgattggcccgttatgcggcaggcagcgcagtttcttgaagagttcggcgtagaatatgaggcgcgcgttgtttccgcacaccgcaccccggatttgatgttccaatacgccgaaaccgcacgggcgcgcggcatcaaagccatcatcgcgggtgcgggcggcgcggcgcatttacccggtatggttgccgccaagaccaccgtccccgttttgggcgtacccgtccccagcaaatacctgcgcggcgaagattcgcttttatcgattgtacaaatgcccaaaggcgtacccgtcgccacattcgccatcggcgaggcaggcgcggcaaatgccgcattgttcgccgtttccatgctcgccaacgaaacccccgaactggcgcaaaaactggcagacttccgagccaaacaggaacaggctgttttgaatatggaattggaacaaatttaa

SEQ ID NO: 52082 - protein, 161 aa, Neisseria meningitidis MC58
MIQIGIIMGSNSDWPVMRQAAQFLEEFGVEYEARVVSAHRTPDLMFQYAETARARGIKAIIAGAGGAAHLPGMVAAKTTVPVLGVPVPSKYLRGEDSLLSIVQMPKGVPVATFAIGEAGAANAALFAVSMLANETPELAQKLADFRAKQEQAVLNMELEQI

SEQ ID NO: 52083 - DNA, 1017 bp, Methanothermobacter thermautotrophicus str. Delta H
  CDS (1)..(1017): transl_table=11
gtgaatctccagatgaagcccagagtgatgatactccttggaagtgcatctgatttcaggatagccgaaaaggcaatggaaatctttgaggaactcaggataccctatgacctgagggttgcctcagcccacaggacacatgaaaaggtaaaggcaatagtctcagaggccgtgaaggcgggtgttgaggtattcataggaatagcaggactatcagcccatcttccaggcatgatatctgcaaacacccacagacccgtcataggggtccctgttgacgttaaacttggagggctcgacgccctctttgcatgttcacagatgcccttccctgcccccgtcgccactgtgggggtagacaggggagaaaacgccgcaatactcgctgcccagataatagggataggagatcccggggtaagggaaagggttgcagatctaaggagaggtttctatgaacgcgtgcggagagatgaatgtcaggtgctcaacagcatagaggggtcctactatgcacccctggaggttgaaatgcctcccattggtgataaggtcccgtcagattcccaggatgaccccatggtatctgtgatacctggcagctactctgacatgaagatagccaagaagaccaccatgttcctcgaaaggatgggtataagctatgatctgaacgtcatatcacccataaggtaccctgaaagatttgagaggtaccttgagaagatggagaacgtgaagctcttcatagccataagcggcctctctgcacatgttacgggtgctgttgttgccctcagcgacaggccggtgataggggttccctgccccctcaagatgaacggctgggactcactcctctcaatgatcaacatgccgccgggtgtacctgttggaacggtgggggtaggtaacggtggtaacgccgcaatactggctgctgaaatgcttggaatatacgatgaaaagatagaatcgaggataaagaggataaagagccgttccgttaagttctaa

SEQ ID NO: 52084 - protein, 338 aa, Methanothermobacter thermautotrophicus str. Delta H
MNLQMKPRVMILLGSASDFRIAEKAMEIFEELRIPYDLRVASAHRTHEKVKAIVSEAVKAGVEVFIGIAGLSAHLPGMISANTHRPVIGVPVDVKLGGLDALFACSQMPFPAPVATVGVDRGENAAILAAQIIGIGDPGVRERVADLRRGFYERVRRDECQVLNSIEGSYYAPLEVEMPPIGDKVPSDSQDDPMVSVIPGSYSDMKIAKKTTMFLERMGISYDLNVISPIRYPERFERYLEKMENVKLFIAISGLSAHVTGAVVALSDRPVIGVPCPLKMNGWDSLLSMINMPPGVPVGTVGVGNGGNAAILAAEMLGIYDEKIESRIKRIKSRSVKF

SEQ ID NO: 52085 - DNA, 612 bp, Halobacterium sp. NRC-1
  CDS (1)..(612): transl_table=11
atgacaaccgtctcagacctcatcgacctgttcgagaccgaagcagcagccgaccatccgcccgacgaaacgcccgacgtcggcgtcatcatgggcagcgacagcgacctggacgtgatggcgggcgcacacgacgcgctcaccgacctcgggttcaccgagctcaccgactacgacgacccgccgaccggatacacgttcgaatcctgggtcgtctccgcccaccggacgccgacactcatggacgcgtacgcgcgcacagccgccgcccggggactggacgtcatcatcgccggcgcgggcgggaaatcagccgacctcccgaacatgaccgcgtcgctcgcctaccccattccggtcgttggggtgcccgtccaggagaaatccgtgccatcagtgatcggcatgccgaccggcgcgccgatcacggccgtcgacgccgggaaatcctacaacgccggcctcgctgccgcccagttcctcgccaccgacgaccccacgctcgccgaccgactgcgcgacctccaggccgcccgccaggagggggtcgccgatgtctccgcgcgcctccacagccagggaaccgacagccttcgcagcccccagaactaa

SEQ ID NO: 52086 - protein, 203 aa, Halobacterium sp. NRC-1
MTTVSDLIDLFETEAAADHPPDETPDVGVIMGSDSDLDVMAGAHDALTDLGFTELTDYDDPPTGYTFESWVVSAHRTPTLMDAYARTAAARGLDVIIAGAGGKSADLPNMTASLAYPIPVVGVPVQEKSVPSVIGMPTGAPITAVDAGKSYNAGLAAAQFLATDDPTLADRLRDLQAARQEGVADVSARLHSQGTDSLRSPQN

SEQ ID NO: 52087 - DNA, 495 bp, Campylobacter jejuni subsp. jejuni NCTC 11168
  CDS (1)..(495): transl_table=11
atgaattttgtttctattttaatgggaagcaagagtgattatgagactatgaaagaggctgctaaaactttagaaagttttggtgtaaagtatgaacttatcatctcatcagctcatcgtagtccaaaaagaacaaaagagtatattgcaaatgctgaagaaaaaggtgtgaaggtttttatagcagcagctggaatggcagcgcatttagctggagctgttgcagcttatacaacaaaacctgttttaggagtgcctatgtcaggaagcaatcttgcaagtatggattctttgttttctacggtgcaaatgcctagtggaattcctgtaggaactttagctattggtaaggctggagcaatcaatgctgcttatttggctatgcaaattttagctatttatgatgttgatttagcacaaaagcttaaagaagatcgtcttgaaaaagaaaaaaaacttgtatctgattcaaaagaagtagaagttttattataa

SEQ ID NO: 52088 - protein, 164 aa, Campylobacter jejuni subsp. jejuni NCTC 11168
MNFVSILMGSKSDYETMKEAAKTLESFGVKYELIISSAHRSPKRTKEYIANAEEKGVKVFIAAAGMAAHLAGAVAAYTTKPVLGVPMSGSNLASMDSLFSTVQMPSGIPVGTLAIGKAGAINAAYLAMQILAIYDVDLAQKLKEDRLEKEKKLVSDSKEVEVLL

SEQ ID NO: 52089 - DNA, 486 bp, Neisseria meningitidis Z2491
  CDS (1)..(486): transl_table=11
atgatacaaatcggcatcatcatgggcagcaacagcgattggcccgttatgcggcaggcagcgcagtttcttgaagagttcggcgtagaatatgaggcgcgcgttgtttccgcacaccgcaccccggatttgatgttccaatacgccgaaaccgcacgggcgcgcggcatcaaagccatcatcgcgggtgcgggcggcgcggcgcatttacccggtatggttgccgccaagaccaccgtccccgttttgggcgtacccgtccccagcaaatacctgcgcggcgaagattcgcttttatcgattgtacaaatgcccaaaggcgtacccgtcgccacattcgccatcggcgaggcaggcgcggcaaatgccgcattgttcgccgtttccatgctcgccaacgaaacccccgaactggcgcaaaaactggcagacttccgagccaaacaggaacaggctgttttgagtatggaattggaacagatttaa

SEQ ID NO: 52090 - protein, 161 aa, Neisseria meningitidis Z2491
MIQIGIIMGSNSDWPVMRQAAQFLEEFGVEYEARVVSAHRTPDLMFQYAETARARGIKAIIAGAGGAAHLPGMVAAKTTVPVLGVPVPSKYLRGEDSLLSIVQMPKGVPVATFAIGEAGAANAALFAVSMLANETPELAQKLADFRAKQEQAVLSMELEQI

SEQ ID NO: 52091 - DNA, 534 bp, Deinococcus radiodurans R1
  CDS (1)..(534): transl_table=11
atgagtgatctttctgctgactcggcgtccccccgcgtcggcgtggtgatgggcagccgcagcgactccgagacgatgcagggcgccttggacctcctgtcgcagcttgagattccctacgaggtgcgcgtgctctcggcccaccgtacgccggggctactgtcgacctacgcggcccgcgccgagcggctgggactcgcctgcatcattgccggggcggggggggccgcgcacctgccagggatgctggcggcctttacgcgggtgccggtgctcggcgtgccggtgcagtcgcgggccctcagcggtcaggacagcttgctgagcatcgtgcagatgcctgccggtgtccccgtcgccaccttcgccatcggacaggcgggggccaaaaacgctgcgctctttgccgccgccctgctcgccaccactgatgcgggggtgcggacccggctggaggccttccgcgctgctcaaactcaagccgtgctggatgacccctatttcgacggtcatccccaggcgggcaccgaatga

SEQ ID NO: 52092 - protein, 177 aa, Deinococcus radiodurans R1
MSDLSADSASPRVGVVMGSRSDSETMQGALDLLSQLEIPYEVRVLSAHRTPGLLSTYAARAERLGLACIIAGAGGAAHLPGMLAAFTRVPVLGVPVQSRALSGQDSLLSIVQMPAGVPVATFAIGQAGAKNAALFAAALLATTDAGVRTRLEAFRAAQTQAVLDDPYFDGHPQAGTE

SEQ ID NO: 52093 - DNA, 504 bp, Xylella fastidiosa 9a5c
  CDS (1)..(504): transl_table=11
atgatctccaatcaatcccccctgctggtcggtattgtcatgggttcctcttcggattggggagcgatgcagcacgccgcacaaaagcttgatgctctcggcgttgcgtatgaagtgaaggtcgtttcggcgcatcgtactccggataaattgtttgcttatgcggagcaggctgaagggcgtggtttgcgtgccatcattgctggggccggtggcgcagcgcaccttccaggtatgttggctgctaagacgatggtgccagtgttgggggtaccaatgcagtccaaggctctgaatggtttggattcgctgttatcgatcgtacagatgccggcgggtattccagtagccacgttcgcgattggggaagctggtgcagtcaatgccgccctgtttgccgcagcgctgttggtacccgaaaatccagcaatgcgtcggatgctgactgagttccgccaacgtcagacggatgaggtgaatgctgcggacgatccacgccaatga

SEQ ID NO: 52094 - protein, 167 aa, Xylella fastidiosa 9a5c
MISNQSPLLVGIVMGSSSDWGAMQHAAQKLDALGVAYEVKVVSAHRTPDKLFAYAEQAEGRGLRAIIAGAGGAAHLPGMLAAKTMVPVLGVPMQSKALNGLDSLLSIVQMPAGIPVATFAIGEAGAVNAALFAAALLVPENPAMRRMLTEFRQRQTDEVNAADDPRQ

SEQ ID NO: 52095 - DNA, 489 bp, Streptococcus pneumoniae TIGR4
  CDS (1)..(489): transl_table=11
atgaaaccagtaatttccatcatcatgggctcaaaatccgactgggcaaccatgcaaaaaacagcagaagtcctagaccgcttcggtgtagcctacgaaaagaaagttgtttccgcacaccgtacaccagacctcatgttcaaacatgcagaagaagcccgtagtcgtggcatcaagatcatcatcgcaggtgctggtggcgcagcgcatttgccaggcatggtagctgccaaaacaacccttccagtcattggtgtgccagtcaagtctcgtgctcttagtggagtggattcactctattctatcgttcagatgccgggtggggtgcctgttgcgaccatggctatcggtgaagctggagcgactaacgcagctctctttgccctccgtctcctctctgtagaagataagtccattgcggatgcacttgccaactttgctgaagaacaaggaaaaatcgcagaggagtcgtcaaatgagctcatctaa

SEQ ID NO: 52096 - protein, 162 aa, Streptococcus pneumoniae TIGR4
MKPVISIIMGSKSDWATMQKTAEVLDRFGVAYEKKVVSAHRTPDLMFKHAEEARSRGIKIIIAGAGGAAHLPGMVAAKTTLPVIGVPVKSRALSGVDSLYSIVQMPGGVPVATMAIGEAGATNAALFALRLLSVEDKSIADALANFAEEQGKIAEESSNELI

SEQ ID NO: 52097 - DNA, 480 bp, Clostridium acetobutylicum ATCC 824
  CDS (1)..(480): transl_table=11
atgaaagttgctattatatttggaagcaaatcagacactgaaaaaatgaagggtgcagctactgcgcttaaagaatttggagttgaatacaaagcttatgtattatcggctcacagagtaccagaaaaattaagtgaagttattaagagccttgaaaatgatggatttgaatgcataattgcaggtgctggtctagcagctcaccttccaggagttatagcttctcaaactacacttccagttataggagttcctataaatgcggcaattgacggacttgattctttgttttcaatagttcaaatgcccaaaaacataccggttgcaaccgtaggtatcaacaatagttataatgcaggaatgcttgcagcccaaatactttcgattaaatatcctgaaattaaagaaaagcttgttaaattcagacaagaaatgaaagagaattttataaaggataatgaagaaggagtgcaattataa

SEQ ID NO: 52098 - protein, 159 aa, Clostridium acetobutylicum ATCC 824
MKVAIIFGSKSDTEKMKGAATALKEFGVEYKAYVLSAHRVPEKLSEVIKSLENDGFECIIAGAGLAAHLPGVIASQTTLPVIGVPINAAIDGLDSLFSIVQMPKNIPVATVGINNSYNAGMLAAQILSIKYPEIKEKLVKFRQEMKENFIKDNEEGVQL

SEQ ID NO: 52099 - DNA, 522 bp, Streptococcus pneumoniae R6
  CDS (1)..(522): transl_table=11
gtgattgttgaaaaagaggaaaaaggagaagaaatgaaaccagtaatttccatcatcatgggctcaaaatccgactgggcaaccatgcaaaaaacagcagaagtcctagaccgcttcggtgtagcctacgaaaagaaagttgtttccgcacaccgtacaccagacctcatgttcaaacatgcagaagaagcccgtagtcgtggcatcaagatcatcatcgcaggtgctggtggcgcagcgcatttgccaggcatggtagctgccaaaacaacccttccagtcattggtgtgccagtcaagtctcgtgctcttagtggagtggattcactctattctatcgttcagatgccgggtggggtgcctgttgcgaccatggctatcggtgaagctggagcgactaacgcagctctctttgccctccgtctcctctctgtagaagataagtccattgcggatgcacttgccaactttgctgaagaacaaggaaaaatcgcagaggagtcgtcaaatgagctcatctaa

SEQ ID NO: 52100 - protein, 173 aa, Streptococcus pneumoniae R6
MIVEKEEKGEEMKPVISIIMGSKSDWATMQKTAEVLDRFGVAYEKKVVSAHRTPDLMFKHAEEARSRGIKIIIAGAGGAAHLPGMVAAKTTLPVIGVPVKSRALSGVDSLYSIVQMPGGVPVATMAIGEAGATNAALFALRLLSVEDKSIADALANFAEEQGKIAEESSNELI

SEQ ID NO: 52101 - DNA, 474 bp, Sulfolobus tokodaii str. 7
  CDS (1)..(474): transl_table=11
atgcctaaagtagctgttattatgggtagtaaatcagactgggaatatatgaaagaagcagtagaacttttaaaacaatttggtgttgaagttgaggctagagtagtttcagcccacagaacaccagaatttatgatggaatttgctaaaaccgcatcagagaagggaatagaagttattatagctggtgcaggtggtgcggctcatttacctggtatgacagcatcattaactcatttgccagtaattggtgttccgattccttcaaagaatttgaatggcttagattctctcctctctattgttcaaatgccttatggtgtaccagtcgcgacagttgctattggtggggctaaaaatgctgcacttttggcattaagaattttaggactaaaatacccagatatagctgaaaaagttaaaaagtttatggaggatgtgaaaaatgaagtccttaacacaaaactcgattaa

SEQ ID NO: 52102 - protein, 157 aa, Sulfolobus tokodaii str. 7
MPKVAVIMGSKSDWEYMKEAVELLKQFGVEVEARVVSAHRTPEFMMEFAKTASEKGIEVIIAGAGGAAHLPGMTASLTHLPVIGVPIPSKNLNGLDSLLSIVQMPYGVPVATVAIGGAKNAALLALRILGLKYPDIAEKVKKFMEDVKNEVLNTKLD

SEQ ID NO: 52103 - DNA, 501 bp, Sinorhizobium meliloti 1021
  CDS (1)..(501): transl_table=11
gtgaccgatactacgcccccgcccgttgccatcatcatgggaagccagtcggactgggagacgatgaagaacgcggcagacacgctcgaggcgctcgacatcgcctacgaagcccggatcgtttccgcccatcgcacgcccgaccgcctggtccgcttcgccaagggcgcgcgcgacgaggggttccaggtgatcatcgccggcgcaggcggtgctgcgcatcttcccggcatgtgcgcggccatgacgccgcttccggtcttcggcgttccggtccagtcgaaagcgctttccggccaggacagcctgctgtcgatcgtgcagatgccggccggcattccggtcggcacgcttgcgatcggcaaggcgggggccatcaatgcggcacttctggccgccgccgtgctcgcgctcggtgacgaggatcttgccgaccgtctcgacgactggcgcgaacagcagaccgtatcggtcgcggaatatccggtagacgaggcatga

SEQ ID NO: 52104 - protein, 166 aa, Sinorhizobium meliloti 1021
MTDTTPPPVAIIMGSQSDWETMKNAADTLEALDIAYEARIVSAHRTPDRLVRFAKGARDEGFQVIIAGAGGAAHLPGMCAAMTPLPVFGVPVQSKALSGQDSLLSIVQMPAGIPVGTLAIGKAGAINAALLAAAVLALGDEDLADRLDDWREQQTVSVAEYPVDEA

SEQ ID NO: 52105 - DNA, 474 bp, Thermoplasma acidophilum DSM 1728
  CDS (1)..(474): transl_table=11
atgcctagggttgcggttataatgggcagttcaagcgactacgagaccatgaagcccgctgtggatttcctcagatccatgcacatagatgttgtgctcaagattgtctcagcgcacaggacacctgaatatatgtttcagttcgcgtccagcgccagagatcaaggcatagaggttataattgctggggcaggcggtgcagcgcatcttccgggtatggttgcatcgatgacaacgctgcctgttataggcgtccctgttccgagcaggaatttaaatgggctggattcgcttctttccatagtgcagatgccatccggaatacctgttgccacggtcgcgatagggaattcgaaaaatgccgccatactggcatgcaggatactctccataaagtatcctgagatcgagaaagccattaagaagtacatggatgacgagcgagacagggtgcttaacgaaaagcttgaatga

SEQ ID NO: 52106 - protein, 157 aa, Thermoplasma acidophilum DSM 1728
MPRVAVIMGSSSDYETMKPAVDFLRSMHIDVVLKIVSAHRTPEYMFQFASSARDQGIEVIIAGAGGAAHLPGMVASMTTLPVIGVPVPSRNLNGLDSLLSIVQMPSGIPVATVAIGNSKNAAILACRILSIKYPEIEKAIKKYMDDERDRVLNEKLE

SEQ ID NO: 52107 - DNA, 492 bp, Caulobacter crescentus CB15
  CDS (1)..(492): transl_table=11
atgccttcgaccacgcctcccgtcgctatcatcatgggcagccgctcggactggccgaccatgaagggcgccgccgacgcgctggacaatctgggcgtcgcctgggaggccaaggtggtctcggcgcaccggacgccccagcgcctgttcgacttcgcgacgggcgccgagaaggccggttacaaggtgatcatcgccggcgccggcggcgcggcgcacttgccgggcatggccgcctcgatgaccaacctgccggtgctgggcgtgccggtgcagtccaaggccctgtcgggcctcgatagcctgctttcgatcgtgcagatgccggggggcgttcctgtcgccaccctggcgatcggcgaggccggcgccaagaacgccggactgctcgcggcccagatcctggccctttccgatacagcgctggctggacgcctggcggccttccgcgccgcccaaaccgaaagcgtcgccgaaagcgtcgaggactga

SEQ ID NO: 52108 - protein, 163 aa, Caulobacter crescentus CB15
MPSTTPPVAIIMGSRSDWPTMKGAADALDNLGVAWEAKVVSAHRTPQRLFDFATGAEKAGYKVIIAGAGGAAHLPGMAASMTNLPVLGVPVQSKALSGLDSLLSIVQMPGGVPVATLAIGEAGAKNAGLLAAQILALSDTALAGRLAAFRAAQTESVAESVED

SEQ ID NO: 52109 - DNA, 489 bp, Listeria monocytogenes EGD-e
  CDS (1)..(489): transl_table=11
atgcctgctgtaattggtgtcattatggggagtacctcagattgggatacaatgaaaaaagcatgtgatgtattagatgaattagaaatagcttatgagaaaaaagtggtttctgctcatcgtacaccagatttaatgtttcaatatgcagaacaagcgcgggaacgtggtttgaaaattattattgctggtgctgggggcgcggcgcatttgccaggtatggttgcggcaaagacgactttgcctgttattggtgtgccaattaaatcaaaagcgttgaatggaatggattcattactttctattgtgcagatgcctggaggtgttccggtagcgacagttgctattggagaaagtggtgctgtaaatgctggacttctagccgcacaaattttatccataacagacgatgcaattactaacagattacaaaaaagacgtgctacactagaagaaacagttctagaaagtagtgattatcttggataa

SEQ ID NO: 52110 - protein, 162 aa, Listeria monocytogenes EGD-e
MPAVIGVIMGSTSDWDTMKKACDVLDELEIAYEKKVVSAHRTPDLMFQYAEQARERGLKIIIAGAGGAAHLPGMVAAKTTLPVIGVPIKSKALNGMDSLLSIVQMPGGVPVATVAIGESGAVNAGLLAAQILSITDDAITNRLQKRRATLEETVLESSDYLG

SEQ ID NO: 52111 - DNA, 489 bp, Listeria innocua Clip11262
  CDS (1)..(489): transl_table=11
atgcctgcggaaattggtgtcattatggggagtacctcagattgggatacaatgaaaaaagcatgtgatgtattggatgaacttgaaattgcttatgaaaaaaaagtcgtttctgctcatcgtacaccagatttaatgtttcaatatgcagaacaagcgcgggaacgtggtttgaaaattattattgcgggcgctggaggagcggcgcatttgccaggtatggttgctgctaaaacaactttgcctgttattggtgtgccaattaagtcaaaagcgttaagcggaatggattctctactgtccattgtacaaatgcctggtggtgttcctgttgctactgttgcaatcggtgaaagtggagcagtcaatgcgggtcttttagcggcgcaaattttatctattacaaacgatgcaattactaacagattacaaaaaagacgtgctacactagaagaaacagttctagaaagtagtgattctcttggataa

SEQ ID NO: 52112 - protein, 162 aa, Listeria innocua Clip11262
MPAEIGVIMGSTSDWDTMKKACDVLDELEIAYEKKVVSAHRTPDLMFQYAEQARERGLKIIIAGAGGAAHLPGMVAAKTTLPVIGVPIKSKALSGMDSLLSIVQMPGGVPVATVAIGESGAVNAGLLAAQILSITNDAITNRLQKRRATLEETVLESSDSLG

SEQ ID NO: 52113 - DNA, 528 bp, Nostoc sp. PCC 7120
  CDS (1)..(528): transl_table=11
atggctcccttggttggcattattatgggcagcgattcagatttgcccacaatgaaagaggcgatcgctatttgtgaggaatttggtgtagaaaatgaagtggcgatcgtttcagcccatcgcaccccagaacggatggtggaatatgcccaaacagcccatcatcggggtattaaggtgattattgctggtgctggtggtgccgcccatcttcccggcatggtagcatctttaactcctctaccagtgattggtgtgccagtcgctacacgaaacttacaaggtgtggattctttatattcaattgtacaaatgcctgggggtattcctgtggctacggtggcgatcggtaacgccaaaaatgctggactattagctgtgcaaatcctcgctactcaacagccagaattattaactaaagtccaagcataccgtcaaaacctatctgaatcagtaataacaaagcaagcaaagttagaacaactaggttacaagcagtatttggaacaggaaatatctggaaaatag

SEQ ID NO: 52114 - protein, 175 aa, Nostoc sp. PCC 7120
MAPLVGIIMGSDSDLPTMKEAIAICEEFGVENEVAIVSAHRTPERMVEYAQTAHHRGIKVIIAGAGGAAHLPGMVASLTPLPVIGVPVATRNLQGVDSLYSIVQMPGGIPVATVAIGNAKNAGLLAVQILATQQPELLTKVQAYRQNLSESVITKQAKLEQLGYKQYLEQEISGK

SEQ ID NO: 52115 - DNA, 510 bp, Ralstonia solanacearum GMI1000
  CDS (1)..(510): transl_table=11
atgaccgcatcgcaatccgcgccgctcgtcggcgtcgtcatgggttccagctccgactgggacgtcatgcagcacgccgtggtcctgctcaaggaattcgacattccgttcgaggcgcaggtggtctcggcgcaccgcatgccggacgacatgttccgctacgccgaggccgcacgcggccggggcctgcgcgccatcatcgccggtgccggcggcgcggcgcacctgccgggcatgatcgccgccaagaccatcgtgccggtgttcggcgtgccggtgccgtccaagtacctgcgcggcgaagactcgctgctgtccatcgtgcagatgcccaagggcattccggtggcgacctttgccatcggcgaggcgggcgcggccaacgcggcgctgtcggccatcgccatgctggcgaccaccgacgatgcgctggcggccaagctcgaagccttccgcgcccggcagaccgaagtggcgcgcggcatgacgctgcccgtgcacagtgcttaa

SEQ ID NO: 52116 - protein, 169 aa, Ralstonia solanacearum GMI1000
MTASQSAPLVGVVMGSSSDWDVMQHAVVLLKEFDIPFEAQVVSAHRMPDDMFRYAEAARGRGLRAIIAGAGGAAHLPGMIAAKTIVPVFGVPVPSKYLRGEDSLLSIVQMPKGIPVATFAIGEAGAANAALSAIAMLATTDDALAAKLEAFRARQTEVARGMTLPVHSA

SEQ ID NO: 52117 - DNA, 501 bp, Agrobacterium tumefaciens str. C58
  CDS (1)..(501): transl_table=11
gtgacagcagaaacgccccccgtcgccatcatcatgggcagccagtccgactgggaaaccatgaagaacgccgccgatacgctggatgcgctcgacgtggaatatgaagcccgcatcatttccgcccaccgcaccccggaccggctttatgactttgccaatggcgcaaaggacgagggtttcaaggtcattatcgccggtgcgggcggggccgcccacctgcccggcatgacggccgccatgacgccgcttccggtcttcggggttcctgtgcagtcgaagaccatgtccggtcaggacagcctctattccatcgtgcagatgcccgccggcattcccgtcggcacgcttgccatcggcaaggccggtgccatcaatgccgcccttctggccgctgcggtcctggcgctcagcgacgaggacctggccgaccggctggatgcctggcgtgcccgccagtcggctgccgtcgcggaatatccgatggacagcgcccagtga

SEQ ID NO: 52118 - protein, 166 aa, Agrobacterium tumefaciens str. C58
MTAETPPVAIIMGSQSDWETMKNAADTLDALDVEYEARIISAHRTPDRLYDFANGAKDEGFKVIIAGAGGAAHLPGMTAAMTPLPVFGVPVQSKTMSGQDSLYSIVQMPAGIPVGTLAIGKAGAINAALLAAAVLALSDEDLADRLDAWRARQSAAVAEYPMDSAQ

SEQ ID NO: 52119 - DNA, 543 bp, Brucella melitensis 16M
  CDS (1)..(543): transl_table=11
ttgtcttttcaagaccttcctcatgccaaccgaaaagccaagcaggaaagaccgatgagcgttgatgtcgccattatcatgggaagccagtccgattgggaaaccatgcaccatgcagccgacacattggaggcgctcggcatctccttcgacgcacggatcgtttccgcccatcgcacccctgacaggctggtcgccttcgccaagggggcgaaagcggaaggcttcaaggtcatcatcgcaggcgccggcggcgcggcccacctgcccggcatggccgctgccatgacaccgcttcccgtctttggcgttccagttcaatccaaggcgctttcgggccaggattcgctactctccatcgtacagatgccagcgggtattcccgtcggcactctcgccatcggccgtgcaggcgcggtcaatgccgcccttctcgccgccgccgttctggcgctatatgatgaagcacttgccgcccgtcttgatgaatggcgcaaggcgcagaccgaaagcgttgcagaacgcccctcgaacgaagcctga

SEQ ID NO: 52120 - protein, 180 aa, Brucella melitensis 16M
MSFQDLPHANRKAKQERPMSVDVAIIMGSQSDWETMHHAADTLEALGISFDARIVSAHRTPDRLVAFAKGAKAEGFKVIIAGAGGAAHLPGMAAAMTPLPVFGVPVQSKALSGQDSLLSIVQMPAGIPVGTLAIGRAGAVNAALLAAAVLALYDEALAARLDEWRKAQTESVAERPSNEA

SEQ ID NO: 52121 - DNA, 1278 bp, Rattus norvegicus
  CDS (1)..(1278)
atggcgacagctgaagtactgaacatcgggagaaagctgtatgagggtaaaacaaaggaagtctatgaattgttagacagtccaggaagagtcctcctgcagtccaaggaccagattacagcaggaaatgcagctagaaagaaccacctggaaggcaaagccgccatctccaataagatcaccagctgcatatttcagttgttacaggaagctggtataaaaactgctttcaccaagaaatgtggggagactgctttcattgcaccccagtgtgaaatgattccaattgagtgggtatgccgaagaatcgccactggatcttttctcaaaaggaaccctggtgtgaaggaggggtataggttttatccaccaaaagtagagatgttcttcaaggatgatgccaataacgacccacaatggtctgaggagcaactcatcgctgcaaaattttgttttgctggactcgttatagggcaaactgaagtggatatcatgagtcatgccacacaagctatttttgaaattctggagaaatcctggctgccccaaaactgtacgctggttgatatgaagattgagtttggcgttgatgtaaccaccaaagagattgttcttgctgatgtcatagataatgattcctggagactatggccatcaggagatcggagccagcagaaagacaaacagtcttatcgggatctcaaagaagtaactccggaaggactccagatggtaaagaagaactttgagtgggttgcagaccgagtggagttgcttctcaagtcaaacagtcagtgcagggtggtagtgctgatggggtcgacctctgaccttggtcactgtgaaaaaattaagaaggcttgtggaaactttgggattccatgtgaacttagagtaacatctgcacataaaggaccagatgaaactttgaggattaaagcagaatatgaaggggatggcatacctactgtatttgtcgcagtggcgggcaggagcaatggactgggcccagtgatgtctggtaatactgcatacccggttatcagctgtcccccaatcacagcagactggggtgctcaggatgtgtggtcatctctgcgactgcccagtggtattggctgttcaactatactttctccagaaggatcagcccagtttgctgctcagatatttgggttaaacaaccatttggtgtgggccaaacttcgagcgagcaaactgaacacgtggatatccttaaagcaggctgataagaaaatcagagagtgcaatttgtaa

SEQ ID NO: 52122 - protein, 425 aa, Rattus norvegicus
MATAEVLNIGRKLYEGKTKEVYELLDSPGRVLLQSKDQITAGNAARKNHLEGKAAISNKITSCIFQLLQEAGIKTAFTKKCGETAFIAPQCEMIPIEWVCRRIATGSFLKRNPGVKEGYRFYPPKVEMFFKDDANNDPQWSEEQLIAAKFCFAGLVIGQTEVDIMSHATQAIFEILEKSWLPQNCTLVDMKIEFGVDVTTKEIVLADVIDNDSWRLWPSGDRSQQKDKQSYRDLKEVTPEGLQMVKKNFEWVADRVELLLKSNSQCRVVVLMGSTSDLGHCEKIKKACGNFGIPCELRVTSAHKGPDETLRIKAEYEGDGIPTVFVAVAGRSNGLGPVMSGNTAYPVISCPPITADWGAQDVWSSLRLPSGIGCSTILSPEGSAQFAAQIFGLNNHLVWAKLRASKLNTWISLKQADKKIRECNL

SEQ ID NO: 52123 - DNA, 489 bp, Pyrobaculum aerophilum str. IM2
  CDS (1)..(489): transl_table=11
atgaaggttgcggttataatggggtcgataaacgaccttgaggtcatgaaagaggcgcttgaggtcttggagcagctgggcattccctacgaggcgcgggtcgtcagcgcccacaggacgccggatttcatgtaccaattcgccaaggaggccgaggggaaattcgacgtgataatagccggcgccggcggggcggcccacctccccggcatgaccgcctccctaacgccgctgccggtcataggggtccccatccccacaaaacacttaggcgggctggactccctgttgtcaattgtacaaatgccccggggcactcccgtcgccacagtggccataggcaacgccgccaacgccgcctatctcgccgccaggatactgggcataaaatacccagaggtgaggcagaaggttaaagaacacatggaaaagatgagagaagaggtactgtccaagtccttcataaagtccttttcactagacgtttaa

SEQ ID NO: 52124 - protein, 162 aa, Pyrobaculum aerophilum str. IM2
MKVAVIMGSINDLEVMKEALEVLEQLGIPYEARVVSAHRTPDFMYQFAKEAEGKFDVIIAGAGGAAHLPGMTASLTPLPVIGVPIPTKHLGGLDSLLSIVQMPRGTPVATVAIGNAANAAYLAARILGIKYPEVRQKVKEHMEKMREEVLSKSFIKSFSLDV

SEQ ID NO: 52125 - DNA, 480 bp, Clostridium perfringens str. 13
  CDS (1)..(480): transl_table=11
atgaaggtagcaatattttttggaagtaaatcagatatagatgttatgaagggagcaggaaatgctcttaaagagtttggaattccttataatgcttatattttatcagctcatagggttccagaaaaacttattgaaactttagaaaaaattgagaaagaaggctgtgaagtaataatagctggagcaggattagctgctcatcttcctggagttatagcttctcatactatacttcctgtaataggagttccagtgagagcagcagtagagggaatggatgcattactatcaatagttcagatgccaaaatcaattcctgtagccactgttggaataaataatagttataatgcaggaatgttagcagtccaaatgctttcattaaaatatccagaactaagagaaaaattaattcaatttagaatcgacatgaaacataaattcatagcagaaaatggagaaggagtggaattataa

SEQ ID NO: 52126 - protein, 159 aa, Clostridium perfringens str. 13
MKVAIFFGSKSDIDVMKGAGNALKEFGIPYNAYILSAHRVPEKLIETLEKIEKEGCEVIIAGAGLAAHLPGVIASHTILPVIGVPVRAAVEGMDALLSIVQMPKSIPVATVGINNSYNAGMLAVQMLSLKYPELREKLIQFRIDMKHKFIAENGEGVEL

SEQ ID NO: 52127 - DNA, 513 bp, Pyrococcus furiosus DSM 3638
  CDS (1)..(513): transl_table=11
atgcctaaagttggaatcataatgggtagtgattcagatttgcccgtaatgaaggaagcagctaaagttctggaagagtttggagtagattatgaaataacaatagtctcggcacacagaacaccagagagaatgtacgagtatgcaaaaactgccagagagaggggaattgaagttattattgcaggtgctggaggtgcagcccatcttcctggaatgacggcctcgataacaactcttcctgtaataggagttccagttaaaagtagggccttgaatggactagattctctgctttccatagttcaaatgccagcaggtgttcctgttgctactgtagccataaacaatgctaagaatgctgctttacttgctctcagaattctttctataaagtatccagagattgccgaaaaactagaaaagtacaaagaagagatgagaaaaacagttgaggaaaaagctaaaaagctcgaagaggttggttggaaagaatatctgggagaggaatga

SEQ ID NO: 52128 - protein, 170 aa, Pyrococcus furiosus DSM 3638
MPKVGIIMGSDSDLPVMKEAAKVLEEFGVDYEITIVSAHRTPERMYEYAKTARERGIEVIIAGAGGAAHLPGMTASITTLPVIGVPVKSRALNGLDSLLSIVQMPAGVPVATVAINNAKNAALLALRILSIKYPEIAEKLEKYKEEMRKTVEEKAKKLEEVGWKEYLGEE

SEQ ID NO: 52129 - DNA, 498 bp, Corynebacterium glutamicum ATCC 13032
  CDS (1)..(498): transl_table=11
gtgggtcctctagttggtttgatcatgggttcggattcggattgggacactgtagcgccagctgcagaggtactcgctgagtttggcattccttttgaagtcggagttgtctctgcacaccgcaccccagagaagatgctcaactacgcaaagactgcacatgagcgcggcatcaagacgatcatcgcgtgtgctggcggcgctgcacacctgccaggcatggtggctgcagcaactccacttccagtcatcggtgttccacgcgcattgaaggatctcgacggtttggattccttgctgtccatcgtccagatgccaggcggcgttccagtcgccactgtctccatcggtggcgcgaagaatgcaggcctacttgccgttcgtattctcggtgctggtgatccttctttggtcacgaagatggccgattaccaagagaatatggcgaaggaagttgaagccaaggacgaagcactgaagaagcgcttgctcggctaa

SEQ ID NO: 52130 - protein, 165 aa, Corynebacterium glutamicum ATCC 13032
MGPLVGLIMGSDSDWDTVAPAAEVLAEFGIPFEVGVVSAHRTPEKMLNYAKTAHERGIKTIIACAGGAAHLPGMVAAATPLPVIGVPRALKDLDGLDSLLSIVQMPGGVPVATVSIGGAKNAGLLAVRILGAGDPSLVTKMADYQENMAKEVEAKDEALKKRLLG

SEQ ID NO: 52131 - DNA, 474 bp, Fusobacterium nucleatum subsp. nucleatum ATCC 25586
  CDS (1)..(474): transl_table=11
atgaaagtaggaattatatttggtagtaaatcagatgttgatgtaatgaagggagcagcagactgtttaaaaaagtttgggatagagtattctgcacatgttttatctgcacatagagttccagaacttttagaagaaactttggaaaaatttgaaaaagaagactatggagttatcattgctggagcaggacttgcagcacatttaccaggagttattgcttcaaaaactgttttacctgtgattggagtacctataaaagcagcagtagaaggtttagatgcactattttcaatagtacaaatgcctaaatcaattcctgttgcaactgtggcaattaataattcatataatgcaggaatgttagcagtagaaatattagcagttggaaataaagaattaagagcaaaacttttagagtttagaaaagaaatgaaagaagatttcaaaaaaaatatatatatggaattgtaa

SEQ ID NO: 52132 - protein, 157 aa, Fusobacterium nucleatum subsp. nucleatum ATCC 25586
MKVGIIFGSKSDVDVMKGAADCLKKFGIEYSAHVLSAHRVPELLEETLEKFEKEDYGVIIAGAGLAAHLPGVIASKTVLPVIGVPIKAAVEGLDALFSIVQMPKSIPVATVAINNSYNAGMLAVEILAVGNKELRAKLLEFRKEMKEDFKKNIYMEL

SEQ ID NO: 52133 - DNA, 612 bp, Streptococcus pyogenes MGAS8232
  CDS (1)..(612): transl_table=11
atgctaaagcacctagtcgccctgacgtgggttcatcttcgaaatcaaagatttcggacttaccgcatatttttctacggaaagtttcgacaagtcgaaacgcccctttatatcttaattatgaaaactccaattatttctattatcatgggctccaaatctgactgggcaaccatgcaaaaaacggctgaagttctagacaactttggcattgcttacgagaagaaagtcgtctctgctcaccgcacgcccgacctcatgttcaagcatgctgaggaagcacgtggtcgtggcatcaaaatcatcatcgcaggagcaggtggagcagctcacttgcctggtatggtagcagctaaaacaacgctgcctgttatcggtgtgcctgtcaaatcacgtgcccttttaggtttggattcactctattcgattgtgcagatgcctggcggtgtgcctgtggcaaccatggctatcggagaagcgggagcgactaacgctgccctgacggccctccgtattctctccatcgaggatcaaaatctggctgatgcgctagctcatttccatgaggaacaaggaaaaatcgcagaggagtcaagtggtgaactcatttaa

SEQ ID NO: 52134 - protein, 203 aa, Streptococcus pyogenes MGAS8232
MLKHLVALTWVHLRNQRFRTYRIFFYGKFRQVETPLYILIMKTPIISIIMGSKSDWATMQKTAEVLDNFGIAYEKKVVSAHRTPDLMFKHAEEARGRGIKIIIAGAGGAAHLPGMVAAKTTLPVIGVPVKSRALLGLDSLYSIVQMPGGVPVATMAIGEAGATNAALTALRILSIEDQNLADALAHFHEEQGKIAEESSGELI

SEQ ID NO: 52135 - DNA, 486 bp, Methanopyrus kandleri AV19
  CDS (1)..(486): transl_table=11
atggtcgacgttctgatcgttctgggaagtaggagcgatcgagacgtcgccgagaaggccgcgaaggtgctcgaccgagccggcgtcgactacaacgtgcgggtggcctccgcccaccggacgccggagcgtatcgacgagctgatcgaggagtacgagcccgacgtgaaggtgtacatcgcgatcgcgggtctggccgctcacctcccgggtgtgatcgccgccaagaccctgaagcccgtgatcgccgtgccggtggaggcgaagctgtgtggtctggacgcgctcctctcgaccgtgcagatgcccccgggtgtaccggtggcggttgtcggcgtggatcgcggggagaacgcggcgctcttggccttgcagatcctggcactggaggacgaggacgtccggtccttcctggaggagtaccgggaggagatgaagaagcaggtggcccgggacgacgacacgatcaaggagcgtttccggtga

SEQ ID NO: 52136 - protein, 161 aa, Methanopyrus kandleri AV19
MVDVLIVLGSRSDRDVAEKAAKVLDRAGVDYNVRVASAHRTPERIDELIEEYEPDVKVYIAIAGLAAHLPGVIAAKTLKPVIAVPVEAKLCGLDALLSTVQMPPGVPVAVVGVDRGENAALLALQILALEDEDVRSFLEEYREEMKKQVARDDDTIKERFR

SEQ ID NO: 52137 - DNA, 396 bp, Methanosarcina acetivorans C2A
  CDS (1)..(396): transl_table=11
atggtcgacatctcactgattatgggctctgagtccgacagatcaatcgccaaccgcgcggtagctgtacttgaaaagagcaaatatacttacgaagtaatggttatctctgcccacagaaaccccgaagaacttgatagctatatttcaggctcggatgcaaaagtctttatcactatagccggtctatcggcagctctcccgggggttgttgcttccagaacaaaaaaacctgtaataggtgtacccgtaagcgcaaaactcggcgggcttgatgcccttctctccatagcccagatgcccccgggagtacctgttggaagcgtggggatcgacaatggagcaaacggcgcatatcttgccctgagaattctggatttaatcgaaaacccttaa

SEQ ID NO: 52138 - protein, 131 aa, Methanosarcina acetivorans C2A
MVDISLIMGSESDRSIANRAVAVLEKSKYTYEVMVISAHRNPEELDSYISGSDAKVFITIAGLSAALPGVVASRTKKPVIGVPVSAKLGGLDALLSIAQMPPGVPVGSVGIDNGANGAYLALRILDLIENP

SEQ ID NO: 52139 - DNA, 468 bp, Thermoanaerobacter tengcongensis MB4
  CDS (1)..(468): transl_table=11
ttgaaaatgccaaaaattgctgtggtagtgggtagcaagtcagacctccctgtaattgaaaggtgtacagatattttagatgaatttggaatttcatatgacgtaaaagttctgtctgcccatcgaactccttttgagacgcaggaatttgcagtagaagcagagaaatattacgaccttataatagcggcggcaggaaaagctgctcatctcccaggggtcattgcttcttacactttacttcctgtcattgggcttcccatcaagtcttccactctagatggactggattctctcctttcaattgtgcagatgccaaaaggagttccagtagctacggttgctatagatggagctgagaatgctgctcttttagcctgtcatattctctctttgaagtatccccatctaaaagaaaagcttgctaattacagggagaaaatggcggaggaagtgttaaataattaa

SEQ ID NO: 52140 - protein, 155 aa, Thermoanaerobacter tengcongensis MB4
MKMPKIAVVVGSKSDLPVIERCTDILDEFGISYDVKVLSAHRTPFETQEFAVEAEKYYDLIIAAAGKAAHLPGVIASYTLLPVIGLPIKSSTLDGLDSLLSIVQMPKGVPVATVAIDGAENAALLACHILSLKYPHLKEKLANYREKMAEEVLNN

SEQ ID NO: 52141 - DNA, 543 bp, Streptomyces coelicolor A3(2)
  CDS (1)..(543): transl_table=11
atgagccaggccagcccggtgaccccggtcgtgggcatcgtcatggggtcggactccgactggcccgtcatggaggccgccgccaaggccctcgacgagttcgaggtcccctacgaggtcgacgtcgtctccgcgcaccgcatgccgcacgagatgatcgcgtacggcgagcaggccgccggacgcggcctcaaggcgatcatcgcgggggccgggggcgccgcccacctgcccggcatgctcgcctcggtcacgccgctgccggtcatcggcgtcccggtgccgctgaagtacctggacggcatggacagcctgctgtccatcgtgcagatgccggccggcgtcccggtggccacggtctccgtcggcggcgcccgcaacgccggtctgctggccgcccgcatcctcgccgcccacgacgaggaactgctcggccggatgcgcgagttccagcaggacctcaacgaccaggccaccgagaagggcaagcggctgcgcaccaaggtcgagggctcagcggccggcttcggattcggaaagtga

SEQ ID NO: 52142 - protein, 180 aa, Streptomyces coelicolor A3(2)
MSQASPVTPVVGIVMGSDSDWPVMEAAAKALDEFEVPYEVDVVSAHRMPHEMIAYGEQAAGRGLKAIIAGAGGAAHLPGMLASVTPLPVIGVPVPLKYLDGMDSLLSIVQMPAGVPVATVSVGGARNAGLLAARILAAHDEELLGRMREFQQDLNDQATEKGKRLRTKVEGSAAGFGFGK

SEQ ID NO: 52143 - DNA, 510 bp, Methanosarcina mazei Go1
  CDS (1)..(510): transl_table=11
atgactgatgttgtaataatccttggcagcaaatccgataaagaagtagcaagaaaggcaaccgaagtctttgacaggtttggtattgaatataccatcactgttgcatccgcacacaggacccctgcgaggcttgctgaaataattgaaactgcgcataaaaccgacgtaaaggcatttattgctattgccgggctctcagcccatcttccaggagttgtggcttcaagcactataaaacctgtaatcggagtccctgtaaactcagcacttgatgggattgacgccctcctgtctattgcccagatgcctacgggaattccggttgcctgtgtgggaatcggaagaggggataatgctgcaattcttgccgttcagctgctggcagtggaaaacggggagcttgcggaaaagctttcgaattatcgaaaagagcttgtcgagatgattgagaaggacgcagaaagcttgatggatgagcttgtcactgaaggcagggcagcaagctga

SEQ ID NO: 52144 - protein, 169 aa, Methanosarcina mazei Go1
MTDVVIILGSKSDKEVARKATEVFDRFGIEYTITVASAHRTPARLAEIIETAHKTDVKAFIAIAGLSAHLPGVVASSTIKPVIGVPVNSALDGIDALLSIAQMPTGIPVACVGIGRGDNAAILAVQLLAVENGELAEKLSNYRKELVEMIEKDAESLMDELVTEGRAAS

SEQ ID NO: 52145 - DNA, 396 bp, Methanosarcina mazei Go1
  CDS (1)..(396): transl_table=11
atggttgatatttcactgattatgggttctgagtccgacagggcaatcgccaaccgtgcggtttcagtaattgaaaaaaccaggtacacttacgaagtaatggtcatttctgcccacagaaaccctgacgagcttgatatctatatatcaaatacggacgcaaaagtctttattaccatagcgggtttgtcagcagctcttcccggagtcgtggcctccaagactaaaaaacctgtcataggcgtgcctgtaagtgcaaaactcggcgggcttgacgcccttctttccatagcccagatgcctccgggagtgcctgtcggaagtgtaggaattgacaacggggcaaatggggcgtaccttgcccttaggatcctggatttaattgaaaatccctga

SEQ ID NO: 52146 - protein, 131 aa, Methanosarcina mazei Go1
MVDISLIMGSESDRAIANRAVSVIEKTRYTYEVMVISAHRNPDELDIYISNTDAKVFITIAGLSAALPGVVASKTKKPVIGVPVSAKLGGLDALLSIAQMPPGVPVGSVGIDNGANGAYLALRILDLIENP

SEQ ID NO: 52147 - DNA, 504 bp, Xanthomonas axonopodis pv. citri str. 306
  CDS (1)..(504): transl_table=11
atgacctccaaccactccgcgccgctggtcggcatcgtgatgggttcccgttcggattgggagaccatgcaacacgcagctcagaagctcgacgcgctgggcgtgccgtacgaagtcaaggtggtctcggcgcaccgcaccccggacgtcttgttcgcctacgccgaacaggcgggcgcccgtggactgcgcgcgatcatcgccggcgccggcggcgcggcgcatctgccgggcatgctggctgccaagactgcagtgccggtgcttggtgtgccggtgcagtccaaggcgcttaacggcatggattcgctgctgtcgatcgtgcagatgccggccggcattccggtggccaccttcgccatcggcaatgcgggtgcggccaatgcggcgttgtttgcggcggccatgctggcgccggagcagacgcagatcggtcaggcgctggcgcagttccgcgccaagcagaccgacgatgtcatggccagcgacgacccgcgccaatga

SEQ ID NO: 52148 - protein, 167 aa, Xanthomonas axonopodis pv. citri str. 306
MTSNHSAPLVGIVMGSRSDWETMQHAAQKLDALGVPYEVKVVSAHRTPDVLFAYAEQAGARGLRAIIAGAGGAAHLPGMLAAKTAVPVLGVPVQSKALNGMDSLLSIVQMPAGIPVATFAIGNAGAANAALFAAAMLAPEQTQIGQALAQFRAKQTDDVMASDDPRQ

SEQ ID NO: 52149 - DNA, 528 bp, Chlorobium tepidum TLS
  CDS (1)..(528): transl_table=11
atgacacaagtttcctttgacgcacaggcgccgctggtcggcatcctgatgggttccgattccgatttcgacatcatgaaagaggccgccacggtgctcaacgagttcggcattccgtttgaaatatcggtcatctcggcgcaccgaacgccgggcgatctcgaagcctacgcctcctcggcagaggagcgcggcctgaaagcgatcatcgccggagctggcggtgcggcacatctgccgggcgtcacggcggccatgactcccctgccggtcatcggcgtgccgatctacagcaaaaagctcagcggccaggattcgctctacgccatcgtgcagatgcccgccggaattcccgtagccaccgtcggcatcgacaacgcccgcaacgccgcgctgctcgccgtgcagatgctcgccctgtgcgacgccagtctgatgcagaagctcagggagttccgacagaagcttgccgaagcctcgcgccagaagaccgccaaaatccgggaaaaactgcgtgcgaacggctga

SEQ ID NO: 52150 - protein, 175 aa, Chlorobium tepidum TLS
MTQVSFDAQAPLVGILMGSDSDFDIMKEAATVLNEFGIPFEISVISAHRTPGDLEAYASSAEERGLKAIIAGAGGAAHLPGVTAAMTPLPVIGVPIYSKKLSGQDSLYAIVQMPAGIPVATVGIDNARNAALLAVQMLALCDASLMQKLREFRQKLAEASRQKTAKIREKLRANG

SEQ ID NO: 52151 - DNA, 492 bp, Thermosynechococcus elongatus BP-1
  CDS (1)..(492): transl_table=11
atgggcagtgattccgatttgcccaccatgcagggggcgatcgccatctgtgaacgctttcgcattccccatgaagtcgctatcctctcagctcaccgcactcccctggcaatggcagaatttgctcagcatgcccatcagcggggcctaaaagtcattattgccggtgccggcggtgctgctcacttgccgggcatgatagcttccctgacccccctacccgtgattggcgtccccgtgccgagccgccatttgcagggggtggactccctctactcaattgtgcagatgccggctgggattcctgtcgcaacggttgccattggcaatgcccaaaatgcaggtctattggccgtccaactgttggccagtcatgatccaaccttgctggagcaagtgattgcctatcgtcaagaattagcagccaccgtgagcgccaagaatcaaaaactgcaaacactgggggctagcgcttatctgcaacagcagtaa

SEQ ID NO: 52152 - protein, 163 aa, Thermosynechococcus elongatus BP-1
MGSDSDLPTMQGAIAICERFRIPHEVAILSAHRTPLAMAEFAQHAHQRGLKVIIAGAGGAAHLPGMIASLTPLPVIGVPVPSRHLQGVDSLYSIVQMPAGIPVATVAIGNAQNAGLLAVQLLASHDPTLLEQVIAYRQELAATVSAKNQKLQTLGASAYLQQQ

SEQ ID NO: 52153 - DNA, 489 bp, Streptococcus agalactiae 2603V/R
  CDS (1)..(489): transl_table=11
atgcaaccaattatttctattatcatgggttccaaatccgactggacaaccatgcaaaaaacggctgaagttctagataactttggcattgcttacgagaagaaagtcgtctctgcccaccgtacgccagacctcatgttcaagcatgctgaggaggcgcgtggtcgtggtatcaagattatcatcgctggagcaggtggagcagcccacttgccgggtatggtagcagctaaaacaaccctgcctgttatcggtgtgcctgtcaaatcacgtgccctctcaggtttggattcgctctactctattgtgcagatgcctggtggtgtgcctgtggcgaccatggctatcggagaagcaggagcgactaacgctgccctgacagccctccgtatcctctctatcgaggatcaaaatctggctgatgcgctagctcatttccatgaggaacaaggaaaaatcgcagaggagtcaagcaatgaactcatttaa

SEQ ID NO: 52154 - protein, 162 aa, Streptococcus agalactiae 2603V/R
MQPIISIIMGSKSDWTTMQKTAEVLDNFGIAYEKKVVSAHRTPDLMFKHAEEARGRGIKIIIAGAGGAAHLPGMVAAKTTLPVIGVPVKSRALSGLDSLYSIVQMPGGVPVATMAIGEAGATNAALTALRILSIEDQNLADALAHFHEEQGKIAEESSNELI

SEQ ID NO: 52155 - DNA, 492 bp, Oceanobacillus iheyensis HTE831
  CDS (1)..(492): transl_table=11
atggctcaagtaggggttattatgggaagtatttccgactgggaaacgatgcagtatacttgtaatgtgcttgatgaattacagatctcttatgagaaagaagtgatatccgcacatcgtactccggatgacatgtttgcttactcgaaacaagctcgtagtaaagggctaaaggttattattgctggggcagggggagcagcacacttaccaggaatggtagcttcacaaacaacgttacccgttataggtgtaccagttgaaagtaaatcattacaaggcttagattccctgttatctattgtgcaaatgcctggtggagtaccaaccgctacagttgcaattgggaaagccggagccaaaaatgctggtattcttgcggcacagattattagcacttttgatgaaggtgcagagaaatctctagagaaatatcgggaagaaatgcgagaatctgtaaaagaaatgagggaaaatcttgcagactactaa

SEQ ID NO: 52156 - protein, 163 aa, Oceanobacillus iheyensis HTE831
MAQVGVIMGSISDWETMQYTCNVLDELQISYEKEVISAHRTPDDMFAYSKQARSKGLKVIIAGAGGAAHLPGMVASQTTLPVIGVPVESKSLQGLDSLLSIVQMPGGVPTATVAIGKAGAKNAGILAAQIISTFDEGAEKSLEKYREEMRESVKEMRENLADY

SEQ ID NO: 52157 - DNA, 507 bp, Bifidobacterium longum NCC2705
  CDS (1)..(507): transl_table=11
atgataatggcaaatgaatccaagcccgaagtcgcggtggtcatgggatcctccagcgactgggagaccatgaagcgtgcctgcgatattctcgaccagttcggtgtcgtctaccacaagcaggtcatttccgcgcaccgcacgcccgagctcatggccgagttcgcgcacaatgcccgcgccaatggcctgaaggccattatcgccggtgccggcggtgccgcccacctgccgggcatgatcgccgcgcagaccacgctgcccgtaatcggcgtgcccgtgcgctcccacgccctgtccggctgggattcgctgctgtccatcgtgcagatgcctggcggcatcccggtggccaccaccgccgtcggcaactccggtgccaccaacgccggcctgctcgccgtgcagatgctctccgccttcgagccggaactggccgacaagcttgaggattaccgtaacgaactgaaggaaaaggtggccgaatccaatgcccagcttgtctga

SEQ ID NO: 52158 - protein, 168 aa, Bifidobacterium longum NCC2705
MIMANESKPEVAVVMGSSSDWETMKRACDILDQFGVVYHKQVISAHRTPELMAEFAHNARANGLKAIIAGAGGAAHLPGMIAAQTTLPVIGVPVRSHALSGWDSLLSIVQMPGGIPVATTAVGNSGATNAGLLAVQMLSAFEPELADKLEDYRNELKEKVAESNAQLV

SEQ ID NO: 52159 - DNA, 492 bp, Shewanella oneidensis MR-1
  CDS (1)..(492): transl_table=11
atgcaagcccttgttgctgttgttatgggttctaagagtgattggcccacaatggaagccgccgctgagatcatggataaactgcaagtgccttaccatgttgaagttgtatcagcccatagaacgccagataaactgatggagtttgcagccggtgccgctgaccgtggttttaaaattattatcggtggtgcgggcggtgccgcgcacttacccggtatgatcgcctctaaaactcgcttacccgtattaggtgtacccgtgcaaagtaaagcactctcaggcatggatagcttactgtctatcgtgcaaatgcccaaagggatcgctgtaggcaccttagcaattggtactgctggtgcctttaacgccggtttactcgcctgccaaattttagccaataacgatgtagcgcttgctgctcgtttagacgccttcagagaagaacaaactcgtgctgtgctggataatcccgatccgagggaagtctaa

SEQ ID NO: 52160 - protein, 163 aa, Shewanella oneidensis MR-1
MQALVAVVMGSKSDWPTMEAAAEIMDKLQVPYHVEVVSAHRTPDKLMEFAAGAADRGFKIIIGGAGGAAHLPGMIASKTRLPVLGVPVQSKALSGMDSLLSIVQMPKGIAVGTLAIGTAGAFNAGLLACQILANNDVALAARLDAFREEQTRAVLDNPDPREV

SEQ ID NO: 52161 - DNA, 489 bp, Streptococcus mutans UA159
  CDS (1)..(489): transl_table=11
atgaaaccacttatttccattatcatgggctccaaatccgactggagcactatgcaaaaaaccgctcaagttttggataacttcggcgtggcttatgaaaagaaagtcgtctcagcccaccgcacaccagacctcatgttcaaacatgcagaaaaagcccgcagccgcggcatcaaggtcatcattgcaggtgcaggcggtgccgcgcatttaccgggtatggtggcagctaaaacaacactgcctgttatcggtgtacctgttaaatcacgcgccctcagcggcttggattcgctctattccattgtgcagatgccgggtggtgtgcctgtggcaactatggccattggtgaagcgggagcgaccaacgctgccctgacagccctgcgtatcttggccattgaagaccaagacttggcagccgcgttagcagatttcgcagaggaacagggaaaaatcgcagaggagtcaacgaatgaactcaactaa

SEQ ID NO: 52162 - protein, 162 aa, Streptococcus mutans UA159
MKPLISIIMGSKSDWSTMQKTAQVLDNFGVAYEKKVVSAHRTPDLMFKHAEKARSRGIKVIIAGAGGAAHLPGMVAAKTTLPVIGVPVKSRALSGLDSLYSIVQMPGGVPVATMAIGEAGATNAALTALRILAIEDQDLAAALADFAEEQGKIAEESTNELN

SEQ ID NO: 52163 - DNA, 492 bp, Streptococcus agalactiae NEM316
  CDS (1)..(492): transl_table=11
atgaaaactccaattatttctattatcatgggctccaaatccgactggggaaccatgcaaaaaacggctgaagttctagataactttggcattgcttacgagaagaaagtcgtctctgcccaccgtgcgccagacctcatgttcaagcatgctgaggaagcacgtggccgtggtatcaaaatcatcatcgctggagcaggtggggcagctcacttgcctggtatggtggcagctaagacaacactacctgttattggtgtgccggtcaaaacacgtgccctttcaggtttggattcgctctactctattgtgcagatgcctggtggtgtgcctgtggcgaccatggctatcggagaagcgggagcgactaacgctgccttgacagccctccgtatcctctctattgaggaccaaaatctggctgatgcgctagctcatttccatgaggaacaaggaaaaatcgcggaggagtcaagcaatgaacttatttaa

SEQ ID NO: 52164 - protein, 163 aa, Streptococcus agalactiae NEM316
MKTPIISIIMGSKSDWGTMQKTAEVLDNFGIAYEKKVVSAHRAPDLMFKHAEEARGRGIKIIIAGAGGAAHLPGMVAAKTTLPVIGVPVKTRALSGLDSLYSIVQMPGGVPVATMAIGEAGATNAALTALRILSIEDQNLADALAHFHEEQGKIAEESSNELI

SEQ ID NO: 52165 - DNA, 501 bp, Corynebacterium efficiens YS-314
  CDS (1)..(501): transl_table=11
atgacaccactcgtcgggctcatcatgggatctgattcggactgggacaccgtcgccccggccgccgaggccctcgccgaattcggcatccccttcgaggtcggcgtgctctccgcccaccgcaccccggaacgcatgctggcctacgccaagtcagcccacgagcgtggcctcaaggtcatcatcgcctgcgccggcggggccgcccacctgcccggcatggtcgctgccgccaccccgctgcccgtcatcggcatcccgcgggcactgaaggacctcgacggcatggactccctgctgtccatcgtgcagatgcccgccggtgtgcccgtggcgaccgtctccatcggtggtgccaagaacgccggcctgctcgccgtgcggatcctcggtgcgggtgaccccgcactggtgcagaagatggccgactaccaggctgacatggcagcccaggtggaggccaaggacgaggcgctcaaacagcgcctcatgggcgaatag

SEQ ID NO: 52166 - protein, 166 aa, Corynebacterium efficiens YS-314
MTPLVGLIMGSDSDWDTVAPAAEALAEFGIPFEVGVLSAHRTPERMLAYAKSAHERGLKVIIACAGGAAHLPGMVAAATPLPVIGIPRALKDLDGMDSLLSIVQMPAGVPVATVSIGGAKNAGLLAVRILGAGDPALVQKMADYQADMAAQVEAKDEALKQRLMGE

SEQ ID NO: 52167 - DNA, 492 bp, Pseudomonas putida KT2440
  CDS (1)..(492): transl_table=11
atgagtgcactggttggcgtgatcatgggctccaagtccgattggtccacccttagccacaccgccgatatgctggaaaaactcggcattccctacgaagtgaaggtggtttccgcccaccgcaccccggatctgctgttccagtatgccgaggaggctgagggccgtggcatcgaggtgatcatcgccggtgccggtggcgcagcccacctgccaggcatgtgcgccgccaagacccacctgccggtgctgggcgtgccggtgcagtcgtcgatgctgtcgggcgtcgattcgctgctgtcgatcgtgcagatgccagccggtgtgccggttgccaccctggccatcggccgtgccggtgcggtcaacgctgccctgctgtcggccagcattctgggcgccaagtacccgcagtaccacgcggcgttgaagcagttccgcacggaacagaccgacaccgtgctggacaacccagacccgcgccaggcttga

SEQ ID NO: 52168 - protein, 163 aa, Pseudomonas putida KT2440
MSALVGVIMGSKSDWSTLSHTADMLEKLGIPYEVKVVSAHRTPDLLFQYAEEAEGRGIEVIIAGAGGAAHLPGMCAAKTHLPVLGVPVQSSMLSGVDSLLSIVQMPAGVPVATLAIGRAGAVNAALLSASILGAKYPQYHAALKQFRTEQTDTVLDNPDPRQA

SEQ ID NO: 52169 - DNA, 483 bp, Staphylococcus epidermidis ATCC 12228
  CDS (1)..(483): transl_table=11
gtgaaagtagcagtcattatgggcagttcctcagattggaaaattatgaaagaaagttgttcgatgcttgaagaatttgaaataccgtacgaaaagaaagtcgtttcagctcatcgtacgcctcaaatgatgttcaatttcgctagtcaagcacgccaaaatggttttgatattatcattgccggtgcagggggagcagcacacttacctggaatggtagcttccatgacaacattacctgtgattggtgtgccaattgaatctaaaagtctaaaaggattagattcattactatctatcgtccaaatgcctggtggtatcccagttgcaaccacagcaattggaaaatcaggtgctaaaaatgctgggatattagcggcaagaatgttaggaataacaaatgaatcagttcaaaataatttggaaaattatgaaaaatctttagtcgcaaaagtggaggaaatgcaaaatgaacttcagtaa

SEQ ID NO: 52170 - protein, 160 aa, Staphylococcus epidermidis ATCC 12228
MKVAVIMGSSSDWKIMKESCSMLEEFEIPYEKKVVSAHRTPQMMFNFASQARQNGFDIIIAGAGGAAHLPGMVASMTTLPVIGVPIESKSLKGLDSLLSIVQMPGGIPVATTAIGKSGAKNAGILAARMLGITNESVQNNLENYEKSLVAKVEEMQNELQ

SEQ ID NO: 52171 - DNA, 489 bp, Bradyrhizobium japonicum USDA 110
  CDS (1)..(489): transl_table=11
atgaccgcgccgatcgccatcatcatgggaagccagtcggactgggacacgatgcggcatgccgccgacacgctcgaggcgctcggcgttgccgccgagacccgcatcgtttcggcacaccgcacccccgaccggctggtcgctttcgccaagggcgccaaggcggcgggttacaagatcatcatcgccggcgcgggcggcgctgcacatttgccgggcatggcggcggcactgacggagctcccggtcttcggtgttcccgtcgaatcgaagacgctcaagggcgtcgattcgctctattcgatcgtgcagatgcccgcgggcatcccggtcggcacccttgccatcggcaaggccggcgcgatcaatgcggcgctgcttgctgccgccgtgctggcgctgtccgacccagccttgtccgaccgcctcgccgcctggcgcaaggcacagaccgaggcggtcgctgagcgcccggaggacaaggcgtga

SEQ ID NO: 52172 - protein, 162 aa, Bradyrhizobium japonicum USDA 110
MTAPIAIIMGSQSDWDTMRHAADTLEALGVAAETRIVSAHRTPDRLVAFAKGAKAAGYKIIIAGAGGAAHLPGMAAALTELPVFGVPVESKTLKGVDSLYSIVQMPAGIPVGTLAIGKAGAINAALLAAAVLALSDPALSDRLAAWRKAQTEAVAERPEDKA

SEQ ID NO: 52173 - DNA, 504 bp, Xylella fastidiosa Temecula1
  CDS (1)..(504): transl_table=11
atgatctccaatcaatcccccccgctggtcggtattgtcatgggttcctcttcggattggggggcgatgcagcacgccgcacaaaagctcgatgctctcagcgtcgcgtatgaagtgaaggtcgtttcggcgcatcgtactccggataaattgtttgcttatgctgagcaggctgaaggacgtggtttgcgtgccatcattgccggggccggtggcgcagcgcaccttccaggtatgttggctgctaagacgatagttccagtgttgggggtgccaatgcagtccagggctctgaatggtttggattcgctgttatcaatcgtacagatgccggcgggtattccagtagccacattcgcgattggggaagctggtgcagtcaatgccgccctgtttgccgccgcgctgttggtacccgaaaatccagcaatgcgtcggatgctgactgagttccgccaacgtcagacggatcaggtgaatgctgcggacgatccacgccaatga

SEQ ID NO: 52174 - protein, 167 aa, Xylella fastidiosa Temecula1
MISNQSPPLVGIVMGSSSDWGAMQHAAQKLDALSVAYEVKVVSAHRTPDKLFAYAEQAEGRGLRAIIAGAGGAAHLPGMLAAKTIVPVLGVPMQSRALNGLDSLLSIVQMPAGIPVATFAIGEAGAVNAALFAAALLVPENPAMRRMLTEFRQRQTDQVNAADDPRQ

SEQ ID NO: 52175 - DNA, 480 bp, Clostridium tetani E88
  CDS (1)..(480): transl_table=11
atgaaagttgctataatatttggaagtaaatctgataaagaagtcatgagcggagctgcaaaagcactaaaagaatttgatattgaatataaggcatatatactttcagcccatagagtaccagaaaagttagaagaaactttaaaaaaattagaagaggataattatgaatgtataatagcaggtgcaggacttgctgcccatcttccaggagttatagcttctaaaactatagttccagtcataggagttcctattaatgcttcattaagtggtatggatgcattactttctatagttcagatgccaaaatctataccagttgctactgtaggtataaataatagttacaatgcaggtatgttagcagctcagattttatcactaaaatatgaggatttaaaaattaaaatgattgattatagaataaatataaaagaaaaatttattaatgaaaatgaacaaggtgtaatattatag

SEQ ID NO: 52176 - protein, 159 aa, Clostridium tetani E88
MKVAIIFGSKSDKEVMSGAAKALKEFDIEYKAYILSAHRVPEKLEETLKKLEEDNYECIIAGAGLAAHLPGVIASKTIVPVIGVPINASLSGMDALLSIVQMPKSIPVATVGINNSYNAGMLAAQILSLKYEDLKIKMIDYRINIKEKFINENEQGVIL

SEQ ID NO: 52177 - DNA, 486 bp, Lactobacillus plantarum WCFS1
  CDS (1)..(486): transl_table=11
atgatggcgaaagttggtttgattatggggtcaatttctgattggccaaccatgcaattagcggcagaacagttaacggcactgggagtctcttatgagcgtcacgttatttcggcccaccgaatgccccagacattacaatcctatggtgaagaagcagcgtcacggggaattcaagttattattgcgggtgcggggggcgctgcccatttacccgggatgctagctgccaatacactactcccggtaattggggtgcccattaagacccatacgttgaacggagttgattcgttattgtcaatcgtacagatgccagctggcgtacccgtggcgacgatggcgattggtgatgcgggggctaagaatggtgcgctaatggccgcccaaattatcggtttacgggaaccacaagtacaacatgcaattggagaatttcgtgctcgtcaacgtcaggaggctgaacaaagtgaacgccaattttaa

SEQ ID NO: 52178 - protein, 161 aa, Lactobacillus plantarum WCFS1
MMAKVGLIMGSISDWPTMQLAAEQLTALGVSYERHVISAHRMPQTLQSYGEEAASRGIQVIIAGAGGAAHLPGMLAANTLLPVIGVPIKTHTLNGVDSLLSIVQMPAGVPVATMAIGDAGAKNGALMAAQIIGLREPQVQHAIGEFRARQRQEAEQSERQF

SEQ ID NO: 52179 - DNA, 543 bp, Tropheryma whipplei str. Twist
  CDS (1)..(543): transl_table=11
atgactggtaaaaacatcaacgatgaaggtagcaaatgccccgctcttgtttggctcctaatgggttctgattcggattggcccgttatgtcaggcgccgcagatatcctgcagcagatgaatatatctttcagagtaaatgttgtttctgcccatcgccagccggaaaagatgattagctgcgccaaacgcgctcgtgacatgggattcaaagttctgatagctgctgccggtggagccgcacacttgcccggaatgcttgcaagtgtcacaactctccctgttatcggagttccggttgggcagaaaaatctgtcaggcctcgattctcttttatcgattgttcaaatgccctctggtgttccggtggcctgtgtcggcatagattctgctaaaaacgctgcccttctggccgcaaggattttgggggttcaatcagccgacatagaagcatccagaatagcagatagtttgtctgcatatcagcaaagcctgtttgatcaatcaaatgaaaaggacagaatgataaatgagccgaaatag

SEQ ID NO: 52180 - protein, 180 aa, Tropheryma whipplei str. Twist
MTGKNINDEGSKCPALVWLLMGSDSDWPVMSGAADILQQMNISFRVNVVSAHRQPEKMISCAKRARDMGFKVLIAAAGGAAHLPGMLASVTTLPVIGVPVGQKNLSGLDSLLSIVQMPSGVPVACVGIDSAKNAALLAARILGVQSADIEASRIADSLSAYQQSLFDQSNEKDRMINEPK

SEQ ID NO: 52181 - DNA, 507 bp, Pseudomonas syringae pv. tomato str. DC3000
  CDS (1)..(507): transl_table=11
atgagaggcacgacgatgagcgcactggttggcgtgatcatgggctccaagtccgattggtccacccttagccacaccgccgacatgctggaaaagctcggcattccttttgaagtcaaagtggtgtcagctcaccgcacgccggacctgctgttccagtacgccgacgaagccgaaggccgtggcattgaagtgatcatcgccggtgccggtggtgccgctcacttgccgggtatgtgcgctgccaagactcacctgcctgtattgggcgttccggtgcagtcctccatgctctcgggtgtcgactccctgctgtcgatcgtgcagatgcccgctggcattccggtcgcgacgctggccatcggcaaggccggtgcgatcaacgcagcgctgctgtcggcaagcattctcggcgccaagcacccgcaatttcacgcagcgctgaagaaatttcgcactgagcagacagacagcgtcctggacaatccagacccacgccacgcctga

SEQ ID NO: 52182 - protein, 168 aa, Pseudomonas syringae pv. tomato str. DC3000
MRGTTMSALVGVIMGSKSDWSTLSHTADMLEKLGIPFEVKVVSAHRTPDLLFQYADEAEGRGIEVIIAGAGGAAHLPGMCAAKTHLPVLGVPVQSSMLSGVDSLLSIVQMPAGIPVATLAIGKAGAINAALLSASILGAKHPQFHAALKKFRTEQTDSVLDNPDPRHA

SEQ ID NO: 52183 - DNA, 612 bp, Streptococcus pyogenes SSI-1
  CDS (1)..(612): transl_table=11
atgctaaagcacctagtcgccctgacgtgggttcgtcttcgaaatcaaagatttcggacttaccgcatatttttctacggaaggtttcgacaagtcgaaacgcccctttatatcttaattatgaaaactccaattatttctattatcatgggctccaaatctgactgggcaaccatgcaaaaaacggctgaagttctagacaactttggcattgcttacgagaagaaagtcgtctctgctcaccgcacgcccgacctcatgttcaagcatgctgaggaagcacgtggtcgtggcatcaaaatcatcatcgcaggagcaggtggggcagctcacttgcctggtatagtggcagctaaaacaacgctgcctgttatcggtgtgcctgtcaaatcacgtgccctttcaggtttggattcactctattcgattgtgcagatgcctggcggtgtgcctgtggcaaccatggctatcggagaagcgggagcgactaacgctgccctgacagccctccgtattctctccatcgaggatcaaaatctggctgatgcgctagctcatttccatgaggaacaaggaaaaatcgcagaggagtcaagtggtgaactcatttaa

SEQ ID NO: 52184 - protein, 203 aa, Streptococcus pyogenes SSI-1
MLKHLVALTWVRLRNQRFRTYRIFFYGRFRQVETPLYILIMKTPIISIIMGSKSDWATMQKTAEVLDNFGIAYEKKVVSAHRTPDLMFKHAEEARGRGIKIIIAGAGGAAHLPGIVAAKTTLPVIGVPVKSRALSGLDSLYSIVQMPGGVPVATMAIGEAGATNAALTALRILSIEDQNLADALAHFHEEQGKIAEESSGELI

SEQ ID NO: 52185 - DNA, 510 bp, Salmonella enterica subsp. enterica serovar Typhi Ty2
  CDS (1)..(510): transl_table=11
atgtcttcccgcaataatccggcgcgtgtcgccatcgtgatggggtccaaaagcgactgggctaccatgcaattcgccgccgaaatttttgaaattctggatgtcccgcaccatgtagaagtggtttccgcccatcgcacccccgataaactgttcagcttcgccgaaacggcggaagagaacggatatcaagtgattattgccggcgcgggcggcgcggcacacctgccgggaatgattgcggcaaaaacgctggtcccggtactcggcgtgccggtacaaagcgctgcgctcagcggcgtggatagcctctactccatcgtgcagatgccgcgcggcattccggtgggtacgctggcgatcggtaaagccggggcggcgaacgccgcactgctggcagcgcaaattttggctacgcatgatagcgcgctgcatcggcgcatcgccgactggcgcaaagcacaaaccgatgaggttctggaaaatcccgatccgcgggggacgctatga

SEQ ID NO: 52186 - protein, 169 aa, Salmonella enterica subsp. enterica serovar Typhi Ty2
MSSRNNPARVAIVMGSKSDWATMQFAAEIFEILDVPHHVEVVSAHRTPDKLFSFAETAEENGYQVIIAGAGGAAHLPGMIAAKTLVPVLGVPVQSAALSGVDSLYSIVQMPRGIPVGTLAIGKAGAANAALLAAQILATHDSALHRRIADWRKAQTDEVLENPDPRGTL

SEQ ID NO: 52187 - DNA, 516 bp, Bacteroides thetaiotaomicron VPI-5482
  CDS (1)..(516): transl_table=11
atgaaaatgactccaattgtaagtatcatcatgggtagcacgtccgaccttcctgttatggagaaggctgcgcaactgctgaatgatatgcatgtaccgttcgaaatgaacgccctttctgctcaccgcacgccggaggctgtggaagagtttgccaaaaatgcccgtagccgtggcattaaagtaatcatcgctgctgccggaatggctgccgcccttccgggtgtcatcgcagccaacacaacacttccggtgatcggagtacctgtaaaaggctctgtgctcgacggtgtagacgctctgtactccatcattcagatgcctccgggcattcctgtggctacggttgctatcaatggagcgatgaatgcggctatccttgccattcagatgcttgcattgagcgatgccgcattggctgaggcttttgctgcttacaaagaaggactgaaaaagaaaatcgtaaaggcaaacgaagaactgaaagaagtgaagttcgaatataaaaccaattaa

SEQ ID NO: 52188 - protein, 171 aa, Bacteroides thetaiotaomicron VPI-5482
MKMTPIVSIIMGSTSDLPVMEKAAQLLNDMHVPFEMNALSAHRTPEAVEEFAKNARSRGIKVIIAAAGMAAALPGVIAANTTLPVIGVPVKGSVLDGVDALYSIIQMPPGIPVATVAINGAMNAAILAIQMLALSDAALAEAFAAYKEGLKKKIVKANEELKEVKFEYKTN

SEQ ID NO: 52189 - DNA, 489 bp, Enterococcus faecalis V583
  CDS (1)..(489): transl_table=11
atgaaaccattagtcgctgtgattatgggaagtacctcagactgggcaacgatgaaagctgcttgtcttgtgttggaagagttgaaaattccttatgaaaaacgagtgatatcagcacataggacccctgacttgatgtttcgttttgcagaggaatcacgaacaaaaggattgaaggttattatcgctggcgctggtggagcggcccatttaccagggatggtagctgcaaagacaaccttacctgtcattggtgttccagttaaaacacgaacgttaaacggtattgattcactgttgtctattgtgcagatgccagggggagttcctgtagcaacaactgcgattggctcagcaggtgctaccaatgctgggttattagctgcagaaatactaagtattgatgatttacagttagcagaaagaatccaagcaagacgacaatcattggaaaaagcggttatggaaagtggggaacaacttgaataa

SEQ ID NO: 52190 - protein, 162 aa, Enterococcus faecalis V583
MKPLVAVIMGSTSDWATMKAACLVLEELKIPYEKRVISAHRTPDLMFRFAEESRTKGLKVIIAGAGGAAHLPGMVAAKTTLPVIGVPVKTRTLNGIDSLLSIVQMPGGVPVATTAIGSAGATNAGLLAAEILSIDDLQLAERIQARRQSLEKAVMESGEQLE

SEQ ID NO: 52191 - DNA, 501 bp, Coxiella burnetii RSA 493
  CDS (1)..(501): transl_table=11
atgaacaaaatttttgtggctattttaatgggctccgacagcgatctaagcaccatggaaactgcttttactgaattaaaatcgttgggtattccgtttgaagctcatattctttctgctcatcgcactcccaaggaaactgtcgaatttgtagaaaatgctgacaaccgcggctgcgccgtcttcatcgcagccgccggcctcgccgcccatctcgctggcaccattgctgcacataccctcaagccagtaatcggcgtgccaatggccggtggcagtcttggcggattagatgcattattatcaacagtacaaatgccaggcggcgttcccgttgcttgcacagcgattggaaaagcgggtgcgaaaaatgcagccatcttagcagcgcaaattattgccctccaggataaaagcatcgcacaaaagttagtgcaacaacggacggcaaaacgtgaaacgctaaaaaaggcggatgaaaatctacaaactcagttataa

SEQ ID NO: 52192 - protein, 166 aa, Coxiella burnetii RSA 493
MNKIFVAILMGSDSDLSTMETAFTELKSLGIPFEAHILSAHRTPKETVEFVENADNRGCAVFIAAAGLAAHLAGTIAAHTLKPVIGVPMAGGSLGGLDALLSTVQMPGGVPVACTAIGKAGAKNAAILAAQIIALQDKSIAQKLVQQRTAKRETLKKADENLQTQL

SEQ ID NO: 52193 - DNA, 534 bp, Streptomyces avermitilis MA-4680
  CDS (1)..(534): transl_table=11
atgaccgcacccgtagttggcatcgtcatggggtcggactccgactggcccgtcatggaggccgcagcgcaggccctcgacgagttcgagatcccgtacgaggtggacgtcgtctccgcgcaccggatgccgcacgagatgatcgcgtacggcgagcaggcggcggagcgcgggctgaaggcgatcatcgcgggtgcgggcggcgccgcccatctgcccggcatgctggcgtccgtgaccccgctgcccgtcatcggcgtgcccgtcccgctgaagtacctcgacggcatggactcgctgctgtcgatcgtgcagatgccggccggtgtcccggtcgcgaccgtctccgtcggcggcgcgcgcaacgcgggcctgctggccgcgcggatgctggccgcgcacgacgcggaactcctcacccgcatgcgggagttccagcaggaactgaacgaccaggccaccgagaagggcaagcggctgcgcgccaaggtcgacggcgcgtcgggcggcttcggcttcggctcggggaagtga

SEQ ID NO: 52194 - protein, 177 aa, Streptomyces avermitilis MA-4680
MTAPVVGIVMGSDSDWPVMEAAAQALDEFEIPYEVDVVSAHRMPHEMIAYGEQAAERGLKAIIAGAGGAAHLPGMLASVTPLPVIGVPVPLKYLDGMDSLLSIVQMPAGVPVATVSVGGARNAGLLAARMLAAHDAELLTRMREFQQELNDQATEKGKRLRAKVDGASGGFGFGSGK

SEQ ID NO: 52195 - DNA, 486 bp, Bacillus cereus ATCC 14579
  CDS (1)..(486): transl_table=11
atgaaatcactagttggagtcataatgggaagtacgtcagactgggaaacaatgaaatatgcttgtgacattttagatgaattaaatataccgtatgagaaaaaagttgtatccgctcatcggactccggattatatgtttgaatatgcagagacggctcgtgaacgtggattgaaagttattattgctggagctggtggagcagcacatttaccaggaatggttgcagcgaagacaaatcttcctgtaattggagttccagttcaatcaaaagcattaaacggcttagattcattattatccatcgcccaaatgccaggaggtgttccagttgcaactgttgcaattggtaaagccggttcaacgaatgctggattacttgccgcacaaatacttggatcatttcatgatgatatacatgatgcattagaattgagacgagaagcgattgaaaaagatgtgcgtgaaggtagtgagctagtatga

SEQ ID NO: 52196 - protein, 161 aa, Bacillus cereus ATCC 14579
MKSLVGVIMGSTSDWETMKYACDILDELNIPYEKKVVSAHRTPDYMFEYAETARERGLKVIIAGAGGAAHLPGMVAAKTNLPVIGVPVQSKALNGLDSLLSIAQMPGGVPVATVAIGKAGSTNAGLLAAQILGSFHDDIHDALELRREAIEKDVREGSELV

SEQ ID NO: 52197 - DNA, 498 bp, Nitrosomonas europaea ATCC 19718
  CDS (1)..(498): transl_table=11
gtggatcatccggtagtcagcatcgtaatgggcagcagcagtgactggcaggtaatgcgacatgctgcaagcgttttgaaaaacttctgtattccgcatgaaaccatgattatctcggcacatcgcacgcctgacaggatgtttgaatatgccgaaacagctcatgaccgtggaatcaggtgtatcatcgccggtgcgggaggtgctgcccatctccccggcatgattgctgccaaaaccacactccccgttctgggggttccggttacatcaaaacatttacagggtgtggattcactgttatccatcgtacagatgcccaagggtgtgccagttgccacttttgccatcggagaagcaggtgcagccaacgccgcactgtttgctgctgccattctggccgggggagatatctcactggccgaaaaactcgatcaatttcgcaaggatcaggctgcctctgtcgctgcgatgacgctccccgaatcatgtacataa

SEQ ID NO: 52198 - protein, 165 aa, Nitrosomonas europaea ATCC 19718
MDHPVVSIVMGSSSDWQVMRHAASVLKNFCIPHETMIISAHRTPDRMFEYAETAHDRGIRCIIAGAGGAAHLPGMIAAKTTLPVLGVPVTSKHLQGVDSLLSIVQMPKGVPVATFAIGEAGAANAALFAAAILAGGDISLAEKLDQFRKDQAASVAAMTLPESCT

SEQ ID NO: 52199 - DNA, 525 bp, Mycobacterium bovis AF2122/97
  CDS (1)..(525): transl_table=11
atgactcctgccggcgagcggccccgggtcggggtgatcatgggcagcgacagcgactggccggtgatggccgacgctgcggcggcgctggccgagttcgacattccggccgaggttcgggttgtttcggcccatcgcacccctgaggcgatgttcagttatgcgcgcggcgcggccgagcgcggtctcgaggtgatcatcgccggagcgggcggggccgcgcacttgcccggtatggtcgccgccgcgacgccgctgccggtgatcggggtgccggtaccgctgggcaggctggacggccttgactccctgctgtcgatcgtgcaaatgccggccggggttccggtggccacggtgtccatcgggggcgcccgtaatgccggactgctggcggtgcggatgctgggagccgccaacccccagctgagggcccggatcgtcgcattccaggaccggctggccgacgtcgtggcggccaaggatgcggaactgcagcggcttgcgggtaagttaacccgcgactag

SEQ ID NO: 52200 - protein, 174 aa, Mycobacterium bovis AF2122/97
MTPAGERPRVGVIMGSDSDWPVMADAAAALAEFDIPAEVRVVSAHRTPEAMFSYARGAAERGLEVIIAGAGGAAHLPGMVAAATPLPVIGVPVPLGRLDGLDSLLSIVQMPAGVPVATVSIGGARNAGLLAVRMLGAANPQLRARIVAFQDRLADVVAAKDAELQRLAGKLTRD

SEQ ID NO: 52201 - DNA, 495 bp, Helicobacter hepaticus ATCC 51449
  CDS (1)..(495): transl_table=11
atggattttgtaagcgtcattatgggaagtaaaagtgattggaatgtgatgagcgagtgcatagaagtgttaaagaaatttgatgtagcctatgaggtaataatcagttcggctcatcgctcaccagagcgcacaaaatcatacattaaagatgcacaatctcgtggtgcgcaggttttcattggagcagcaggtatggcagcacacttagccggggctatcgcctctcaaacttgtaagcccgttattggtgtgccacttaatggaggtgcattagatggacttgatgctcttctctcaacagtgcaaatgccaagctcaatgcctgtggcaacgacaagtattggtaaagccggggcgattaatgcagcatatttagcaatgcaaattttaagccttaaaaatgatgaacttgcgggcaaattaatagaagatagagtgatgaaagcaaaaaaggtagaactagattcagcagagattgaagtgagaatttaa

SEQ ID NO: 52202 - protein, 164 aa, Helicobacter hepaticus ATCC 51449
MDFVSVIMGSKSDWNVMSECIEVLKKFDVAYEVIISSAHRSPERTKSYIKDAQSRGAQVFIGAAGMAAHLAGAIASQTCKPVIGVPLNGGALDGLDALLSTVQMPSSMPVATTSIGKAGAINAAYLAMQILSLKNDELAGKLIEDRVMKAKKVELDSAEIEVRI

SEQ ID NO: 52203 - DNA, 519 bp, Rhodopirellula baltica SH 1
  CDS (1)..(519): transl_table=11
atgactgaccaagacgattccgcgaccgattcgcttttgcctcgtgttggtgtgatcatgggcagccgcaatgactgggacaccatgtcagcggcctgcgagatgctggatcttctcggcgtagagcatgagcgatccgtcgtttccgctcaccgtacacccgaacgcatgttcgaatacgctcgatcggccgcgtcccgaggattgaaagtcatcattgcgggagccggtggcgccgcccatctgccgggaatggtcgcttcggaaacggttttgccagtgatcggcgtgcccattcaaagccgggctttgcagggattggattcgttgctttccatcgtccagatgccaggtggaattccggtagcgacgatgtcgatcggtgtggcgggagcgaagaacgcaggggtgatggcagctcgtattttggcgacccacgacgaggcactccgcggtcgtctcgaggcattcgttgcaaaacaacgtgacgacgtgatcgcatcggcagagcttccatga

SEQ ID NO: 52204 - protein, 172 aa, Rhodopirellula baltica SH 1
MTDQDDSATDSLLPRVGVIMGSRNDWDTMSAACEMLDLLGVEHERSVVSAHRTPERMFEYARSAASRGLKVIIAGAGGAAHLPGMVASETVLPVIGVPIQSRALQGLDSLLSIVQMPGGIPVATMSIGVAGAKNAGVMAARILATHDEALRGRLEAFVAKQRDDVIASAELP

SEQ ID NO: 52205 - DNA, 495 bp, Wigglesworthia glossinidia endosymbiont of Glossina brevipalpis
  CDS (1)..(495): transl_table=11
atgaataaaaacaataaagtagcaattattatgggctctaaaagcgattggaatacattgaaacatgcatctaatgctctaaaagatttaaaaattaaatttactacacatattatttctgctcataggactccagataaattatttgaatttgctgaacaagctaaaaaaaatggttactgtgtgattattgctggagctggtggagcagctcatttaccaggaatgttagcatctaaaacattaataccagttttaggagttcctgtagaaaatagtcctttgaatggattagatagtttatattctatagtacaaatgccatctgaagttccagtaggaactttagctattggaaaatctggtgctattaattccgctatactagcttctcaaattttatcattaaatgattacgaattatatattagattaaaattgagaagaaaagaaaaagaaaatcaaatattaaattatgagaactcaattttataa

SEQ ID NO: 52206 - protein, 164 aa, Wigglesworthia glossinidia endosymbiont of Glossina brevipalpis
MNKNNKVAIIMGSKSDWNTLKHASNALKDLKIKFTTHIISAHRTPDKLFEFAEQAKKNGYCVIIAGAGGAAHLPGMLASKTLIPVLGVPVENSPLNGLDSLYSIVQMPSEVPVGTLAIGKSGAINSAILASQILSLNDYELYIRLKLRRKEKENQILNYENSIL

SEQ ID NO: 52207 - DNA, 489 bp, Haemophilus ducreyi 35000HP
  CDS (1)..(489): transl_table=11
atgttacaacaaaaagcagaaattgcggtcgtaatgggttcaaaaagtgactgggcaacaatttcagaagcaacacaaatcttagaacaatttgatcttgcctatcatgtcgaagtagtatcggcacatcggacccccgataaactattttcgtttgctgaatctgccgaacaaaatggctataaagtaattattgcaggtgcaggtggcgcggcgcatttgccgggtatgattgctgcaaaaacaattgtaccggtattaggtgttccggttaaaagctcaatgttaaatggcatggatagcttatattctatcgttcaaatgccaaaaggtattccagttggaacattagcgataggtgctgcaaatgctgcactattagcggttcagattttagctgtttttcaacctgaattggctaaaaaacttcatgcctttcggcaacaacaaactcaactagtattagataaccccgattcacgtgattaa

SEQ ID NO: 52208 - protein, 162 aa, Haemophilus ducreyi 35000HP
MLQQKAEIAVVMGSKSDWATISEATQILEQFDLAYHVEVVSAHRTPDKLFSFAESAEQNGYKVIIAGAGGAAHLPGMIAAKTIVPVLGVPVKSSMLNGMDSLYSIVQMPKGIPVGTLAIGAANAALLAVQILAVFQPELAKKLHAFRQQQTQLVLDNPDSRD

SEQ ID NO: 52209 - DNA, 492 bp, Prochlorococcus marinus subsp. marinus str. CCMP1375
  CDS (1)..(492): transl_table=11
atgggaagtgattccgatttacctttccttgagccagctattaaagttttagaggggtttaacctccaagtagagacaagagtactttcagcacatcgaacaccactaaaaatggtctcgtttgctcgtgaagccgaagggaaaggtttaaaagtcattattgcaggagctggtggatcggcgcatcttccagggatggttgcttcacttacaagtcttccagtaattggggtccctatacaaagcaaatgcttaaaaggcattgactctttatattccattgttcagatgcctgcagggatcccagtagcaacagtagcgatcaatggtggattaaatgctggtctattagcagctcagatattaagcacgattcagccagaattaaaaattaaaatttcccaatatagaaaagaactacataatcaagttatacataaagacaaaaagctaatcgaattaggtgcatcaaagtatttagaagaaatgtaa

SEQ ID NO: 52210 - protein, 163 aa, Prochlorococcus marinus subsp. marinus str. CCMP1375
MGSDSDLPFLEPAIKVLEGFNLQVETRVLSAHRTPLKMVSFAREAEGKGLKVIIAGAGGSAHLPGMVASLTSLPVIGVPIQSKCLKGIDSLYSIVQMPAGIPVATVAINGGLNAGLLAAQILSTIQPELKIKISQYRKELHNQVIHKDKKLIELGASKYLEEM

SEQ ID NO: 52211 - DNA, 441 bp, Bordetella parapertussis 12822
  CDS (1)..(441): transl_table=11
atgaaacacgccgtggccatgctgcaggacttcggcgtggcgcacgaggcgcgcgtgatttcggcgcaccgcatgccgcaggacatggccgagtatggcgcggcggcgcgcgcgcgcggcttgcgcgccatcattgccggcgccggcggcgcggcccacctgcctggcatgatggccgcgctgaccgaggtgccggtattcggcgtgccggttccgtccaggtatctgcgcggcgaggactcgctgctttccatcgtgcagatgcccaagggcgtgccggtggccacctttgccatcggcgagtccggcgcggccaacgcggcgctgcatgccatcgccacgctggccaccaccgacgacgccctgcacgcccggctggtcgcgttccgcgcgcggcagaccgatgcggcgcgcgccatgaaagtgcctcccgaagcctga

SEQ ID NO: 52212 - protein, 146 aa, Bordetella parapertussis 12822
MKHAVAMLQDFGVAHEARVISAHRMPQDMAEYGAAARARGLRAIIAGAGGAAHLPGMMAALTEVPVFGVPVPSRYLRGEDSLLSIVQMPKGVPVATFAIGESGAANAALHAIATLATTDDALHARLVAFRARQTDAARAMKVPPEA

SEQ ID NO: 52213 - DNA, 480 bp, Bordetella bronchiseptica RB50
  CDS (1)..(480): transl_table=11
gtgggcgtgatcatgggatcttccagcgactgggaggtcatgaaacacgccgtggccatgctgcaggacttcggcgtggcgcacgaggcgcgcgtgatttcggcgcaccgcatgccgcaggacatggccgagtatggcgcggcggcgcgcgcgcgcggcttgcgcgccatcattgccggcgccggcggcgcggcccacctgcctggcatgatggccgcgctgaccgaggtgccggtattcggcgtgccggttccgtccaggtatctgcgcggcgaggactcgctgctttccatcgtgcagatgcccaagggcgtgccggtggccacctttgccatcggcgaggccggcgcggccaacgcggcgctgcatgccatcgccacgctggccaccaccgacgacgccctgcacgcccggctggtcgcgttccgcgcgcggcagaccgatgcggcgcgcgccatgaaagtgcctcccgaagcctga

SEQ ID NO: 52214 - protein, 159 aa, Bordetella bronchiseptica RB50
MGVIMGSSSDWEVMKHAVAMLQDFGVAHEARVISAHRMPQDMAEYGAAARARGLRAIIAGAGGAAHLPGMMAALTEVPVFGVPVPSRYLRGEDSLLSIVQMPKGVPVATFAIGEAGAANAALHAIATLATTDDALHARLVAFRARQTDAARAMKVPPEA

SEQ ID NO: 52215 - DNA, 492 bp, Prochlorococcus marinus subsp. pastoris str. CCMP1986
  CDS (1)..(492): transl_table=11
atgggaagtgattcagatctaaaaacattgaaacctgcaatagatatattgaacgaatttggaatagaaactgaggtttgtatactttctgcgcatagaacgccaatggaaatgatggaatatgcaaaaaaagcagaatcagaaaacataaaagttattatcgcaggagccggtggagctgctcacctgcctggcatgatagcttcgctaacatgcatacctgtcataggtgtaccggtggagagtaaaaccctgaaaggaattgactccctattatcaatagtgcaaatgcctgcgggtattcctgtagcaacagtagccataaacggtgcaaaaaatgctggtttattagcaattcaaatccttagtttatttgatgaagcattaagattaaaaatgaaaaaatttagagagaatctgcatacacaagtaagaactaaaaatagtaaattgtctgctctaggggctgataattatctgaaaactgactaa

SEQ ID NO: 52216 - protein, 163 aa, Prochlorococcus marinus subsp. pastoris str. CCMP1986
MGSDSDLKTLKPAIDILNEFGIETEVCILSAHRTPMEMMEYAKKAESENIKVIIAGAGGAAHLPGMIASLTCIPVIGVPVESKTLKGIDSLLSIVQMPAGIPVATVAINGAKNAGLLAIQILSLFDEALRLKMKKFRENLHTQVRTKNSKLSALGADNYLKTD

SEQ ID NO: 52217 - DNA, 492 bp, Prochlorococcus marinus str. MIT 9313
  CDS (1)..(492): transl_table=11
atgggtagtgattctgatttgccaaccctgcaaccggccgtcaccgtcttagaggagttcggtgtgaaggtggaggtgcgtgtgctttctgcgcaccgtacgccccttgagatggtggcctttgcaaaggaagctcatcagagaggtttgaaggtgatcgtggcaggtgccggcggtgctgctcatttgccgggcatggtggcgtcactcaccacgctgccagtgattggagtacctgtgcagagcagggctctttccggggtggattccttgcattcgattgtgcagatgcctgggggaatccctgtggcaacagtggcgattggtggagggcttaatgctggcttgctggcggctcagatcctggcgatctgtgatccacagcttgcagagcggttgagggcctaccgccaggatcttcacgatgctgtggtagccaaggatgctcgcttgttggagcttggcagtgaggcttatttggggcagatgtga

SEQ ID NO: 52218 - protein, 163 aa, Prochlorococcus marinus str. MIT 9313
MGSDSDLPTLQPAVTVLEEFGVKVEVRVLSAHRTPLEMVAFAKEAHQRGLKVIVAGAGGAAHLPGMVASLTTLPVIGVPVQSRALSGVDSLHSIVQMPGGIPVATVAIGGGLNAGLLAAQILAICDPQLAERLRAYRQDLHDAVVAKDARLLELGSEAYLGQM

SEQ ID NO: 52219 - DNA, 501 bp, Synechococcus sp. WH 8102
  CDS (1)..(501): transl_table=11
atgggcagtgattccgatctgccgaccatggaaccggccgcggcgatcctgcgggaactgggggttgaggtggaggtgcgggtgttgtcagcccaccgcacaccgctggaaatggtggcctttgcccaggcggcccgcactgagggattcggtgtgattgtggccggtgccggtggtgccgcccatctgccggggatggtggcggccctcaccaccctgccggtgatcggtgttcccgtccgaagccgttctctgtccggggtggattcgctgcactcgatcgtgcagatgcccggtggtattcccgttgccacggtggccatcggcggtggcctcaatgccggattgctggctgctcagatcctgtcggtggcagacgaggcactggcggcccgactggcggactaccgccgcaggttgcacgatgcagtggcagccaaggatgcccgtctgctcgatctcggcagtacggcctatctcgacggcatgtcgaccccttga

SEQ ID NO: 52220 - protein, 166 aa, Synechococcus sp. WH 8102
MGSDSDLPTMEPAAAILRELGVEVEVRVLSAHRTPLEMVAFAQAARTEGFGVIVAGAGGAAHLPGMVAALTTLPVIGVPVRSRSLSGVDSLHSIVQMPGGIPVATVAIGGGLNAGLLAAQILSVADEALAARLADYRRRLHDAVAAKDARLLDLGSTAYLDGMSTP

SEQ ID NO: 52221 - DNA, 489 bp, Chromobacterium violaceum ATCC 12472
  CDS (1)..(489): transl_table=11
atgattgaagtcggcatcgtgatgggtagcaacagcgactgggaagtgatgcagcacgccgcccgcgtgctgaaaaacttcggcgtcgcctgcgaaacccgcgtcgtctccgcccaccgcaccccggacctgctgttccagtacgccgaagaagccgcgccgcgcggcctgaaggccatcatcgccggcgccggcggggccgcccatctgccgggcatgctggccgccaagacccacgtgccggtgctgggcgtgccggtgccgtccaaatacctgcgcggcgaggattcgctgctgtccatcgtccagatgcccaagggcatcccggtggccaccttcgccatcggcgaggccggcgccgccaacgccgcgctgttcgcggtggcgatgctggcgaccacccggccggaactggccgagcaactgatcggcttccgcaagcaacaggaagcaaccgtgctggcgatgacattgccggaggtcgaataa

SEQ ID NO: 52222 - protein, 162 aa, Chromobacterium violaceum ATCC 12472
MIEVGIVMGSNSDWEVMQHAARVLKNFGVACETRVVSAHRTPDLLFQYAEEAAPRGLKAIIAGAGGAAHLPGMLAAKTHVPVLGVPVPSKYLRGEDSLLSIVQMPKGIPVATFAIGEAGAANAALFAVAMLATTRPELAEQLIGFRKQQEATVLAMTLPEVE

SEQ ID NO: 52223 - DNA, 507 bp, Porphyromonas gingivalis W83
  CDS (1)..(507): transl_table=11
atgcagcctttggtaagcatcatcatgggtagtacttccgatctgcccattatggagaaagccgccaaaatgctcgatgaaatgcagattccattcgagatgttggcgctttcggctcatcgtactccggctgaagtagagacttttgcacacgaggccagagctcgcggtatcaaggtaattatcgctgctgccggtatggcagctcatttgtgtggcgtaattgcttccatgacgtctattccggtaataggtgtacccatcaatgccactcttgacggaatggatgctctgttagccatcgttcaaatgcctccggggatccccgttgctactgtggggatcaatgctgcccagaatgcagcacttttggccgtccagatgatggctaccggcgacgaagctctctatgctcgactggaggcctataaggagtcgctcaaagaaaaagtcgttaaggccaatcgcgagctggcagaggtgaagtacaacttcaaaacgaattaa

SEQ ID NO: 52224 - protein, 168 aa, Porphyromonas gingivalis W83
MQPLVSIIMGSTSDLPIMEKAAKMLDEMQIPFEMLALSAHRTPAEVETFAHEARARGIKVIIAAAGMAAHLCGVIASMTSIPVIGVPINATLDGMDALLAIVQMPPGIPVATVGINAAQNAALLAVQMMATGDEALYARLEAYKESLKEKVVKANRELAEVKYNFKTN

SEQ ID NO: 52225 - DNA, 495 bp, Wolinella succinogenes DSM 1740
  CDS (1)..(495): transl_table=11
atgcagtttgtgtcgattctaatgggcagtaagtccgatgccgaggtgatgagagagtgtgcggagattttcaaaaaatttgatgttccctatgagatgatcatcagctccgcccaccgaagtcctgtgcgcaccaaagagtatgtgctggaagctgaggccaggggagcaaaagtctttatcgctgctgcgggcatggcggctcacttggcgggagccatctcctctatgaccaccaagcccgtgattggtgtgcccatgggcggagggacgcttggaggattggatgcgctactctccaccgtccaaatgccctcagggatgcccgtgggaacagtcgctattggaaagacaggagcagtgaatagtgcctatttggcgatgcagattttggcccttggcaatgatgagctagcgggcaaactcaaagaggatcgcgtgatgaaggccaaaaatgtggagcttgattccgcagagattgaggttttgctctag

SEQ ID NO: 52226 - protein, 164 aa, Wolinella succinogenes DSM 1740
MQFVSILMGSKSDAEVMRECAEIFKKFDVPYEMIISSAHRSPVRTKEYVLEAEARGAKVFIAAAGMAAHLAGAISSMTTKPVIGVPMGGGTLGGLDALLSTVQMPSGMPVGTVAIGKTGAVNSAYLAMQILALGNDELAGKLKEDRVMKAKNVELDSAEIEVLL

SEQ ID NO: 52227 - DNA, 1923 bp, Oryza sativa (japonica cultivar-group)
  CDS (1)..(1923)
atgcactccaggctcctcagcgccccctcccacgcctccgccgcctcctcctcccccctccccttcgccgccgcccacccttgccgcgcctcctggacgccgcggcccacctccccgctgccgcctctatcgctgctgcgcgccaccgcctccatgcatccttctcctcctcccgaggggcatagcgaccagcctgtgcatggcgtcaccaacacggtcgtcggcgtgctggggggaggccagctggggaagatgctgtgccaggcggccagccagatgggggtcaggatggccatacttgatcccctcgaggactgcccggcgagctcggtttgccacgagcatgtcgtcgggagcttcaatgatggcgccacggttagcgagttcgcaaagaggtgcggggttttgacggtggaaattgagcatgtcgacgctgtaacactcgagaagcttgagaaacagggcatcgattgtgagcccaaagcctccaccatcatgattattcaagacaagtacaggcagaaaactcatttctcaaaatttggaattccgttacctgactttgtggaagtagatactttaagtagcatagagaaagctggggaaatgtttggttatcctctaatggtcaaaagcaagagattagcatatgatggccgtggaaatgctgttgctcacgacaaaaaagagctatcttctgttgttgcttctcttggtgggtttgagcatggcttgtatgttgagaggtggacatcttttgtaaaggagctttctgtcattgtggcaaggagcagagacggttctacggtgtgctatcctgttgttgaaaccatccacaaggataacatctgccatgttgttgaggctcctgccgaggtgcctgataaaataaagaagttggctactaatgtagctgaaaaggctatcaaatcattggaaggtgctggtgttttcgctgtagaattatttttaacacaagataatcaggttttattgaatgaagtagctccaaggcctcacaacagtgggcatcacacaattgagtcatgttatacctcgcaatatgagcaacatttacgtgctattcttggccttcctcttggtgatccttcaatgaaagcgcctgcatcaataatgtacaacatcctgggtgaggatgagggtgaggcaggatttactcaagctcatcagttgattgagagagctttggacatttcaggtgcatctgtccattggtatgcaaaaccagaaatacggaagcagagaaagatgggccatattacaattgtggggccttcaaagtacagtgtaaaagcacgcttagataagttgctgcaaagagacgcatatgaccccaagaaagttaaacctcgtgctgcaataataatgggttctgattctgatcttcctgtcatgaaagatgctgcagtagtattgaagaaattcaacataccttttgagcttacaattgtttcggctcatcgtacaccagagaggatgtaccattatgcattatctactaaagaaagaggcttagaggtcataattgcagggatggtggcttcattgacttctgtcccagtaataggagtacccatcatgacttcatctttacatggaactgattccctcctatctattgtccagatgccgaaaggtattcctgttgctactgttgcaattggaaatgcggaaaatgcaggtttattggcagttaggatgctggcctcaagagatcctgagttgggggacaagtatgatttcttcttttctgcaattgtcctgcaaattttgaagtttgacacctcccagcaggcaactgaataccagcatgatctgagggatatggtgttggagaaagcaaaaaggctcgaggaactaggttgggaggaatataccgagctatacttgaagaagcattga

SEQ ID NO: 52228 - protein, 640 aa, Oryza sativa (japonica cultivar-group)
MHSRLLSAPSHASAASSSPLPFAAAHPCRASWTPRPTSPLPPLSLLRATASMHPSPPPEGHSDQPVHGVTNTVVGVLGGGQLGKMLCQAASQMGVRMAILDPLEDCPASSVCHEHVVGSFNDGATVSEFAKRCGVLTVEIEHVDAVTLEKLEKQGIDCEPKASTIMIIQDKYRQKTHFSKFGIPLPDFVEVDTLSSIEKAGEMFGYPLMVKSKRLAYDGRGNAVAHDKKELSSVVASLGGFEHGLYVERWTSFVKELSVIVARSRDGSTVCYPVVETIHKDNICHVVEAPAEVPDKIKKLATNVAEKAIKSLEGAGVFAVELFLTQDNQVLLNEVAPRPHNSGHHTIESCYTSQYEQHLRAILGLPLGDPSMKAPASIMYNILGEDEGEAGFTQAHQLIERALDISGASVHWYAKPEIRKQRKMGHITIVGPSKYSVKARLDKLLQRDAYDPKKVKPRAAIIMGSDSDLPVMKDAAVVLKKFNIPFELTIVSAHRTPERMYHYALSTKERGLEVIIAGMVASLTSVPVIGVPIMTSSLHGTDSLLSIVQMPKGIPVATVAIGNAENAGLLAVRMLASRDPELGDKYDFFFSAIVLQILKFDTSQQATEYQHDLRDMVLEKAKRLEELGWEEYTELYLKKH

SEQ ID NO: 52229 - DNA, 516 bp, Gloeobacter violaceus PCC 7421
  CDS (1)..(516): transl_table=11
atgacccatcctgcgctggtggggatcatcatgggcagcgattcggatctgcccacgatgaaggcggcggccgaggtctgcaccgaattcgaggtgccctgttcggtggcgatcgtctcggcccaccgcacgccggagcgcatgtttgaatttgcggcgaccgcccactcccggggcttgaaggtgatcgtggccggggcgggcggggcggcccacctgccggggatggtggcggccctcacacccctgccggtgattggagtgccggtaccggtcaccgccctggggggcgtcgatgcgctctattcgattgtccagatgcccgcaggcattccggtggccaccgtggcgatcggcaacgcccgcaacgccggtctgctcgctgtgcagatcctggcgacggcggacccggtgttgcagcaaaaaatcgtcgcttatcgcgagcggctgcgcacggcggtcgagaaaaaacaggcccgcctcgaagagctgggttggcggaactacgagccttaa

SEQ ID NO: 52230 - protein, 171 aa, Gloeobacter violaceus PCC 7421
MTHPALVGIIMGSDSDLPTMKAAAEVCTEFEVPCSVAIVSAHRTPERMFEFAATAHSRGLKVIVAGAGGAAHLPGMVAALTPLPVIGVPVPVTALGGVDALYSIVQMPAGIPVATVAIGNARNAGLLAVQILATADPVLQQKIVAYRERLRTAVEKKQARLEELGWRNYEP

SEQ ID NO: 52231 - DNA, 531 bp, Photorhabdus luminescens subsp. laumondii TTO1
  CDS (1)..(531): transl_table=11
atgactgcccaacctgatttagcaggaacagctcaacacaatgccaaaatcgccattgtcatgggttctaaaagcgattggacgactatgcagcacgcggctgatatcctcacttctcttaatgtaccttttcatgttgaaattgtttctgctcaccgtacacccgataaactattcagttttgccgagcaagctgagcaaaatggttttgatgtcattatcgccggtgccggtggtgccgctcatttacccggcatgctggctgctaaaacgctggtaccggttctcggcgtacccgtacaaagtgctgcactaaatgggatagacagtctttactctattgtacagatgccaaaagggattcctgtcggcacacttgccattgggaaagctggcgcggcaaacgcagctctactggctgcacagattttggctcgtcataataaagatttactgaaacgcctcagccattggcgtgaaacacaaactcaggatgtactcgataatcccgatccgcgggaggaagcatga

SEQ ID NO: 52232 - protein, 176 aa, Photorhabdus luminescens subsp. laumondii TTO1
MTAQPDLAGTAQHNAKIAIVMGSKSDWTTMQHAADILTSLNVPFHVEIVSAHRTPDKLFSFAEQAEQNGFDVIIAGAGGAAHLPGMLAAKTLVPVLGVPVQSAALNGIDSLYSIVQMPKGIPVGTLAIGKAGAANAALLAAQILARHNKDLLKRLSHWRETQTQDVLDNPDPREEA

SEQ ID NO: 52233 - DNA, 501 bp, Corynebacterium diphtheriae NCTC 13129
  CDS (1)..(501): transl_table=11
atgacaccactcgtaggccttatcatgggctccgactccgactggcccaccgttgaaccagccgccgaggtactcgccgaattcggcatccccttcgaagtaggcgtagtttctgcacaccgtactccagagaaaatgctggcatacgcaaaaaccgcacatgagcgcggtctaaaatgtatcattgcctgcgccggcggtgccgcacacctacctggcatggtcgcagcagccaccccgctacccgtcatcggaatcccacgcgctctcaaagaactcgacggcatggattctctgctctccatcgtccaaatgccaggcggggttcccgttgctaccgtctccattggaggcgctaaaaacgcaggactgttggccgcacgaattcttggcgccggtgatccagaactagtaaccaagatggctgactaccaagaaaacatgcgccaagaagttgagcgcaaagatgccaacctcaagaagaaattgatgggcgagtaa

SEQ ID NO: 52234 - protein, 166 aa, Corynebacterium diphtheriae NCTC 13129
MTPLVGLIMGSDSDWPTVEPAAEVLAEFGIPFEVGVVSAHRTPEKMLAYAKTAHERGLKCIIACAGGAAHLPGMVAAATPLPVIGIPRALKELDGMDSLLSIVQMPGGVPVATVSIGGAKNAGLLAARILGAGDPELVTKMADYQENMRQEVERKDANLKKKLMGE

SEQ ID NO: 52235 - DNA, 489 bp, Rhodopseudomonas palustris CGA009
  CDS (1)..(489): transl_table=11
atgacagctcccgtcgcgatcatcatgggcagccagtcggactgggaaacgatgcggcacgccgccgacaccctgaccgccctcggcgtcgcccatgacacccagatcgtttccgcgcaccgcacccccgaccgcctttatgctttcgccaaaggcgcgaaggcagccggccaccgtatcgtcattgccggcgccggcggagccgcgcatctgccggggatgaccgcggcgctgacggagctgccggtgttcggcgtgccggtggaatccaagaccatgtcgggcctggattcgctgtattcgatcgtgcagatgccggccggcatcccggtcggcacgctggcgatcggcaaggccggcgcagtcaacgccgccctgctggctgcgagcgtgctggcgctgacagattccgatctggcgacccgactggcggcgtggcgcaaggcacagaccgattcggttgcggcccggccggagggcgcggcgtga

SEQ ID NO: 52236 - protein, 162 aa, Rhodopseudomonas palustris CGA009
MTAPVAIIMGSQSDWETMRHAADTLTALGVAHDTQIVSAHRTPDRLYAFAKGAKAAGHRIVIAGAGGAAHLPGMTAALTELPVFGVPVESKTMSGLDSLYSIVQMPAGIPVGTLAIGKAGAVNAALLAASVLALTDSDLATRLAAWRKAQTDSVAARPEGAA

SEQ ID NO: 52237 - DNA, 510 bp, Geobacter sulfurreducens PCA
  CDS (1)..(510): transl_table=11
atggaaaacccgcaggtactcatcattatgggaagtgattcggacgttcccgtcatggaagaagcggcaaaggcccttgatgctttcggcgtgacctgggaaatgcgagtggcgtcggcccaccgttcgccgaaaaaagcggcagatctcgcctcgaacgcggccgcgcgcggcgtgaaggcgatcatcgccggtgccggcgtggctgcccaccttgcgggggtcctcgccgccgagactattctgccggttatcgcggtaccaatgccgggaggggcgctcaacggcgttgatgccctgtactccatggtgcagatgcctggcgggattccggtggctactatggccatcggcaaggcaggagccaaaaatgccgggctgttcgcggtgcagatcctggccctcggggatgccgccatggccggcaggctcgtggaatacaaggcgagtatggcggaagaggtggaggccaaggatcgggcccttcaggtcaagttgggccgcgcgtag

SEQ ID NO: 52238 - protein, 169 aa, Geobacter sulfurreducens PCA
MENPQVLIIMGSDSDVPVMEEAAKALDAFGVTWEMRVASAHRSPKKAADLASNAAARGVKAIIAGAGVAAHLAGVLAAETILPVIAVPMPGGALNGVDALYSMVQMPGGIPVATMAIGKAGAKNAGLFAVQILALGDAAMAGRLVEYKASMAEEVEAKDRALQVKLGRA

SEQ ID NO: 52239 - DNA, 552 bp, Geobacter sulfurreducens PCA
  CDS (1)..(552): transl_table=11
atggaaaaagtcgaaacatcgagcgcacccggcactctcgccgaccgctcgccgctggtgggaatcctgaccgggagccccaatgatctgcccacggtggtgaaggtgcgcgacaccctgaccgagctcggcatcccgagcgagatcgtggtggcttcggcccaccggacccccgacaaggtcctcgcctacctggaccgggcccataaggaaggggtgcaggtactgatcggctgcgccggcgtggccgctcacctggcgggtgtaatcgccgggcacacgagattgccggtcatcggtttgccgctcggcaacggccccttgtcagggatggacagcctcctctcgaccgtgcagatgcccccgggcgtgccggttgccacggtggccatcgacgggagccgcaatgcggccatgctggcggcccgcattctggccctcaagtacccggagattgacaaggccctggaagaggcggctcggaaggagcgggagcgctacgacctgaccgccgatgaggccctggcaaaactcacctcgtgcgtcaagtaa

SEQ ID NO: 52240 - protein, 183 aa, Geobacter sulfurreducens PCA
MEKVETSSAPGTLADRSPLVGILTGSPNDLPTVVKVRDTLTELGIPSEIVVASAHRTPDKVLAYLDRAHKEGVQVLIGCAGVAAHLAGVIAGHTRLPVIGLPLGNGPLSGMDSLLSTVQMPPGVPVATVAIDGSRNAAMLAARILALKYPEIDKALEEAARKERERYDLTADEALAKLTSCVK

SEQ ID NO: 52241 - DNA, 1278 bp, Danio rerio
  CDS (1)..(1278)
atgtctactgcaacagaactaaaactaggtcaaaagctgaatgaggggaagaccaagcagatctttgagattttggatgagccgggtcatgtcctggtccagtctaaagatcagatcaccgcgggcaatgcggttcggaaggatcagatggagggcaaagctgctattgccaacaagaccaccagctgtgtgtttaaacttttacaagatgctgggcttaagaccgcatttgtcaggcagcattctgacactgcatttgtggcatctcgatgtgaaatgatacccattgaatgggtctgcagacgtatcgccacgggttccttcctcaaacgcaaccctggggttaaagagggctaccgcttcactcctttaaaaatggagatgttttttaaggatgatgccaataatgaccctcaatggtcagaagagcagctgttggcagctggttttgacctggctggactgactattggtcgctgtgaggtggacatcatgagcaaaagcactgtggccatttttgaagtcctggagaaggcttgggccacccaggactgcacgctggtggatatgaaaatagaatttggagtaaatgtgaccactaaggagattgtgctggctgatgtgattgacaatgactcatggaggctctggccagctggggatcgcagccagcagaaagacaaacaggtgtaccgtgacctgaaagaagtcactcccgaggccatgcagatggtaaagaggaacttcgagtgggtcgcagagcgagttaagctgctcctggagtcccaggcgagaggaagggtggtagttatgatgggctccacctcagatgtggctcactgtgagaagatccgtaaagcttgtgcttcatatggcattccctgccacctcagagtcaactctgcccataaaggccctgatgagacactccgcatcaaagctgaatatgagggcgatggagaacctactatctttgttgcagtggcaggcagaagtaacggcttgggtcctgtgatgtcaggaaacactgcttatccagtcattaactgtccccctgtaacccctgactggggagctcaggacatctggtcgtctcttcgcatgcctagtggtctgggctgctccactgttctttctcctgaagctgctgctcagtttgcagcgcagatcctgggtctaaacaaccatttgatttgggccaaacttcgtgcatccatgctgaacacctgggtctccctgaaacaggctgataaaaagatgcaagactgcagcctttaa

SEQ ID NO: 52242 - protein, 425 aa, Danio rerio
MSTATELKLGQKLNEGKTKQIFEILDEPGHVLVQSKDQITAGNAVRKDQMEGKAAIANKTTSCVFKLLQDAGLKTAFVRQHSDTAFVASRCEMIPIEWVCRRIATGSFLKRNPGVKEGYRFTPLKMEMFFKDDANNDPQWSEEQLLAAGFDLAGLTIGRCEVDIMSKSTVAIFEVLEKAWATQDCTLVDMKIEFGVNVTTKEIVLADVIDNDSWRLWPAGDRSQQKDKQVYRDLKEVTPEAMQMVKRNFEWVAERVKLLLESQARGRVVVMMGSTSDVAHCEKIRKACASYGIPCHLRVNSAHKGPDETLRIKAEYEGDGEPTIFVAVAGRSNGLGPVMSGNTAYPVINCPPVTPDWGAQDIWSSLRMPSGLGCSTVLSPEAAAQFAAQILGLNNHLIWAKLRASMLNTWVSLKQADKKMQDCSL

SEQ ID NO: 52243 - DNA, 522 bp, Mycobacterium avium subsp. paratuberculosis K-10
  CDS (1)..(522): transl_table=11
atgagcgtgaccgaagctcctcgcgtcgcggtgatcatgggcagcgacagcgactggtcggtgatggccgacgccgcggccgcgctggccgagttcgacgtgcccgccgaggtgcgggtggtctcggcgcaccgcacgccgggggtgatgttcgactacgcgcgcgacgccgccgggcggggcatcgaggtgatcatcgccggcgccggaggcgccgcccacctgcccggcatggtcgcctcggcgacgccgctgccggtgatcggggtcccggtgccgctgggccggctggacgggctggactcgctgctgtcgatcgtgcagatgcccgcgggggtgccggtggccaccgtctccatcggcggcgcccgcaacgccggcctgctggcggtgcgcatcctcggcgcctccgacccggggctgcgggcccgcatcgtcgagttccagacccagctggccgacagcgtgcgggccaaggatgaggcgctgcaaaggctgcacggtaaagttaccggtcagtag

SEQ ID NO: 52244 - protein, 173 aa, Mycobacterium avium subsp. paratuberculosis K-10
MSVTEAPRVAVIMGSDSDWSVMADAAAALAEFDVPAEVRVVSAHRTPGVMFDYARDAAGRGIEVIIAGAGGAAHLPGMVASATPLPVIGVPVPLGRLDGLDSLLSIVQMPAGVPVATVSIGGARNAGLLAVRILGASDPGLRARIVEFQTQLADSVRAKDEALQRLHGKVTGQ

SEQ ID NO: 52245 - DNA, 501 bp, Wolbachia endosymbiont of Drosophila melanogaster
  CDS (1)..(501): transl_table=11
gtgttgaatatgacaaaaataaaaaaagatgttgctgttattatgggaagtgagtcagattacaccactatggtccatactgttgatatgttaaaagcattagaagtttcacatgatatattcataatatctgcacatagaacaccagaaagactcttcaattttgctaaatctgcacaagaagaaggttttaaggttattatagctggtgcaggaggtgcagctcatttacctggtatggttgcgtcactaacttgtttaccagttatcggcgttcctgtgcatagtaaacaattaaatgggctggacagcctactctctatagttcaaatgccaaagggtgttccagttgcaaccatgtctatagggggaaatggagcacataatgctgccattaccgccgtatctatattgtcaatttctaacagtgaaattgcaggtaggttaaaaaagtggagagagaagcagaccaaagaagtaaaagaaaaaccaatttcataa

SEQ ID NO: 52246 - protein, 166 aa, Wolbachia endosymbiont of Drosophila melanogaster
MLNMTKIKKDVAVIMGSESDYTTMVHTVDMLKALEVSHDIFIISAHRTPERLFNFAKSAQEEGFKVIIAGAGGAAHLPGMVASLTCLPVIGVPVHSKQLNGLDSLLSIVQMPKGVPVATMSIGGNGAHNAAITAVSILSISNSEIAGRLKKWREKQTKEVKEKPIS

SEQ ID NO: 52247 - DNA, 486 bp, Bacillus cereus ATCC 10987
  CDS (1)..(486): transl_table=11
atgaaatcactagttggagtcataatgggaagcacgtcagactgggaaacaatgaaatatgcttgtgacattttagatgaattaaatataccgtatgagaaaaaggttgtatccgctcatcggactccggattatatgtttgaatatgcagagacggctcgtgaacgtggattgaaagttattattgcgggagctggtggagcagcacatttaccaggaatggttgcagcgaagacgaatcttcctgtaatcggagttccagttcaatcaaaagcgttaaacggcttagattcattattatccatcgtccaaatgccaggaggggttccagttgcaactgttgcaattggtaaggctggttcaacaaatgctggtttacttgctgcacaaatacttggatcattccatgatgacatatatgatgcattagaattgagaagagaagcaattgaaaaagatgtgcgcgaaggtagtgagctagtatga

SEQ ID NO: 52248 - protein, 161 aa, Bacillus cereus ATCC 10987
MKSLVGVIMGSTSDWETMKYACDILDELNIPYEKKVVSAHRTPDYMFEYAETARERGLKVIIAGAGGAAHLPGMVAAKTNLPVIGVPVQSKALNGLDSLLSIVQMPGGVPVATVAIGKAGSTNAGLLAAQILGSFHDDIYDALELRREAIEKDVREGSELV

SEQ ID NO: 52249 - DNA, 1698 bp, Eremothecium gossypii
  CDS (1)..(1698)
atggaccataggactgtcggtatactgggcggcggccaactgggccgcatgattgtcgaggctgccaaccggctaaacgtgaagaccgtcgtgttggacgggccaaactcgcccgcaaagcaaatcaatgccgtgggagagcacgtggagggcagcttcggggtggctgcggacatcgaggagctcgcgcagcgcagcgacgtgctgactgtggagattgagcatgttgacgtgggcacgctgaggggcctgcaggcgaagatgccatcgcttacaatatacccgacgccggaggccattgagctgatccaggacaagcatgtgcagaaggagcacctgtcggggcacggtgttgcggtggcggagtctatcgcggtcgagggcacggagcctgcgctggtggctgttggcgagcagttggggtacccgtacatgctgaaggcgcgcaagctggcgtacgacggccgggggaactttgtggtgaagagtcgcgacagcatcgcggaggcgctggagacgctggccgacagatcgctctatgcagagcggtgggcgccctttgtgcgcgagctggcggtgatgatcgtgcgatcgccagagggacagctgttctcgtaccctatggtcgagacggtgcaccagaacaacatatgccacctatgctacgcgccagcgcgggttgctgactcaatccagctacgtgccaagcttctagccgaaagagccgtcgcaacgctgcctggcgcgggtatcttcggggtggagatgttcctgctggaggatggcgagctgttggtcaacgagatcgcgccccggccacataattctggccactacaccatcgatgcctgtgtgacctcgcagttcgaggcacacctgcggtcgattcttgggctgccgatgccgcgggggttctcatcgatggctacgtccaacacacacgctattatgctaaatgtgcttggcgacccgcaagtgaaggacaaggaactagcgatatgtgagcgcgccctggaaactcctggagcttcggtatacctgtacgggaaggagtcgaagccgaagaggaaggtcggccacataaatattgtggcttcctccatgcaagaagcggagcgcaaactcaggttcatcaccggcggggcagtgagtttggaagaggatgggcataacccacagggggatgcgtctcccctggttggaatcataatggggtccgactcggatctacccgttatgagcaaggcttgcgagatactgactcagttcggtgtcccatacgaggtgacgattgtctcagcccaccggacccctcataggatgtcgaagtacgccatcgaggcctctgagcgaggaatcaaggctatcattgcaggtgcaggcggtgccgctcatttgccgggaatggtcgcggccatgacccctctccccgtcattggggtgcctgtcaagggttcagtcctcgatggggtcgattcattacattctattgtacagatgcctaggggtgtgccggtggctaccgtcgcaatcaacaatagcaccaatgctgctctactcgctgttagacttctaggagcatacgacaccaagtaccacgccttgatgcaacagtttctcttgaaacaggaggaagaagttctaggcaaggcagaaaagttggaaacgattggatatagggcgtacttggatcaatag

SEQ ID NO: 52250 - protein, 565 aa, Eremothecium gossypii
MDHRTVGILGGGQLGRMIVEAANRLNVKTVVLDGPNSPAKQINAVGEHVEGSFGVAADIEELAQRSDVLTVEIEHVDVGTLRGLQAKMPSLTIYPTPEAIELIQDKHVQKEHLSGHGVAVAESIAVEGTEPALVAVGEQLGYPYMLKARKLAYDGRGNFVVKSRDSIAEALETLADRSLYAERWAPFVRELAVMIVRSPEGQLFSYPMVETVHQNNICHLCYAPARVADSIQLRAKLLAERAVATLPGAGIFGVEMFLLEDGELLVNEIAPRPHNSGHYTIDACVTSQFEAHLRSILGLPMPRGFSSMATSNTHAIMLNVLGDPQVKDKELAICERALETPGASVYLYGKESKPKRKVGHINIVASSMQEAERKLRFITGGAVSLEEDGHNPQGDASPLVGIIMGSDSDLPVMSKACEILTQFGVPYEVTIVSAHRTPHRMSKYAIEASERGIKAIIAGAGGAAHLPGMVAAMTPLPVIGVPVKGSVLDGVDSLHSIVQMPRGVPVATVAINNSTNAALLAVRLLGAYDTKYHALMQQFLLKQEEEVLGKAEKLETIGYRAYLDQ

SEQ ID NO: 52251 - DNA, 477 bp, Methanococcus maripaludis S2
  CDS (1)..(477): transl_table=11
atgataaccataattatgggaagtaaaagcgatgtaaaaattgcagaaaaggcagtttctattttaaaagaatttaaaattgattatgaggtaagagtggcttcagcacacagaacccctgaattagtcgaagaaattgttaaaaattcaaaatcaaaagtatttatcgcaattgcaggacttgcagcgcatttaccgggagttgttgcagcaatgactacaaaaccagttattgcagttccggtcgaaagtaaattagatggacttgatgcattgctaagcgctgttcagatgcctccaggaattcctgcagcttgtgttggaatcgatagaggagaaaatgccgcaattttagctgctgaaatgctctccatttctgatgaaagaattgaaaaaaaattagctgaatttagagaaaatcaaaagaaaaaaatattttcagatgatgcagaagtttcctcactttttaaaaactaa

SEQ ID NO: 52252 - protein, 158 aa, Methanococcus maripaludis S2
MITIIMGSKSDVKIAEKAVSILKEFKIDYEVRVASAHRTPELVEEIVKNSKSKVFIAIAGLAAHLPGVVAAMTTKPVIAVPVESKLDGLDALLSAVQMPPGIPAACVGIDRGENAAILAAEMLSISDERIEKKLAEFRENQKKKIFSDDAEVSSLFKN

SEQ ID NO: 52253 - DNA, 2994 bp, Dictyostelium discoideum
  CDS (1)..(2994)
atgacaacagcaataaataataatattgtaaataaagagtttgacttaaaagataaaacttttttagcatctggtaaaaccaaaaccatttatcaattaaataaagaagatcaatatgttttaattgaatcaaattcagcaattacagctggtgacggtgcaaaaaaggatattttaccaaataaagacatttattcaacaactacaaccgttaacaatttcaaagtattacaattatctggtattaatacccattttgttaaacaagttgaaccaaatgcattcattgcaaagaaatgttcaatgattccattggaagtaattgttagaagattagcaactggtagttatttaaaaagaaatacacatgttacagagggtactaaattcaatccaccattaatcgaatttacattcaaagatgatgttcaacatgatccattagttactgaacaagatattttagagatgaatttaaagattggtggcgttccaatcacttcaaaattattatctcaaactagacatattgcaactttatcatttgaagctttagaaagagcttggcaatcacttgatgtaactttagttgattttaaagttgaatttggtattacatcacaaggtgaattaattttagcagatgttattgataatgattcatggagaatttggccaaaaggtgataaaacattaatgaaagataaacaagtttatcgtaatcttccatctgcactcaatacaccaggtgcaacaccaacaacacaatctggtccattacttaatactttatcagatcaacaattaaaaatgattgaagataattatgcttgggttgcaacttccactgaaaaattagttgaattcactgctgcaaatttaaataataataataataataataataataatagtaataataataataataatacaagttctacatcaagatcaaatagtttaccaaatgtaccatcaataactacaacaccaactcttcaccatcatcatcatcatcatcaacaacaacaaagtggtgttggtaataataataatgttaattcaggatttcaagttcaattaaatcaaccattagttggaattattatgggtagtcaatcagattgggaaactatgaaattagcagcaaatacattaacaacattaggtgtaccatttgaaactagaattgtatcagcacatagaacacctgatagattatttgaatatgcaaaaacagcaaagagtagaggattaaaaattgtgattgcaggtgctggtggtgctgctcatttacctggcatggttgctgcattaactccattgcctgtatttggtgtaccagtgcaatccaaagcattgagtggtgttgatagtttattatcaatcgttcaaatgcctgctggtattcctgttggtactgttgcaattggtgctgctggtgctacaaatgctgctttattatctgctgctgttttggctccttattacccttcaatcgagttaagtttagatttatatagaaagaaacaaactgatgcagttgctgaaatacctgttgataatccaacatcaacatcaactactactactactacaactacatcaaatgcaacatcaattttatcagcaattcatacttcaacaattaatagtaatacatcatcacataataataatcaacaacagcaacaacaacaacaaacaatattaccaacacaaccaactataattaatacaccaacaccagttagatcatcagtatcaagatcacaatcaccattaccatcaggtaatggaagtagtattatatcacaagaaaagacaccattatcaacatttgtactttcaacatgtagaccatcagcattggtattgccaccaggttcaaccattggtattttgggtggcggtcaattagcaagaatgatggctattgcagcagcacaattaggttataagactcatattttctgtccagagaatgatccatccgcttcacatgttgcaacctataccactaaatcaaactataacaactattcagcattggacattttcgcaagacaagtcgatgttgtaacctatgaatttgaaaatattatggttgaaccagttgaatatctaaccaaacaagttgcagtattcccagatccaaagattttaagaacttgtcaagatcgtgttttagagaaaacattcattcaatcattggatataccaacagcacaattccaatctgtcgaatcatttaacgatttaaagagtgcaattgaaaagattggttatccagcaattcttaaatcaaatactatgggttatgatggtaaaggtcaagttaaattaaccgatcaagtcgatcttgaacaagcttggaaaaaggttacctctgaaacttgtgcaaccaaagcaatacttgaacaatatatagagtttgaatcagaagcatcagttattgtagcacgtgctttagatggaacagagttaaccttcccattggttaccaataaacatcgtaatcatattttacgtcaaaccattgcaccagctcaattgccagaatatattcataaacaagccaatgaaattggtttaaagattgctcgttccaatggtttggttggtattattgccgtcgaattatttgtagtgaaaaacaatgaaacaggtcaatactctttaatggtaaatgaattggcaccaagaccacacaatagtggtcattggaccatcgaaggttgtgtaacctctcaatttgaacaattgattcgttgtgtttgtggtttgcctttgggttcagtcgatttcactaaacgtataagtgaagctgaatttattcaacaacaaattccaccaattgtaatgacaaatcttttaggtcaagaagttaacggttgggaaaaaatacttcaaactaaaggttcacatcttcatatctatgctaaaggtgatgcaaaagaaggtcgtaaaatgggtcatgttactcaacaataa

SEQ ID NO: 52254 - protein, 997 aa, Dictyostelium discoideum
MTTAINNNIVNKEFDLKDKTFLASGKTKTIYQLNKEDQYVLIESNSAITAGDGAKKDILPNKDIYSTTTTVNNFKVLQLSGINTHFVKQVEPNAFIAKKCSMIPLEVIVRRLATGSYLKRNTHVTEGTKFNPPLIEFTFKDDVQHDPLVTEQDILEMNLKIGGVPITSKLLSQTRHIATLSFEALERAWQSLDVTLVDFKVEFGITSQGELILADVIDNDSWRIWPKGDKTLMKDKQVYRNLPSALNTPGATPTTQSGPLLNTLSDQQLKMIEDNYAWVATSTEKLVEFTAANLNNNNNNNNNNSNNNNNNTSSTSRSNSLPNVPSITTTPTLHHHHHHHQQQQSGVGNNNNVNSGFQVQLNQPLVGIIMGSQSDWETMKLAANTLTTLGVPFETRIVSAHRTPDRLFEYAKTAKSRGLKIVIAGAGGAAHLPGMVAALTPLPVFGVPVQSKALSGVDSLLSIVQMPAGIPVGTVAIGAAGATNAALLSAAVLAPYYPSIELSLDLYRKKQTDAVAEIPVDNPTSTSTTTTTTTTSNATSILSAIHTSTINSNTSSHNNNQQQQQQQQTILPTQPTIINTPTPVRSSVSRSQSPLPSGNGSSIISQEKTPLSTFVLSTCRPSALVLPPGSTIGILGGGQLARMMAIAAAQLGYKTHIFCPENDPSASHVATYTTKSNYNNYSALDIFARQVDVVTYEFENIMVEPVEYLTKQVAVFPDPKILRTCQDRVLEKTFIQSLDIPTAQFQSVESFNDLKSAIEKIGYPAILKSNTMGYDGKGQVKLTDQVDLEQAWKKVTSETCATKAILEQYIEFESEASVIVARALDGTELTFPLVTNKHRNHILRQTIAPAQLPEYIHKQANEIGLKIARSNGLVGIIAVELFVVKNNETGQYSLMVNELAPRPHNSGHWTIEGCVTSQFEQLIRCVCGLPLGSVDFTKRISEAEFIQQQIPPIVMTNLLGQEVNGWEKILQTKGSHLHIYAKGDAKEGRKMGHVTQQ

SEQ ID NO: 52255 - DNA, 489 bp, Leptospira interrogans serovar Copenhageni str. Fiocruz L1-130
  CDS (1)..(489): transl_table=11
ttgaacacaaaagttgcaatcattatgggaagccattccgattgggaaacgatgaaagaagcggagatcattcttaaagaatttggcgtttctattcacaaagaaattgtttctgcacatagatctcctgagcttatgttagaattttctaaatctgcaaaagaaaaaggttactccgtaatcatcgcaggagcaggaggtgcggcccatcttcccggaatggttgcatcgatgactactcttcctgttttaggagttccaatacaaagtaaaactttaaacggattggatagtttattatccatcgttcaaatgccagggggagttccagtaggaactcttgcgatcggaactgcaggcgcaaaaaatgctggtttattggcagtcagaattcttgcacttcaagatcctatactttccgaaaaactagaacgatatcgtaatcaaattcgagaagacgcactttctaaaaataaggatttattgtga

SEQ ID NO: 52256 - protein, 162 aa, Leptospira interrogans serovar Copenhageni str. Fiocruz L1-130
MNTKVAIIMGSHSDWETMKEAEIILKEFGVSIHKEIVSAHRSPELMLEFSKSAKEKGYSVIIAGAGGAAHLPGMVASMTTLPVLGVPIQSKTLNGLDSLLSIVQMPGGVPVGTLAIGTAGAKNAGLLAVRILALQDPILSEKLERYRNQIREDALSKNKDLL

SEQ ID NO: 52257 - DNA, 495 bp, Thermus thermophilus HB27
  CDS (1)..(495): transl_table=11
atggcgccgttggtaggcctgatcatgggttcccgctccgactgggagaccatgcgccacgcggcggagaccctcgaggccctgggcatcccctacgaggtgcgcgtggtctccgcccaccgcaccccagacctcatggcggagtacgccaagaccgccgaggaacgggggatccaggtgatcatcgccggggccgggggggcggcccacctccccggcatgaccgcggcccacaccgccctgcccgtcctcggggtgccggtggaaagccgggccctagggggcctagactccctcctttccatcgtgcagatgcccgcgggcgtccccgtgggcaccctggccatcgggaaagcaggggcggtgaacgccgctttgcttgccgcaagcatcctgggcctcaagcaccccgagatcctaaagcgcctcaaggcctaccgcaaggcccagacggaggccgtcctcgcccaccccgaccccagggaggaggcgtga

SEQ ID NO: 52258 - protein, 164 aa, Thermus thermophilus HB27
MAPLVGLIMGSRSDWETMRHAAETLEALGIPYEVRVVSAHRTPDLMAEYAKTAEERGIQVIIAGAGGAAHLPGMTAAHTALPVLGVPVESRALGGLDSLLSIVQMPAGVPVGTLAIGKAGAVNAALLAASILGLKHPEILKRLKAYRKAQTEAVLAHPDPREEA

SEQ ID NO: 52259 - DNA, 501 bp, Desulfovibrio vulgaris subsp. vulgaris str. Hildenborough
  CDS (1)..(501): transl_table=11
atgcccaaggtagccatcttcattggcagcatctccgacgaggagaccatcaaaccctgtaccgacgtcctgcgcagcctcggtatcagcttccgcttcacggtgagttccgcgcaccgcacccccgaacgcaccgaacgcctcgtcgaggaacttgaaggctctggaacgcaggtgttcatctgcgcggctggcatggcggcacaccttgcgggggcggtcgccgcccgcaccaccaagcccgtcatcggcatcccggtcacggcctcggcactgggcggcatggacgccctgcttgccacggtgcagatgcctcccggattccccgtcgccaccgtcgccctcgacaaggccggggcacgcaacgcggcatggcttgccgcccagatgctggcacttgccgaccccgaccttgccaagcgcatcgccgatgcacgcgcaggcttccgcgaggatgccgccaaggccggtgccgaccttgaggcgcgctaccccggctag

SEQ ID NO: 52260 - protein, 166 aa, Desulfovibrio vulgaris subsp. vulgaris str. Hildenborough
MPKVAIFIGSISDEETIKPCTDVLRSLGISFRFTVSSAHRTPERTERLVEELEGSGTQVFICAAGMAAHLAGAVAARTTKPVIGIPVTASALGGMDALLATVQMPPGFPVATVALDKAGARNAAWLAAQMLALADPDLAKRIADARAGFREDAAKAGADLEARYPG

SEQ ID NO: 52261 - DNA, 489 bp, Listeria monocytogenes str. 4b F2365
  CDS (1)..(489): transl_table=11
atgcctgctgtaattggtgtcattatggggagtacctcagattgggatacaatgaaaaaagcatgtgatgtattagatgaattagaaatagcttatgagaaaaaagtggtttctgctcatcgtacaccagattttatgtttcaatatgcagaacaagcgcgggaacgtggtttgaaaattattattgccggtgctgggggcgcggcgcatttgccaggtatgattgcggcaaagacgactttgcctgttattggtgtgccaattaaatcaaaagcgttgaatggaatggattcgttactttctattgtacagatgcctggaggtgtcccggtagcgacagttgctattggagaaagtggtgctgtaaatgctggccttctagcggcgcaaattttatccataacggacgatgcaattactaacagattacaaaaaagacgtgctacactagaagaaacagttctagaaagtagtgattatcttggataa

SEQ ID NO: 52262 - protein, 162 aa, Listeria monocytogenes str. 4b F2365
MPAVIGVIMGSTSDWDTMKKACDVLDELEIAYEKKVVSAHRTPDFMFQYAEQARERGLKIIIAGAGGAAHLPGMIAAKTTLPVIGVPIKSKALNGMDSLLSIVQMPGGVPVATVAIGESGAVNAGLLAAQILSITDDAITNRLQKRRATLEETVLESSDYLG

SEQ ID NO: 52263 - DNA, 450 bp, Picrophilus torridus DSM 9790
  CDS (1)..(450): transl_table=11
atgggcagctcatctgatcttgaaaccatgaaacccgcaattgaaacccttgaatcatttggcgttgaggtcatatcaaaaatagtatcggcgcacagaaccccggattttatgtatgaatttgcaaaaggtgcattaaacaatggcatcgaggttattatagcaggtgcaggaggtgccgcgcatctgcccggaatggttgcatccatgacaacattgcctgtcataggcgttccggtgccatcgaggcatctaaacggcctcgattcattgctatcgatagtgcagatgccatcaggcgttccggttgcaaccgttgcaataggcaatgcaaaaaatgcggcattgctagcgctaagaatactgtcaataaagtatgataagataagatcgtatttagaaaaatataataatgatgaaagaaacagggttcttggtgaaaagatatga

SEQ ID NO: 52264 - protein, 149 aa, Picrophilus torridus DSM 9790
MGSSSDLETMKPAIETLESFGVEVISKIVSAHRTPDFMYEFAKGALNNGIEVIIAGAGGAAHLPGMVASMTTLPVIGVPVPSRHLNGLDSLLSIVQMPSGVPVATVAIGNAKNAALLALRILSIKYDKIRSYLEKYNNDERNRVLGEKI

SEQ ID NO: 52265 - DNA, 486 bp, Bacillus anthracis str. Sterne
  CDS (1)..(486): transl_table=11
atgaaatcactagttggagtcataatgggaagcacgtcagactgggaaacaatgaaatatgcttgtgacattttagatgaattaaatataccgtatgagaaaaaggttgtatccgctcatcggactccggattatatgtttgaatatgcagagacggctcgtgaacgtggattgaaagttattattgctggagctggtggagcagcgcatttaccaggaatggttgcagcgaagacgaatcttcctgtaatcggagttccagttcaatcaaaagcgttaaacggcttagattcattattatccatcgtccaaatgccaggaggggttccagttgcaactgttgcaattggtaaggctggttcaacaaatgctggtttacttgctgcacaaatacttggatcattccatgatgacatacatgatgcattagaattgagaagagaagcaattgaaaaagatgtgcgcgaaggtagtgagctagtatga

SEQ ID NO: 52266 - protein, 161 aa, Bacillus anthracis str. Sterne
MKSLVGVIMGSTSDWETMKYACDILDELNIPYEKKVVSAHRTPDYMFEYAETARERGLKVIIAGAGGAAHLPGMVAAKTNLPVIGVPVQSKALNGLDSLLSIVQMPGGVPVATVAIGKAGSTNAGLLAAQILGSFHDDIHDALELRREAIEKDVREGSELV

SEQ ID NO: 52267 - DNA, 498 bp, Bartonella quintana str. Toulouse
  CDS (1)..(498): transl_table=11
atgacgaacgaatcatgtgacgtagcgattttaatgggtagccaatcggattggcaaacgatgcgccatagctcggatattttgacgtgtcttgatatttctcatagttcgcagattgtttcagcccaccgaacaccagaacgactttaccaatttgcaaaaggggcaaaagcagcaggttttaaagttttgatcgccggcgctggaggtgcagcccatcttcctggcatgctagcagcactgactccacttcctgtttttggagttccagtgcattcacaatttttatccggacaagattctttgctttcaattgtgcaaatgcctgcaggaataccggttggcacgctagcaattggcaaagcaggcgcaattaatgcagcgcttttagcagcagcagttatggcagtttatgatgatgatttggcacaacggttacaagattggcgtcagcaacaaacagccagtgtcgcgcaaatccccacaactgagatttaa

SEQ ID NO: 52268 - protein, 165 aa, Bartonella quintana str. Toulouse
MTNESCDVAILMGSQSDWQTMRHSSDILTCLDISHSSQIVSAHRTPERLYQFAKGAKAAGFKVLIAGAGGAAHLPGMLAALTPLPVFGVPVHSQFLSGQDSLLSIVQMPAGIPVGTLAIGKAGAINAALLAAAVMAVYDDDLAQRLQDWRQQQTASVAQIPTTEI

SEQ ID NO: 52269 - DNA, 498 bp, Bartonella henselae str. Houston-1
  CDS (1)..(498): transl_table=11
atgatgaaagaatcatgtgacgtagcgattttaatgggcagtcaatcggattggcaaacgatgcgccatagttcagatattttaacctgtcttggtatttctcatattgcacatattatctcagcccaccgaactcctgaacgactttaccaatttgcaaaaggagcaaaagcagcaggtttcaaagttttgattgccggagctggcggtgcagcgcatcttcctggtatgctagcagcactcacaccgcttcctgtttttggagttccagtgcactcacaatctctctctggtcaagattctttgctttcaattgtgcaaatgccggcaggaataccggttggcacgttagcaattggcaaagcaggagctattaatgcagcacttttagcagcagcagtaatggcagtttatgataatcatttggcacaacggttagacgattggcgtcagcaacaaacagccagtgtcgcgcaaacgcctgcaactgaggtttaa

SEQ ID NO: 52270 - protein, 165 aa, Bartonella henselae str. Houston-1
MMKESCDVAILMGSQSDWQTMRHSSDILTCLGISHIAHIISAHRTPERLYQFAKGAKAAGFKVLIAGAGGAAHLPGMLAALTPLPVFGVPVHSQSLSGQDSLLSIVQMPAGIPVGTLAIGKAGAINAALLAAAVMAVYDNHLAQRLDDWRQQQTASVAQTPATEV

SEQ ID NO: 52271 - DNA, 483 bp, Staphylococcus aureus subsp. aureus MRSA252
  CDS (1)..(483): transl_table=11
gtgaaagtagcagtcattatgggcagttcttccgattggaaaattatgcaagagagttgtaacatgttggattattttgaaattccgtacgaaaaacaagtagtatccgcacatcgtacgccaaaaacgatggttcaatttgcttctgaagcgagagaaagaggtatagacattatcattgcaggcgctggcggtgcggcacatttaccaggtatggttgcatcattaacgacgctaccagttattggagtgccgattgaaacaaaaagtttaaagggtatagattctttattatcaattgttcaaatgccaggaggtattccggttgcaacgactgcaattggtgcagcaggtgctaaaaatgcaggtatacttgcagcaagaatgttaagtattcaaaatccttctttagttgaaaaactaaatcagtatgaatcttcgttaattcaaaaagtggaggacatgcaaaatgaacttcaataa

SEQ ID NO: 52272 - protein, 160 aa, Staphylococcus aureus subsp. aureus MRSA252
MKVAVIMGSSSDWKIMQESCNMLDYFEIPYEKQVVSAHRTPKTMVQFASEARERGIDIIIAGAGGAAHLPGMVASLTTLPVIGVPIETKSLKGIDSLLSIVQMPGGIPVATTAIGAAGAKNAGILAARMLSIQNPSLVEKLNQYESSLIQKVEDMQNELQ

SEQ ID NO: 52273 - DNA, 483 bp, Staphylococcus aureus subsp. aureus MSSA476
  CDS (1)..(483): transl_table=11
gtgaaagtagcagtcattatgggcagttcttccgattggaaaattatgcaagagagttgtaacatgttggattattttgaaattccgtacgaaaaacaagtagtatccgcacatcgtacgccaaaaatgatggttcaatttgcttctgaagcgagagaaagaggtataaacattatcattgcaggcgctggcggtgcggcacatttaccaggtatggttgcatcattaacgacgctaccagttattggtgtgccgattgaaacaaaaagtttaaagggtatagattctttattatcaattgttcaaatgccaggaggtattccggttgcaacgactgcaattggtgcagcaggtgctaaaaacgcaggtatacttgcagcaagaatgttaagtattcaaaatccttctttagttgaaaaactaaatcagtatgaatcttcgttaattcaaaaagtggaggacatgcaaaatgagcttcaataa

SEQ ID NO: 52274 - protein, 160 aa, Staphylococcus aureus subsp. aureus MSSA476
MKVAVIMGSSSDWKIMQESCNMLDYFEIPYEKQVVSAHRTPKMMVQFASEARERGINIIIAGAGGAAHLPGMVASLTTLPVIGVPIETKSLKGIDSLLSIVQMPGGIPVATTAIGAAGAKNAGILAARMLSIQNPSLVEKLNQYESSLIQKVEDMQNELQ

SEQ ID NO: 52275 - DNA, 516 bp, Acinetobacter sp. ADP1
  CDS (1)..(516): transl_table=11
atgaacgcggtcgcagcgaaagatgctcaacccttagtcggaattattatgggttctcaatcggattgggcaactctagaacatactgccaatatgttgaaacaacttggtgtaccttttgaagctgaagttgtttccgcacaccggacaccagaccgtttatttgaatacgcagaaactgcgcgtgaccgtggtattcaggtgatcattgcaggtgcaggtggtgccgcgcatttaccagggatgtgtgctgccaaaaccgatttacccgttttaggtgttcctgtgaaatcatcaattttaaatggtgtggattctttgctttcaattgtacaaatgcctgcaggtattgcagtgggtacattggcgataggccctgcgggtgcaaccaatgctgcgattatggcagcccagattcttggcttgacccgtccagagattgcaaaaaatgttgtagattttcgtgcggcccaaaccgacaaggttgctagcaataatattccaggccaagcgtga

SEQ ID NO: 52276 - protein, 171 aa, Acinetobacter sp. ADP1
MNAVAAKDAQPLVGIIMGSQSDWATLEHTANMLKQLGVPFEAEVVSAHRTPDRLFEYAETARDRGIQVIIAGAGGAAHLPGMCAAKTDLPVLGVPVKSSILNGVDSLLSIVQMPAGIAVGTLAIGPAGATNAAIMAAQILGLTRPEIAKNVVDFRAAQTDKVASNNIPGQA

SEQ ID NO: 52277 - DNA, 510 bp, Erwinia carotovora subsp. atroseptica SCRI1043
  CDS (1)..(510): transl_table=11
atgtcatccaacgttgccccggctaaaattgccatcgtcatgggttcaaagagtgactgggccactatgcagtttgctgcggaaatcctcaccacgctgaacattccttttcataccgaagtcgtttccgcacaccggacgccggataaactgttcagcttcgctgagcaggcggcacaaaatggttttgatgtgattatcgctggcgctggcggcgcagcacacctgccaggtatgctggcagcgaaaacgctggttcctgtgctcggcgtgccagtacaaagctcgacgctgagcggtgtcgacagcctgtattccatcgttcaaatgcctcgtggtatcccggtcggcacgttggcaatcggcaaggcaggcgcagcgaatgcggctctgctggccgcacaaattcttgccctgcatgacaatggaatagcctctcgactagccgactggcgtcaggcgcaaacggatgatgtgctgtctcatcccgatccgcgggaggaggcatga

SEQ ID NO: 52278 - protein, 169 aa, Erwinia carotovora subsp. atroseptica SCRI1043
MSSNVAPAKIAIVMGSKSDWATMQFAAEILTTLNIPFHTEVVSAHRTPDKLFSFAEQAAQNGFDVIIAGAGGAAHLPGMLAAKTLVPVLGVPVQSSTLSGVDSLYSIVQMPRGIPVGTLAIGKAGAANAALLAAQILALHDNGIASRLADWRQAQTDDVLSHPDPREEA

SEQ ID NO: 52279 - DNA, 591 bp, Propionibacterium acnes KPA171202
  CDS (1)..(591): transl_table=11
atgcctgagaccaccactgctagccgtaagccgcgccgaggtgagaaggtcaaaacaaccaccgggggagcacgccggctggcgtgcgacgccaatggccctcaagtgtcgatcatcatgggctcggactctgactggccgacgatggagcctgcggctcaggtgcttaccgacttcaatgtgggatttgaggctgacgtcgtgtcggcccaccgcatgcctgaggacatgatcgagttcggtcgaggcgcgcacaagcgcggtatcaaggtgatcatcgccggtgctggcggtgccgcccatctgccgggcatggtcgccgcgctgaccccgctgccggttatcggggttcccgtgccgctagcccacctcgacggtatggattccttgctatcgatcgttcagatgccaggtggtgtgccggtggcgacggtcggcgtcggtaatgccaagaacgccggcctgctagcggtacggattcttgccgcgtcgacccctgagctgtgcgaggccatggtcaagtaccagtccgatttgcacgatgtggctgcgggcaagggcgagaaagtgcgtcgtcactcctgtccctga

SEQ ID NO: 52280 - protein, 196 aa, Propionibacterium acnes KPA171202
MPETTTASRKPRRGEKVKTTTGGARRLACDANGPQVSIIMGSDSDWPTMEPAAQVLTDFNVGFEADVVSAHRMPEDMIEFGRGAHKRGIKVIIAGAGGAAHLPGMVAALTPLPVIGVPVPLAHLDGMDSLLSIVQMPGGVPVATVGVGNAKNAGLLAVRILAASTPELCEAMVKYQSDLHDVAAGKGEKVRRHSCP

SEQ ID NO: 52281 - DNA, 612 bp, Streptococcus pyogenes MGAS10394
  CDS (1)..(612): transl_table=11
atgctaaagcacctagtcgccctgacgtgggttcgtcttcgaaatcaaagatttcggacttaccgcatatttttctacggaaagtttcgacaagtcgaaacgcccctttatatcttaattatgaaaactccaattatttctattatcatgggctccaaatctgactgggcaaccatgcaaaaaacggctgaaattctagacaactttggcattgcttacgagaagaaagtcgtctctgctcaccgcacgcccgacctcatgttcaagcatgctgaggaagcacgtggtcgtggcatcaaaatcatcatcgcaggagcaggtggggcagctcacttgcctggtatggtggcagctaaaacaacgctgcctgttatcggtgtgccagtcaaatcacgtgtcctttcaggtttggattcgctctattccattgtgcagatgcctggcggtgtgcctgtggcaaccatggctatcggagaagcgggagcgactaacgctgccctaacagccctccgtatcctttctatcgaggaccaaaatctggctgatgcgctagctcatttccatgaggaacaaggaaaaatcgcagaggagtcaagcaatgaactcatttaa

SEQ ID NO: 52282 - protein, 203 aa, Streptococcus pyogenes MGAS10394
MLKHLVALTWVRLRNQRFRTYRIFFYGKFRQVETPLYILIMKTPIISIIMGSKSDWATMQKTAEILDNFGIAYEKKVVSAHRTPDLMFKHAEEARGRGIKIIIAGAGGAAHLPGMVAAKTTLPVIGVPVKSRVLSGLDSLYSIVQMPGGVPVATMAIGEAGATNAALTALRILSIEDQNLADALAHFHEEQGKIAEESSNELI

SEQ ID NO: 52283 - DNA, 504 bp, Leifsonia xyli subsp. xyli str. CTCB07
  CDS (1)..(504): transl_table=11
atgtccgttccacccccgcccttggtgtccgtcgtgatgggttccgactcggactggccggtgatgcaggaagcctcgcggctgctcgccgaattcggtgtcgcgcacgaggtcgaggtcgtctccgcccaccgcacgccggagaggatgatcggcttcggcaaggtcgcggcctcccgcggtgtccgtgtgatcatcgccggagcggggggagccgcccacctgcccgggatgctcgccgccgtcaccacgctgcccgtggtgggcgttcctgtgccgctggcccgtctcgatgggctcgactcgctgctctcgatcgtgcagatgccggcgggcgtgccggtcgcgaccgtctccatcggcggtgcgcgcaacgcgggtcttctggccgtgaagatcctcgccacggccgatcccaggctcgcgagcatgcttgagcgcttcgccgccgaactggaggcgagcgtcgacgagaagaaccgcgcactgcaagcgaagctatga

SEQ ID NO: 52284 - protein, 167 aa, Leifsonia xyli subsp. xyli str. CTCB07
MSVPPPPLVSVVMGSDSDWPVMQEASRLLAEFGVAHEVEVVSAHRTPERMIGFGKVAASRGVRVIIAGAGGAAHLPGMLAAVTTLPVVGVPVPLARLDGLDSLLSIVQMPAGVPVATVSIGGARNAGLLAVKILATADPRLASMLERFAAELEASVDEKNRALQAKL

SEQ ID NO: 52285 - DNA, 1773 bp, Desulfotalea psychrophila LSv54
  CDS (1)..(1773): transl_table=11
atgaaggttcttgttgtgggttctggtgggcgtgagcatgcccttgtgtggaaaataaagcaaagtcagaaggttgaggaagttttttgtgcgcctggcaatgcagggattgaagaacttgctacctgcgtcaatatttcagcgaccgatataaagggtttgcttcattttgcccagaaagagaaaattgatcttaccgttgtagggccagaatcatctttggttgctggtatcgtggatctttttgaagaaaatggcctgcgtatatttggtcccagccaggctgccgcaatccttgagggaagtaaggtttttaccaaaaactttttgcaaaaatattctatcccgactgcagcctttggtgtctttaccgagcgagaggcggcaaaagagtacatcgagcaacagggtgcacccattgtagtaaaggcagatgggcttgccgcaggtaagggtgttgtggttgctaagaccatcgaggaagccaaaaaagccgtcgatgaaattatgcttgataaggcctttggtgaggctggtgatagtattgtcgtggagagttgtctcttgggtgaagaggcatcctttatcgcctttaccgatgggaaaacaattcttcccttgcctacctctcaggatcacaaggccgcatatgacggggataaggggcccaatacaggcggaatgggtgcctattcaccggcaccaatagtgaccgatgaaattacagaatatgtgatgacagaggttatgctaccaacgattaagggacttgccgctgagggacgtccctataagggtatgctctatgctggcctgatgatcgatggcgatgatattaaggtgcttgagtttaactgtcgatttggtgatccggaggcccagcctcttctcatgcgtcttaaaagtgatattattgatatctttgaagcatgcatagatggtacccttgatcgggtcgagatgaagattgatccacgccccacggtttgtgtggttatgtcctccggtggttaccccggagcatatgccagtggtgatattattaccggttttgagcaagccgataaggtggatggagtcgaagtgttccatgcaggaactgcgaaggagggtgaagctattgttagcaatggtggtcgagtattaggtattacctccattggtaaaactcttgagcaggcactggagagggcatataaggcaacagactgtattacttggaataagtgcttttatcgaaaagatataggtggcaaggccctggctaaaaagctggcgaagccgagtaagcctcttgtcggtattgtcatgggcagtgattcggatctgccaaccatgagggcagccagtgattttttacagagtgttggcattccctatgaaatgaccgttgcctcggcgcatagaactccggagagagcagctgaatatgccaaaactgcgtcggcacgtgggttgaaaatgattattgccggagcaggcatggcggctcaccttgcaggagttttagcatctcataccgatctgcctgtaattggcgttcctcttgacgcctcatccctgcagggaatggatgcactgctggcgacggtacagatgcctcctggtattcccgttgcaaccatgggtataggaaaatcaggagcaaaaaatgcggcagtattagccctacgaattttggccctgaacgatcatactcttgccaaagaacttgtcaatttccgggaaaacatggtgagggaagttgaggaaaaagcaaaacgaattcagtag

SEQ ID NO: 52286 - protein, 590 aa, Desulfotalea psychrophila LSv54
MKVLVVGSGGREHALVWKIKQSQKVEEVFCAPGNAGIEELATCVNISATDIKGLLHFAQKEKIDLTVVGPESSLVAGIVDLFEENGLRIFGPSQAAAILEGSKVFTKNFLQKYSIPTAAFGVFTEREAAKEYIEQQGAPIVVKADGLAAGKGVVVAKTIEEAKKAVDEIMLDKAFGEAGDSIVVESCLLGEEASFIAFTDGKTILPLPTSQDHKAAYDGDKGPNTGGMGAYSPAPIVTDEITEYVMTEVMLPTIKGLAAEGRPYKGMLYAGLMIDGDDIKVLEFNCRFGDPEAQPLLMRLKSDIIDIFEACIDGTLDRVEMKIDPRPTVCVVMSSGGYPGAYASGDIITGFEQADKVDGVEVFHAGTAKEGEAIVSNGGRVLGITSIGKTLEQALERAYKATDCITWNKCFYRKDIGGKALAKKLAKPSKPLVGIVMGSDSDLPTMRAASDFLQSVGIPYEMTVASAHRTPERAAEYAKTASARGLKMIIAGAGMAAHLAGVLASHTDLPVIGVPLDASSLQGMDALLATVQMPPGIPVATMGIGKSGAKNAAVLALRILALNDHTLAKELVNFRENMVREVEEKAKRIQ

SEQ ID NO: 52287 - DNA, 525 bp, Yersinia pseudotuberculosis IP 32953
  CDS (1)..(525): transl_table=11
atgggagccaacctcaattcagcttatgcagccggggttaaaatcgccatcgtaatggggtccaagagtgattgggccaccatgcagttcgccgccgacgttctcaccacgctcaatgttccgtttcatgtggaagtcgtctctgcacaccgcaccccagataggttgttcagctttgccgaacaggccgaagccaatggcttacatgtgatcattgccggtgccggtggcgcagcacatttgccagggatgctggccgccaaaacgctggtgccggttttaggggttccggtgcaaagtgcggccttgagtggcgttgatagcctgtactcaattgtgcaaatgccacgcggcattcctgtgggaacgctcgctatcggtaaagccggtgcggcaaatgcggcgttgctggccgcacaaatcttagcattacacgatactgaattagccggccgcttagcacattggcgtcaaagccaaacggatgacgtgctggacaaccccgatccgagggaagaagcatga

SEQ ID NO: 52288 - protein, 174 aa, Yersinia pseudotuberculosis IP 32953
MGANLNSAYAAGVKIAIVMGSKSDWATMQFAADVLTTLNVPFHVEVVSAHRTPDRLFSFAEQAEANGLHVIIAGAGGAAHLPGMLAAKTLVPVLGVPVQSAALSGVDSLYSIVQMPRGIPVGTLAIGKAGAANAALLAAQILALHDTELAGRLAHWRQSQTDDVLDNPDPREEA

SEQ ID NO: 52289 - DNA, 498 bp, Symbiobacterium thermophilum IAM 14863
  CDS (1)..(498): transl_table=11
atggcgcagacggagaggaccggaccgcttgtgggcatcatcatgggcagccgctcggacctggagaccatgcaggaggccgccgccgttctggacgagctcggcattccctacgagatgaaggtcgtctcggcccaccgcacacccgacgcgatgttcgcctacgccgagtcggccgcggcgcggggactgaaggtgatcatcgccggcgccggcggagccgcgcacctgccgggcatgaccgcgtccaagaccctccttccggtgatcggcgtgccggtgaagtcctcgaccctgaacgggatcgactcgctgctctccatcgtgcagatgcccgggggcgtgcctgtggcgaccatggccatcggcaaggccggcgcccgcaatgccgggctgctggcagcccagatcctcgccctggaggacccggggctgagggccatcctggaggagtaccgggcctacatgcggcagcaggtggaggagagccagccatga

SEQ ID NO: 52290 - protein, 165 aa, Symbiobacterium thermophilum IAM 14863
MAQTERTGPLVGIIMGSRSDLETMQEAAAVLDELGIPYEMKVVSAHRTPDAMFAYAESAAARGLKVIIAGAGGAAHLPGMTASKTLLPVIGVPVKSSTLNGIDSLLSIVQMPGGVPVATMAIGKAGARNAGLLAAQILALEDPGLRAILEEYRAYMRQQVEESQP

SEQ ID NO: 52291 - DNA, 498 bp, Mannheimia succiniciproducens MBEL55E
  CDS (1)..(498): transl_table=11
atgtcaaatactcatgctcaaattgcaattgttatgggttcgaaaagcgattggtcgaccatgcaggaagcgactggtatgcttgatcaactcaatgtgccttatcatgttgaaattgtttccgcacatcgcacgccggataaacttttcagctttgccgaaaatgcgcaagctaaaggatataaagtgattattgccggtgcaggcggcgccgcccatttaccgggcatgattgcggctaaaaccttagtacctgttttaggcgtgccggttaaaagctcaatgttaagcggtgttgacagtctctattctatcgtgcaaatgccgaaagggattcccgtagggacattagctatcggtcctgccggcgctgccaatgcaggcttacttgcggcgcagattttagccgcatgggacagtgaattgtccgctcgtctgcaaaaattccgcgaacagcaaaccaatgcggtgttaaacaatccggatccacgaaattaa

SEQ ID NO: 52292 - protein, 165 aa, Mannheimia succiniciproducens MBEL55E
MSNTHAQIAIVMGSKSDWSTMQEATGMLDQLNVPYHVEIVSAHRTPDKLFSFAENAQAKGYKVIIAGAGGAAHLPGMIAAKTLVPVLGVPVKSSMLSGVDSLYSIVQMPKGIPVGTLAIGPAGAANAGLLAAQILAAWDSELSARLQKFREQQTNAVLNNPDPRN

SEQ ID NO: 52293 - DNA, 501 bp, Legionella pneumophila subsp. pneumophila str. Philadelphia 1
  CDS (1)..(501): transl_table=11
atgaaacccattttaataggtctaattatgggttctcaaagtgattggcaaacattaatccatgccgcccacacactggatgcgctaaacattggctatgaggcagaaattgtctccgctcataggacaccggacaaacttttccggtatgccgaacaggctgaggcaagaggtttggaagtgattattgctggtgcaggaggagcggctcatctccctggcatggtagcagccaaaacatctttgcctgttttaggtgtcccagtcatgtcacaaactttaaacggcgtcgattccttgctatccattgtgcaaatgcctgcggggatacctgtaggcactttatcgataggtaaagcaggtgccatcaactccgcactgtttgcagccgcaattcttgctaataaatatcctgatattcgagctgccttaaaacactatagagaacaacaaacacaaaaagtgctcgacaatccaaaccctaaagaggaaaagtcatga

SEQ ID NO: 52294 - protein, 166 aa, Legionella pneumophila subsp. pneumophila str. Philadelphia 1
MKPILIGLIMGSQSDWQTLIHAAHTLDALNIGYEAEIVSAHRTPDKLFRYAEQAEARGLEVIIAGAGGAAHLPGMVAAKTSLPVLGVPVMSQTLNGVDSLLSIVQMPAGIPVGTLSIGKAGAINSALFAAAILANKYPDIRAALKHYREQQTQKVLDNPNPKEEKS

SEQ ID NO: 52295 - DNA, 519 bp, Burkholderia mallei ATCC 23344
  CDS (1)..(519): transl_table=11
atgagcgaagtccagaccgcccacacgcacagcgcgccgctcgtcggcgtgctgatgggttccagctccgactgggacgtgatgaagcatgccgtcgcgattctgcaggaattcgacgtgccgtacgaggcgagggtcgtgtccgcgcaccggatgcccgacgagatgttcgactacgcgcagcaggcgcgcgagcgcggcctgcgcgcgatcatcgcgggcgcgggcggcgccgcgcacctgcccggcatgctcgccgcgaagacgacggtgcccgtgctcggcgtgcccgtcgcgagcaagtacctgaagggcgtcgattcgctgcactcgatcgtgcagatgccgaagggcgtgcccgtggcgacgttcgcgatcggcgaggccggcgcggcgaacgcggcgctcttcgcggtgtcgatcctgtccggcacgtcggccgactatgcgaaccggctcgccgcgttccgcgtgcggcagaacgaggccgcgcacgcgatggcgctgccgccgctgtga

SEQ ID NO: 52296 - protein, 172 aa, Burkholderia mallei ATCC 23344
MSEVQTAHTHSAPLVGVLMGSSSDWDVMKHAVAILQEFDVPYEARVVSAHRMPDEMFDYAQQARERGLRAIIAGAGGAAHLPGMLAAKTTVPVLGVPVASKYLKGVDSLHSIVQMPKGVPVATFAIGEAGAANAALFAVSILSGTSADYANRLAAFRVRQNEAAHAMALPPL

SEQ ID NO: 52297 - DNA, 489 bp, Methylococcus capsulatus str. Bath
  CDS (1)..(489): transl_table=11
atggttcaggtcggtatcgtgatggggagtaccagcgactgggaggtcatgcagcacgctgtccgcaagctcgaggagttcggtatcccctgcgaggccaaggtggtgtccgcccatcgtacgccggacctgttgttcgactatgcggaacgggcccggtcccgcggcctcaagtgcatcatcgccggtgcaggcggcgcggcccatctgcccggaatgatggcggccaagaccactgtgccggttttgggcgtaccggtgcccggcagacatctcggcgggcaggattcactgtattcgatcgtgcagatgcccaagggcgtgcccgtggcgacgtttgccatcggcgaggcgggagcggtcaacgccgcgctgttcgcggtggccctgctggcgaacggcgatccggccctgcagcttcgtctcgacgagttccgccggcatcaggccgaatccgtattggcggcacgattgccggaggtgccctga

SEQ ID NO: 52298 - protein, 162 aa, Methylococcus capsulatus str. Bath
MVQVGIVMGSTSDWEVMQHAVRKLEEFGIPCEAKVVSAHRTPDLLFDYAERARSRGLKCIIAGAGGAAHLPGMMAAKTTVPVLGVPVPGRHLGGQDSLYSIVQMPKGVPVATFAIGEAGAVNAALFAVALLANGDPALQLRLDEFRRHQAESVLAARLPEVP

SEQ ID NO: 52299 - DNA, 507 bp, Nocardia farcinica IFM 10152
  CDS (1)..(507): transl_table=11
atggacaccgcaggcccggccgtggggctgatcatgggcagcgactcggactggccgacgatggaggccgccgccgaggcgctggccgagttcggcgtccggttcgaggtgggtgtcgtctccgcgcaccgcaccccgcagcgcatgctcgactacgcgcgccgggccgcggaccgcggggtgaaggtgatcatcgccggtgcgggcggcgccgcccacctgccgggcatggtcgcctccgccacgccgctgccggtgatcggcgtgcccgtgccgctgaaatacctcgacggcatggactccctgctgtccatcgtgcagatgcccgcgggcgtgcccgtggccaccgtctccatcggcggcgcccgcaacgccggcctgctcgccgtccgcatcctcgccgccaccgaccccaccctgcgcgcccgcatggaacagttccaggccgacctggaaaaactcgtcctcgacaaggacgaagccctccgcaccaaactcctcggctga

SEQ ID NO: 52300 - protein, 168 aa, Nocardia farcinica IFM 10152
MDTAGPAVGLIMGSDSDWPTMEAAAEALAEFGVRFEVGVVSAHRTPQRMLDYARRAADRGVKVIIAGAGGAAHLPGMVASATPLPVIGVPVPLKYLDGMDSLLSIVQMPAGVPVATVSIGGARNAGLLAVRILAATDPTLRARMEQFQADLEKLVLDKDEALRTKLLG

SEQ ID NO: 52301 - DNA, 501 bp, Legionella pneumophila str. Paris
  CDS (1)..(501): transl_table=11
atgaaacccatattaataggtctaattatgggttctcaaagtgattggcaaacattaatccatgccgcccaaacactggatgcgctcaacattggctatgaggcagaaattgtctccgctcatagaacacccgacaaacttttccagtatgcggaacaggctgagaaaagaggtttggaagtgattattgctggtgcaggaggagcggctcatctcccaggcatggtagcagccaaaacatctttgcctgttttaggtgttcctgtcatgtcacaaactttaaacggcgtcgattccctgctatccattgtgcaaatgcctgcagggatacctgtagggactttatcgataggtaaagcaggtgccattaattctgcactgtttgcagctgcaattcttgctaataaatatcctgatattcgagctgccttaaaacgctatcgagaacaacaaacacaaaaagtgctcgacaatccaaaccctaaagaggaaaagtcatga

SEQ ID NO: 52302 - protein, 166 aa, Legionella pneumophila str. Paris
MKPILIGLIMGSQSDWQTLIHAAQTLDALNIGYEAEIVSAHRTPDKLFQYAEQAEKRGLEVIIAGAGGAAHLPGMVAAKTSLPVLGVPVMSQTLNGVDSLLSIVQMPAGIPVGTLSIGKAGAINSALFAAAILANKYPDIRAALKRYREQQTQKVLDNPNPKEEKS

SEQ ID NO: 52303 - DNA, 501 bp, Legionella pneumophila str. Lens
  CDS (1)..(501): transl_table=11
atgaaacccattttaataggtctaattatgggctctcaaagtgattggcaaacattaatccatgccgcccaaacactggatgcgctaaacattagctatgaggcagaaattgtctctgctcataggacacccgacaaacttttccagtatgcggaacaggctgagacaagaggtttggaagtgattattgctggtgcaggaggagcggctcatctccctggcatggtagcagccaaaacatccttgcctgttttaggtgtcccagtcatgtcacaaactttaaacggcgtcgattccttgctatccattgtgcaaatgcccgcggggatacctgtaggcactttatcgataggtaaagcaggtgccatcaactctgcactgtttgcagctgcaattcttgctaataaatatcctgacatccaagctgccttaaaacgctatcgagaacaacaaacacaaaaagtgctcgacaatccaaaccctaaagaggaaaagtcatga

SEQ ID NO: 52304 - protein, 166 aa, Legionella pneumophila str. Lens
MKPILIGLIMGSQSDWQTLIHAAQTLDALNISYEAEIVSAHRTPDKLFQYAEQAETRGLEVIIAGAGGAAHLPGMVAAKTSLPVLGVPVMSQTLNGVDSLLSIVQMPAGIPVGTLSIGKAGAINSALFAAAILANKYPDIQAALKRYREQQTQKVLDNPNPKEEKS

SEQ ID NO: 52305 - DNA, 606 bp, Photobacterium profundum SS9
  CDS (1)..(606): transl_table=11
gtgtcaccacattcagcaataatcattctcgatctattcggaatttcctctataatacttacgcaatcgattacgttacttaatatggaaggaaagatgatgactaagccatttgtagctgttttgatgggttcagattcagatttgccagtaatgcaggcaacgcttgatgttttaaaatcttttgaaattacgactgaagtgaaagtaacttctgctcaccgtacaccagccgcaacgcatagctatgtgactgatgctgaagcgcgtggttgtggcgtatttatttgtgcagcaggcttagcggcacatttagcaggtgctgttgctggtattacaacattacctgttatcggagtgccaattgatgctggtcctctaaaaggaatggatgcattactttcaactgcaatgatgccaggtggtgtacctgttgctaccgttgctattggtagcgctggtgcaaaaaacgcaggttacttagcggcacaaattctagcgactggcgataaagcgctagcattagcagtaaaagctgatcgtcaaaagaacgctgaagctgttattgcgaaagatgcagctttacaagagcgtctaaagggctaa

SEQ ID NO: 52306 - protein, 201 aa, Photobacterium profundum SS9
MSPHSAIIILDLFGISSIILTQSITLLNMEGKMMTKPFVAVLMGSDSDLPVMQATLDVLKSFEITTEVKVTSAHRTPAATHSYVTDAEARGCGVFICAAGLAAHLAGAVAGITTLPVIGVPIDAGPLKGMDALLSTAMMPGGVPVATVAIGSAGAKNAGYLAAQILATGDKALALAVKADRQKNAEAVIAKDAALQERLKG

SEQ ID NO: 52307 - DNA, 651 bp, Haloarcula marismortui ATCC 43049
  CDS (1)..(651): transl_table=11
atgcccgcagacaacgtgcagtcgcttatcgaccagttgcacgaagaggccgagatggaccgaccgaacgacctgacgcccgatgtcggcatcatcatgggctccgactcagacctgccgacgatggccggcggacagggcaagcgaccgggagcctacgcggcgctcgccgacgaactcggcttcgaggaacagacggactacactgacgcgcccgagagccgcttcaccttcgaaacgttcgtttgctcggcccatcggacgccggacctgatgtacgcgtacgcagagacggccgccgaccgcggtatcgacgtgataatcgctggcgctggcggtaaatccgctgacctgccgaacatgaccgccagcatcgcctacccgctgccagtcatcggtgtcccagtgcaggagaaatccgtcgactcggttatcgggatgccacagggcgcgccgatgacggcggtcgacgccggcaagtcgttcaacgccgccctctcagcggcacaaatccttgcacggcagcacgacgaactccgtgaccggctcgtctcgtaccacgagggactccaggccgacgttggcgaggcgtcgcgtgacctccacgaactcgggacgcccggattcaaacgcgagtattgggacgagtga

SEQ ID NO: 52308 - protein, 216 aa, Haloarcula marismortui ATCC 43049
MPADNVQSLIDQLHEEAEMDRPNDLTPDVGIIMGSDSDLPTMAGGQGKRPGAYAALADELGFEEQTDYTDAPESRFTFETFVCSAHRTPDLMYAYAETAADRGIDVIIAGAGGKSADLPNMTASIAYPLPVIGVPVQEKSVDSVIGMPQGAPMTAVDAGKSFNAALSAAQILARQHDELRDRLVSYHEGLQADVGEASRDLHELGTPGFKREYWDE

SEQ ID NO: 52309 - DNA, 501 bp, Streptococcus thermophilus LMG 18311
  CDS (1)..(501): transl_table=11
ttgtatcttaatatgaaaccagtaatttccatcatcatgggctcaaaatccgactgggcaaccatgcaaaaagccgctgaagtcctcaataacttcggtgtcgtttacgaaaagaaagttgtttctgcacaccgtacaccggacctcatgttcaagcatgccgaagaagctcgtagccgtggcatcaaggttatcatcgctggtgcgggtggcgcagctcacttgccagggatggtagcagctaaaactacccttccagtcattggcgtgcctgtcaaatctcgtgctcttagcggtgtggattcactttattccatcgttcagatgccaggtggagtaccagtcgcaactatggcgatcggtgaagcaggtgcgaccaacgcagccctctttgcccttcgtcttctctcggtagaagacaaggctattgcagaggcacttgctaactttgctgaagaacaagaaaaaatcgcagaggagtctacaaatgagctcaactaa

SEQ ID NO: 52310 - protein, 166 aa, Streptococcus thermophilus LMG 18311
MYLNMKPVISIIMGSKSDWATMQKAAEVLNNFGVVYEKKVVSAHRTPDLMFKHAEEARSRGIKVIIAGAGGAAHLPGMVAAKTTLPVIGVPVKSRALSGVDSLYSIVQMPGGVPVATMAIGEAGATNAALFALRLLSVEDKAIAEALANFAEEQEKIAEESTNELN

SEQ ID NO: 52311 - DNA, 501 bp, Streptococcus thermophilus CNRZ1066
  CDS (1)..(501): transl_table=11
ttgtatcttaatatgaaaccagtaatttccatcatcatgggctcaaaatccgactgggcaaccatgcaaaaagccgctgaagtcctcaataacttcggtgtcgtttacgaaaagaaagttgtttctgcacaccgtacaccggacctcatgttcaagcatgccgaagaagctcgtagccgtggcatcaaggttatcatcgctggtgcgggtggcgcagctcacttgccagggatggtagcagctaaaactacccttccagtcattggcgtgcctgtcaaatctcgtgctcttagcggtgtggattcactttattccatcgttcagatgccaggtggagtaccagtcgcaactatggcgatcggtgaagcaggtgcgaccaacgcagccctctttgcccttcgtcttctctcggtagaagacaaggctattgcagaggcacttgctaactttgctgaagaacaaggaaaaatcgcagaggagtctacaaatgagctcaactaa

SEQ ID NO: 52312 - protein, 166 aa, Streptococcus thermophilus CNRZ1066
MYLNMKPVISIIMGSKSDWATMQKAAEVLNNFGVVYEKKVVSAHRTPDLMFKHAEEARSRGIKVIIAGAGGAAHLPGMVAAKTTLPVIGVPVKSRALSGVDSLYSIVQMPGGVPVATMAIGEAGATNAALFALRLLSVEDKAIAEALANFAEEQGKIAEESTNELN

SEQ ID NO: 52313 - DNA, 489 bp, Geobacillus kaustophilus HTA426
  CDS (1)..(489): transl_table=11
atgagcccgctcgttggggtgatcatgggaagccattcggattgggaaacgatgaaacatgcttgcgccattttggcggaattgggtgttccgtttgagaaaaaagtcgtatcggcgcaccggacgccggatgagatgtttcggtatgcggagacagccgaggagcgcggcatccgcgtgatcattgccggcgctggcggagcggctcacttgccggggatgatcgcggcgaaaacgacgctgccggtgattggggtgcccgtgcagtcaaaagcattgaatggacttgattcgttattgtcgattgtgcaaatgccaggcggggtgccggtggcgacggtggcgatcggcaaggcgggggcgaccaacgccggactgctcgccgcatcgattcttggactgcttgagccacgctatatggaggcgctcaaagcgcggcgggaagcgattcgcaaacaaatcgtagaaagcagtgatcaatttgactaa

SEQ ID NO: 52314 - protein, 162 aa, Geobacillus kaustophilus HTA426
MSPLVGVIMGSHSDWETMKHACAILAELGVPFEKKVVSAHRTPDEMFRYAETAEERGIRVIIAGAGGAAHLPGMIAAKTTLPVIGVPVQSKALNGLDSLLSIVQMPGGVPVATVAIGKAGATNAGLLAASILGLLEPRYMEALKARREAIRKQIVESSDQFD

SEQ ID NO: 52315 - DNA, 510 bp, Salmonella enterica subsp. enterica serovar Paratyphi A str. ATCC
  CDS (1)..(510): transl_table=11
atgtcttcccgcaataatccggcgcgtgtcgccatcgtgatggggtccaaaagcgactgggctaccatgcaattcgccgccgaaatttttgaaattctggatgtcccgcaccatgtagaagtggtttccgcccatcgcacccccgataagctgttcagcttcgccgaaacggcggaagagaacggatatcaagtgattattgccggcgcgggcggcgcggcgcacctgccgggaatgattgcggcaaaaacgctggtcccggtactcggcgtgccggtacaaagcgctgcgctaagcggcgtggatagcctctactccatcgtgcagatgccgcgcggcattccggtgggtacgctggcgatcggtaaagccggtgccgctaacgccgccctgctcgccgcgcagattctggcgcaacacgacgcggaactgcatcagcgcatcgctgactggcgcaaagcgcaaaccgatgaagttctggaaaatcccgatccgcgggggacgctatga

SEQ ID NO: 52316 - protein, 169 aa, Salmonella enterica subsp. enterica serovar Paratyphi A str. ATCC
MSSRNNPARVAIVMGSKSDWATMQFAAEIFEILDVPHHVEVVSAHRTPDKLFSFAETAEENGYQVIIAGAGGAAHLPGMIAAKTLVPVLGVPVQSAALSGVDSLYSIVQMPRGIPVGTLAIGKAGAANAALLAAQILAQHDAELHQRIADWRKAQTDEVLENPDPRGTL

SEQ ID NO: 52317 - DNA, 501 bp, Anaplasma marginale str. St. Maries
  CDS (1)..(501): transl_table=11
gtgagtaagagcggcgcgcgggtatcagtggtgatgggcagcaagtctgactttcccaccatgagcgctgcgacgtcggttttggatgagctgcgcattgaatttgaggtgatggtagtctcagcccacagaacaccagacaggctgtacgattttgcgaaaactgcgcacacgagaggaatcaaagttataatagccggcgcgggtggggcggcgcatttaccggggatggttgcctcgctaacgagcgttcctgtcataggtgtgcccgtaaagagcgagtgtttgaatggcctggatagcttgttgtctatagtacaaatgcctaaaggcaccccggtcgctactatgtctatcggagtagcgggggcggcaaatgccgccgtgtttgcggcatccatactagggctaagcgatgctggcgtgcagcacaggcttggggagtggaaggcgagtcttacagctgcggttgaggtgtcgccttttgagcggaagcattag

SEQ ID NO: 52318 - protein, 166 aa, Anaplasma marginale str. St. Maries
MSKSGARVSVVMGSKSDFPTMSAATSVLDELRIEFEVMVVSAHRTPDRLYDFAKTAHTRGIKVIIAGAGGAAHLPGMVASLTSVPVIGVPVKSECLNGLDSLLSIVQMPKGTPVATMSIGVAGAANAAVFAASILGLSDAGVQHRLGEWKASLTAAVEVSPFERKH

SEQ ID NO: 52319 - DNA, 492 bp, Idiomarina loihiensis L2TR
  CDS (1)..(492): transl_table=11
atggctccggtattgattctaatgggttcccagtccgattggccggtaatgcaaaaagcggcagaaatgctcgagtccctgggcattaaatggcaggcgaaagtggtctctgcacaccgcacgccggacttacttaaatcgacaatggaacaagcggaacaagatggtgtgcctgtggttattgcgggagccggtggtgctgctcatttaccgggtatgctggcggcttatactgctattccagtgtttggtgtgccggttccgagcaagcagttaaaaggtttagacagcttattgtctattgtgcaaatgcctaagggtgtcgctgttggtactctggctattggcgatgccggcgcggcaaacgcaggcttactggcggcacaggttattggcagctttgacagtgacgtgcgcaaacgggtacacgaattccgcactgcacaaaaagaaaaagtgatggctaactcagacttggaattaccaaaatga

SEQ ID NO: 52320 - protein, 163 aa, Idiomarina loihiensis L2TR
MAPVLILMGSQSDWPVMQKAAEMLESLGIKWQAKVVSAHRTPDLLKSTMEQAEQDGVPVVIAGAGGAAHLPGMLAAYTAIPVFGVPVPSKQLKGLDSLLSIVQMPKGVAVGTLAIGDAGAANAGLLAAQVIGSFDSDVRKRVHEFRTAQKEKVMANSDLELPK

SEQ ID NO: 52321 - DNA, 495 bp, Azoarcus sp. EbN1
  CDS (1)..(495): transl_table=11
atgagcgacaagcccctcgtcgggatcatcatgggctcgaattccgactggccgacgatgcaggcggcggcgaagatgctcgccgaattcgacgtgccgtacgaggcccgcgtggtgtccgcccaccgcacgcccgacctgatgttcgtctatgctgacagcgcgcgcgaacgcggcctcaaggcgatcatcgccggcgcaggcggcgcggcccatctacccggcatggtcgcggcgaagacgacgctgcccgtgctcggcgtgccggtgcagtcgaaggcgctgtcggggcaggattcgctgctgtcgatcgtgcagatgccgaaaggcatcccggtcgcgactttcgcgatcggtgaagccggtgcggcaaatgcggcgcttttcgccatcgcgctgctcgccaacgaggataccgcgctcgccgaaaaactcgccgcgttccgcgcccgccagacgcaggcggtgctcgatatgaccctggacccgatatga

SEQ ID NO: 52322 - protein, 164 aa, Azoarcus sp. EbN1
MSDKPLVGIIMGSNSDWPTMQAAAKMLAEFDVPYEARVVSAHRTPDLMFVYADSARERGLKAIIAGAGGAAHLPGMVAAKTTLPVLGVPVQSKALSGQDSLLSIVQMPKGIPVATFAIGEAGAANAALFAIALLANEDTALAEKLAAFRARQTQAVLDMTLDPI

SEQ ID NO: 52323 - DNA, 540 bp, Zymomonas mobilis subsp. mobilis ZM4
  CDS (1)..(540): transl_table=11
atgaacaaccagcccccctctatagacgaatctagccctgccccgatcattgccttgattatgggcagtcaatccgattgggaaaccatgcatcatgcggcagatgttttatctgcccttaaaattccgtatgaaacgcgtatcatttcagcgcatagaaccccgaaacggttatatgactatgtcggttcgctggtttcaaaagggtttaaagccgttattgcgggtgctggtggggcggcacatttgccgggcatgtccgcggctattacaagattgcctgttttcggggtgccggtgcaatcaaaagccctaaacggcatggatagcttgctttctattgttcagatgcccgccggaattccggttggaacccttgcgattggccgcgcaggtgctatcaatgcggctcttctttctgctgccatacttgccaataatgatgatgatctggccgaaaggttggatcagtggcggcagcgtcaaacggctgatgttcaggatcagccagatactctgccaaggatctcttctttatga

SEQ ID NO: 52324 - protein, 179 aa, Zymomonas mobilis subsp. mobilis ZM4
MNNQPPSIDESSPAPIIALIMGSQSDWETMHHAADVLSALKIPYETRIISAHRTPKRLYDYVGSLVSKGFKAVIAGAGGAAHLPGMSAAITRLPVFGVPVQSKALNGMDSLLSIVQMPAGIPVGTLAIGRAGAINAALLSAAILANNDDDLAERLDQWRQRQTADVQDQPDTLPRISSL

SEQ ID NO: 52325 - DNA, 489 bp, Silicibacter pomeroyi DSS-3
  CDS (1)..(489): transl_table=11
atggccggggtcaaggtagggatcatcatgggcagccagtcggactggccgaccatgaagggtgcagcggaaattctggatgagctgggcgtggcttacgaggcgcggatcgtctcggcgcatcgcaccccggaccggctgtgggactatggccgcgccgccgtggggcgcggcttgcaggtgatcatcgccggggccggcggggccgcgcatctgccgggcatgatggcgtccaagacgcgggtgccggtcattggcgtgccggtgcagacccgggcgctgtcgggggtcgattcgctttactccatcgtgcagatgcccaagggctatccggttgcgaccatggcgatcggcgcggcgggtgccgccaatgcggggctgatggcggccggcatcctcgccctgcaggacgcaggcctggccgaacggctggacgcctggcgcgcggcgctttctgcctcgatccccgaggagccggtcgatgagtga

SEQ ID NO: 52326 - protein, 162 aa, Silicibacter pomeroyi DSS-3
MAGVKVGIIMGSQSDWPTMKGAAEILDELGVAYEARIVSAHRTPDRLWDYGRAAVGRGLQVIIAGAGGAAHLPGMMASKTRVPVIGVPVQTRALSGVDSLYSIVQMPKGYPVATMAIGAAGAANAGLMAAGILALQDAGLAERLDAWRAALSASIPEEPVDE

SEQ ID NO: 52327 - DNA, 492 bp, Francisella tularensis subsp. tularensis SCHU S4
  CDS (1)..(492): transl_table=11
atgagtgtacaagttggtgtaataatgggctctaaatctgattggagtacaatgaaagaatgttgtgatatcttggataatttaggtattggttatgaatgtgaagtagtgtctgctcatcgaactccagataagatgtttgactatgccgaaactgctaaagaaagaggccttaaggttataatagcaggagctggcggtgctgcacatttacctggaatggttgcggcaaaaactactttaccagtattaggtgtaccagttaaatcaagtacacttaatggccaagatagtttattatcaatagtacagatgccagcgggtattccagtagctacttttgcaattggtatggcaggagcaaaaaacgcggcgctttttgctgcaagtatcttgcaacatacagatataaatattgcaaaagcactagctgagtttagagctgagcaaacacgatttgttttggaaaatcctgatcctagggagcactaa

SEQ ID NO: 52328 - protein, 163 aa, Francisella tularensis subsp. tularensis SCHU S4
MSVQVGVIMGSKSDWSTMKECCDILDNLGIGYECEVVSAHRTPDKMFDYAETAKERGLKVIIAGAGGAAHLPGMVAAKTTLPVLGVPVKSSTLNGQDSLLSIVQMPAGIPVATFAIGMAGAKNAALFAASILQHTDINIAKALAEFRAEQTRFVLENPDPREH

SEQ ID NO: 52329 - DNA, 669 bp, Synechococcus elongatus PCC 6301
  CDS (1)..(669): transl_table=11
atgcgaatattcgtcagcagggtaggagcagcggtcatcatcggtctgcatgtaacggccgacccagcaactcaggccgatcgccccaatcttacgtcagtgaccatgtcttctcctgttcctgctgcaccctctgcgctcacccagcctgccgttggcatcatcatgggcagcgactctgatttacccaccatgcgtggcgcgatcgccatctgccagcagtttggcattgcccacgaggtcgaaattgtctccgctcaccgtactccggtgcggatggtggagtacgcccaaacagcccatcagcgcagcctcaaggtgatcattgccggcgcaggcggtgcggcccatttaccgggcatggtggctgccctaactcccctgccggtgattggcgtacctgtgcagacccgcacgttgcagggagtggactcgctctattcgatcgtgcaaatgccggctggcatcccagtagcaaccgtcgcgatcggtaatgccaccaatgcagggctcctagcagtgcaaatgctggctagccacaaccccgaactactccaagcggtgcagacctatcgccaagaattggcgcaaatggtgcaagataagcagactcgcctcagtgcgatcggtgttgaggcctacctcgaaaatgctggtggtcatcactag

SEQ ID NO: 52330 - protein, 222 aa, Synechococcus elongatus PCC 6301
MRIFVSRVGAAVIIGLHVTADPATQADRPNLTSVTMSSPVPAAPSALTQPAVGIIMGSDSDLPTMRGAIAICQQFGIAHEVEIVSAHRTPVRMVEYAQTAHQRSLKVIIAGAGGAAHLPGMVAALTPLPVIGVPVQTRTLQGVDSLYSIVQMPAGIPVATVAIGNATNAGLLAVQMLASHNPELLQAVQTYRQELAQMVQDKQTRLSAIGVEAYLENAGGHH

SEQ ID NO: 52331 - DNA, 492 bp, Bacillus clausii KSM-K16
  CDS (1)..(492): transl_table=11
atgaaacagccgattgtcggcatcattatgggcagtacttctgattgggaaacgatgcgccatgccagtgagattttagacgaacttggcgttccttatgaaaaaaaagtcgtgtccgcccaccgtactcctgattatatgtttgaatacgcggaacaagcggaagagcgtgggcttcgtgtcattattgcaggggcagggggagcggcccatttgccaggaatggtcgcggcaaagacgcttcttccagtcattggcgttcctgttgaatcacgtgccttaaaagggttggactccttgttgtcgattgtgcaaatgccaggaggagtacctgtggctactgtggcaattggcaaagcaggtgcaaccaatgcagcgcttttggctgcgcaaatgattgcaacaacggacaaggtcttgcaacaacgattggcaacgcgccgtgaacgcattaaaaagaccgttctagaaagcagtggtgaactcgtatga

SEQ ID NO: 52332 - protein, 163 aa, Bacillus clausii KSM-K16
MKQPIVGIIMGSTSDWETMRHASEILDELGVPYEKKVVSAHRTPDYMFEYAEQAEERGLRVIIAGAGGAAHLPGMVAAKTLLPVIGVPVESRALKGLDSLLSIVQMPGGVPVATVAIGKAGATNAALLAAQMIATTDKVLQQRLATRRERIKKTVLESSGELV

SEQ ID NO: 52333 - DNA, 513 bp, Ehrlichia ruminantium str. Welgevonden
  CDS (1)..(513): transl_table=11
atgtcgattaacgaagatattgccgatgttgcagtaattatgggaagccaatcagattttccaacaatgaataattcaatatcaatactggaagaattaaacatcagctataaaacaatgatcatatctgctcatagaacaccagaaagactctatacatttgcaaaatcagcagaaacaaatggattcaaaataattatcgctggagcaggaggcgcagctcatctaccaggattagtagcgtctttaacatatcttcccgtaataggagttccaataaaaagcagcaatcttaatggaatagatagtttactatcaatagtacagatgccaaaaggaatacctgtagcaacaatgtcaataggatcttcaggaggatataatgcagcaataatggcagcttctattctagctttatcgaataacataataaaaacaaacttacaaatatggagagataacttatctgcttctgtaaaactattaccagatacatctttgcagacttcataa

SEQ ID NO: 52334 - protein, 170 aa, Ehrlichia ruminantium str. Welgevonden
MSINEDIADVAVIMGSQSDFPTMNNSISILEELNISYKTMIISAHRTPERLYTFAKSAETNGFKIIIAGAGGAAHLPGLVASLTYLPVIGVPIKSSNLNGIDSLLSIVQMPKGIPVATMSIGSSGGYNAAIMAASILALSNNIIKTNLQIWRDNLSASVKLLPDTSLQTS

SEQ ID NO: 52335 - DNA, 465 bp, Dehalococcoides ethenogenes 195
  CDS (1)..(465): transl_table=11
atgccgctagtaagtattgtaatgggctctaaatctgatgccgaggttatgaaacctactgaggaaatactggagaaaatgggcatttcttttgagacgctggttatgtctgctcaccgtactcccgaaaaagtgcaggagttttgtctgggtgcgtccgcacggggggttgaactggttatagctgccgctgggggggcagcccatttgccgggagtaattgccagctggctgacactgccggttataggcgtaccggtggcttcaggtgaactcaaaggggttgatgccctttattccatagtccagatgcccgccggtataccggtagcaaccgtagctatcggagcggccggtgccaagaatgcggcttatctggcggctgaaatactgggtttaaaatatcaaaatatccgtcaggcttatgaaagctaccgtcgggaactaaaaggtgagaacaaatga

SEQ ID NO: 52336 - protein, 154 aa, Dehalococcoides ethenogenes 195
MPLVSIVMGSKSDAEVMKPTEEILEKMGISFETLVMSAHRTPEKVQEFCLGASARGVELVIAAAGGAAHLPGVIASWLTLPVIGVPVASGELKGVDALYSIVQMPAGIPVATVAIGAAGAKNAAYLAAEILGLKYQNIRQAYESYRRELKGENK

SEQ ID NO: 52337 - DNA, 525 bp, Thermococcus kodakarensis KOD1
  CDS (1)..(525): transl_table=11
atgcccaaagtgggaataataatgggtagcgactccgacctcccggtcatgaaggccgcggccgaggtgctcgaggagttcggtgttgactacgagataaccatagtttcagcccacagaacccccgagaggatgttcgagtacgccaaaacggcagaagaaagggggatagaggtaataatagccggagctggaggtgccgcccaccttccgggcatgacggcatccataaccacgctccctgtgataggagtccccgtaaagacatccacgctgaacgggcttgactcgctcctctccatagtccagatgccgaggggagtgcccgttgcaaccgtcgccataaacaacgccaagaacgcggccctgctggccctctcaatcctcggggtgaagtacccggagataagggagaagctcaaggagtacaggaggaggatgagggaagaagtggaggagaaggcggagaggcttgaggagatgggctacgaggagtacctccaagtgacagggcaaggaaagtga

SEQ ID NO: 52338 - protein, 174 aa, Thermococcus kodakarensis KOD1
MPKVGIIMGSDSDLPVMKAAAEVLEEFGVDYEITIVSAHRTPERMFEYAKTAEERGIEVIIAGAGGAAHLPGMTASITTLPVIGVPVKTSTLNGLDSLLSIVQMPRGVPVATVAINNAKNAALLALSILGVKYPEIREKLKEYRRRMREEVEEKAERLEEMGYEEYLQVTGQGK

SEQ ID NO: 52339 - DNA, 483 bp, Staphylococcus epidermidis RP62A
  CDS (1)..(483): transl_table=11
gtgaaagtagcagtcattatgggcagttcctcagattggaaaattatgaaagaaagttgttcgatgcttgaagaatttgaaataccgtacgaaaagaaagtcgtttcagctcatcgtacgcctcaaatgatgttcaatttcgctagtcaagcacgccaaaatggttttgatattatcattgccggtgcagggggagcagcacacttacctggaatggtagcttccatgacaacattacctgtgattggtgtgccaattgaatctaaaagtctaaaaggattagattcattactatctatcgtccaaatgcctggtggtatcccagttgcaaccacagcaattggaaaatcaggtgctaaaaatgctgggatattagcggcaagaatgttaggaataacaaatgaatcagttcaaaataatttggaaaattatgaaaaatatttagtcgcaaaagtggaggaaatgcaaaatgaacttcagtaa

SEQ ID NO: 52340 - protein, 160 aa, Staphylococcus epidermidis RP62A
MKVAVIMGSSSDWKIMKESCSMLEEFEIPYEKKVVSAHRTPQMMFNFASQARQNGFDIIIAGAGGAAHLPGMVASMTTLPVIGVPIESKSLKGLDSLLSIVQMPGGIPVATTAIGKSGAKNAGILAARMLGITNESVQNNLENYEKYLVAKVEEMQNELQ

SEQ ID NO: 52341 - DNA, 483 bp, Gluconobacter oxydans 621H
  CDS (1)..(483): transl_table=11
atgccgatccgtgtcggtgtgatcatgggaagccagtccgactgggataccatgcgccacgcctgcgagatcctcgacgatcttggaattgcccatgaaaagcggattgtttcggctcaccgcacgcccgaccgtctggtggaatacgcaaagacagcccgtcagcgtggccttcatgtgattatcgccggtgcgggtggggcagcacatcttccgggtatgtgttccgcctggacaagcattcccgtcctcggcgttcctgtgcagagtcgtgccctgaacgggcaggacagcctgctctccatcgtgcagatgccgggtggcgtgccggtcgggacgctggcgatcggcaaggccggtgcgatcaatgccggtctgctcgccgcgtcgatcctgtcggtgaacgacaaacaggtcatggcgcgtctggatgcctggcgggcgacgcagacggcggctgttgcggatgtgccggtcgaatga

SEQ ID NO: 52342 - protein, 160 aa, Gluconobacter oxydans 621H
MPIRVGVIMGSQSDWDTMRHACEILDDLGIAHEKRIVSAHRTPDRLVEYAKTARQRGLHVIIAGAGGAAHLPGMCSAWTSIPVLGVPVQSRALNGQDSLLSIVQMPGGVPVGTLAIGKAGAINAGLLAASILSVNDKQVMARLDAWRATQTAAVADVPVE

SEQ ID NO: 52343 - DNA, 486 bp, Lactobacillus acidophilus NCFM
  CDS (1)..(486): transl_table=11
atgtctgaagtaagcgtaattatgggtagtaaatcagattggccaacaatgaagcatgcttgccaaatcttggatcagttcaatgttagttatgacaaacacgtcatttcagcacatagaatgccaaaagaaatgtatgaatttgcccaatctgccgaaaaaaatggtactaaggtaatcatcgctggtgccggcatggcagctcatttgcctggtatgacggctgctaataccgtgattcctgtgatcggcgttcccggtcaaactaaggcattaggcggaatggattctcttttgtctattgtgcaaatgccaacgggcatccctgtagccacaactgctatcggcagtgcaggtgcaagcaatgctgccttgcttgcgttagaaattctcggaataggtaacgaaaaaataagacagcaactaaaaaactatcgacaaaaaatgcatgacgaagcaaaagaaagcggtgtagaacttgactga

SEQ ID NO: 52344 - protein, 161 aa, Lactobacillus acidophilus NCFM
MSEVSVIMGSKSDWPTMKHACQILDQFNVSYDKHVISAHRMPKEMYEFAQSAEKNGTKVIIAGAGMAAHLPGMTAANTVIPVIGVPGQTKALGGMDSLLSIVQMPTGIPVATTAIGSAGASNAALLALEILGIGNEKIRQQLKNYRQKMHDEAKESGVELD

SEQ ID NO: 52345 - DNA, 504 bp, Wolbachia endosymbiont strain TRS of Brugia malayi
  CDS (1)..(504): transl_table=11
atgttgaatatggcggaaataaaaaaagatgttgctgtaattatgggaagtgaatcagactatagcactatgattcatgctgttgatatgttaacagaattaggaattttgcatgacgtgtttataatatctgcacatagaacaccagaaaggctcttcaattttgctcagtctgcacaagaaaaaggctttagagttattatagccggtgcgggaggagcagctcatttacctggtatggttgcatcgctcacttgtttacccgttatcggtgttcctgtacatagtaaacagttaaatgggctggatagtctgttatctatagtacaaatgccaaagggtgtgccggttgcaacaatgtctataggagaaagtggggcttataatgcagcaattgctgctgcatctgtactgtcaatttctaacagtgaaattgctgataggttaaaaaaatggagaaaggaacagaccgaagtagtaaaggaaaaaccagcatcacagtaa

SEQ ID NO: 52346 - protein, 167 aa, Wolbachia endosymbiont strain TRS of Brugia malayi
MLNMAEIKKDVAVIMGSESDYSTMIHAVDMLTELGILHDVFIISAHRTPERLFNFAQSAQEKGFRVIIAGAGGAAHLPGMVASLTCLPVIGVPVHSKQLNGLDSLLSIVQMPKGVPVATMSIGESGAYNAAIAAASVLSISNSEIADRLKKWRKEQTEVVKEKPASQ

SEQ ID NO: 52347 - DNA, 504 bp, Xanthomonas oryzae pv. oryzae KACC10331
  CDS (1)..(504): transl_table=11
atgacctccaaccactccgcgccgctggtcggcatcgtgatgggctcccgttcggattgggagaccatgcaacacgcagcttacaagcttgacgcgctgggcgtgccgtacgaagtcaaggtggtctcggcgcaccgtacccccgacgtattgttcacctacgccgaacaggctggcgaacgcggcctgcgcgcgatcattgccggtgccggcggcgcggcgcatctgccgggcatgctggctgccaagaccgcggtgccggtacttggtgtgccggtgcagtccaaggcgctcaatggcatggattcgctgctatcgatcgtgcagatgccagccggcattccggtggccacctttgccatcggcaatgcgggtgcggccaatgcggcgttgtttgcggcggccatgctggcgcccgagcaggcgcagatcggtcaagcactggggcagttccgcgccaagcagaccgacgatgtcatggcctgcgacgacccgcgtcaatga

SEQ ID NO: 52348 - protein, 167 aa, Xanthomonas oryzae pv. oryzae KACC10331
MTSNHSAPLVGIVMGSRSDWETMQHAAYKLDALGVPYEVKVVSAHRTPDVLFTYAEQAGERGLRAIIAGAGGAAHLPGMLAAKTAVPVLGVPVQSKALNGMDSLLSIVQMPAGIPVATFAIGNAGAANAALFAAAMLAPEQAQIGQALGQFRAKQTDDVMACDDPRQ

SEQ ID NO: 52349 - DNA, 486 bp, Neisseria gonorrhoeae FA 1090
  CDS (1)..(486): transl_table=11
atgatacaaatcggcatcatcatgggcagcaacagcgattggcccgttatgcggcaggcagcgcagtttcttgaagagttcggcgtagaatatgaggcgcgcgtcgtttccgcacaccgcactccggatttgatgtttgaatacgccgaaaccgcacgggcgcgcggcatcaaagccatcatcgcgggtgcgggcggcgcggcgcatttacccggcatggttgccgccaagaccaccgtccccgttttgggcgtacccgtcccaagcaaatacctgcgcggcgaagattcgcttttatcgattgtacaaatgcccaaaggcgtacccgtcgccacattcgccatcggcgaggcaggcgcggcaaatgccgcattgttcgccatctccatgctcgccaacgaaaaccccgaactggcgcaaaaactggcagacttccgagccaaacaggaacaaaccgttttaaacatggaattggaacagatttaa

SEQ ID NO: 52350 - protein, 161 aa, Neisseria gonorrhoeae FA 1090
MIQIGIIMGSNSDWPVMRQAAQFLEEFGVEYEARVVSAHRTPDLMFEYAETARARGIKAIIAGAGGAAHLPGMVAAKTTVPVLGVPVPSKYLRGEDSLLSIVQMPKGVPVATFAIGEAGAANAALFAISMLANENPELAQKLADFRAKQEQTVLNMELEQI

SEQ ID NO: 52351 - DNA, 507 bp, Bacteroides fragilis NCTC 9343
  CDS (1)..(507): transl_table=11
atgactccaatcgtaagcattatcatgggtagcacttccgaccttcctgtcatggaaaaggccgcacagttgctcaacgatctccatgtaccgttcgaaatgaacgccctctcggctcaccgcactcccgaagctgtggaagagtttgccaagaatgcccgctcacgcggcattaaagtaattattgctgctgccggtatggctgcccatctgccgggcgtgattgccgcatcgaccccgcttccggtcatcggtgtacccatcaaatcgtctcttgacggaatggacgcccttctggcgatcgtacagatgcctccggggattcctgtagcgactgtgggtatcaatggcgcactgaacgccgccatccttgccgtacaaatgctttcattggaagataaagaactcgaaacaaaattcatagcctataaagaaggactgaaaaagaaaatcgtaaaggctaacgaagaactgaaagaaattaagtacgagtttaaaacaaactaa

SEQ ID NO: 52352 - protein, 168 aa, Bacteroides fragilis NCTC 9343
MTPIVSIIMGSTSDLPVMEKAAQLLNDLHVPFEMNALSAHRTPEAVEEFAKNARSRGIKVIIAAAGMAAHLPGVIAASTPLPVIGVPIKSSLDGMDALLAIVQMPPGIPVATVGINGALNAAILAVQMLSLEDKELETKFIAYKEGLKKKIVKANEELKEIKYEFKTN

SEQ ID NO: 52353 - DNA, 492 bp, Pseudomonas syringae pv. syringae B728a
  CDS (1)..(492): transl_table=11
atgagcgcactggttggcgtgatcatgggctccaagtccgattggtccacccttagccacaccgccgatatgctggaaaagctcggcatcccttttgaagtcaaggtggtgtcagctcaccgcacaccggatctgctgtttcagtacgccgacgaagcggaaggccgtggcattgaagtgatcatcgccggtgccggcggtgccgctcacttgccgggcatgtgcgctgccaagacccacctgcctgtgctgggcgttccggtgcagtcttcgatgctttcgggggtcgattcgctgttgtcgatcgtgcagatgccggccggtatcccggtcgcgaccctggccatcggcaaggcgggtgcaatcaacgcagcgctgctttcagccagcatccttggcgcaaagcacccgcaattccacgcagcgctgaagaaatttcgcactgaacagacagacagcgtcctggataatccagacccacgccacgcctga

SEQ ID NO: 52354 - protein, 163 aa, Pseudomonas syringae pv. syringae B728a
MSALVGVIMGSKSDWSTLSHTADMLEKLGIPFEVKVVSAHRTPDLLFQYADEAEGRGIEVIIAGAGGAAHLPGMCAAKTHLPVLGVPVQSSMLSGVDSLLSIVQMPAGIPVATLAIGKAGAINAALLSASILGAKHPQFHAALKKFRTEQTDSVLDNPDPRHA

SEQ ID NO: 52355 - DNA, 504 bp, Xanthomonas campestris pv. campestris str. 8004
  CDS (1)..(504): transl_table=11
atgacctccaaccactccgcgccgctggtcggcatcgtgatgggttcccgttcggactgggacaccatgcaacacgcagctcagaagctcgatgcactgggcgtgccgtacgaggtcaaggtggtctcggcccaccgcacaccggatgtgttgttcacctacgccgaacaggcaggcgagcgcggcctgcgcgcgatcatcgccggcgctggcggtgccgcgcatctgcccggcatgctggcggccaagaccgcagtgcccgtgctgggcgtgccggtgcagtccaaggcgctcaacggcatggattcgctgctgtcgatcgtgcagatgccagccggtattccggtggccaccttcgcgatcggcaatgcgggcgctgccaatgcggccctgtttgcagcagcgatgctgtcgccggagcagccgcagatcggtcaggcattggcgcagttccgcgccaagcagaccgacgatgtgatggccagcgacgatccccgccaatga

SEQ ID NO: 52356 - protein, 167 aa, Xanthomonas campestris pv. campestris str. 8004
MTSNHSAPLVGIVMGSRSDWDTMQHAAQKLDALGVPYEVKVVSAHRTPDVLFTYAEQAGERGLRAIIAGAGGAAHLPGMLAAKTAVPVLGVPVQSKALNGMDSLLSIVQMPAGIPVATFAIGNAGAANAALFAAAMLSPEQPQIGQALAQFRAKQTDDVMASDDPRQ

SEQ ID NO: 52357 - DNA, 495 bp, Haemophilus influenzae 86-028NP
  CDS (1)..(495): transl_table=11
atgtcaaaaactgcacaaattgctgttgtgatgggttccaaaagcgattgggctaccatgcaagaggcaactcagattttagatgaattaaaagtaccttatcatgtggaaatcgtctctgctcatcgtacgcctgataaactttttgaatttgctgaaaatgcacaaaaaaatggctataaagtaattattgctggggctggcggtgcggcacatttacccggcatgatcgcagccaaaacccttgtgcctgtgctgggtgtgccagtaaaaagttctatgttaagtggcgtagatagcctttattcaattgtgcaaatgccaaaaggaatcccagtcggaacattggctattggccctgcgggtgcggcaaatgctggattgttagccgcacaaattctagcaagttgggatgcagaattgctttcacgcttgcaatctttccgtgaaagccaaacgagtaatgtgcttgataatcccgatccacgcacataa

SEQ ID NO: 52358 - protein, 164 aa, Haemophilus influenzae 86-028NP
MSKTAQIAVVMGSKSDWATMQEATQILDELKVPYHVEIVSAHRTPDKLFEFAENAQKNGYKVIIAGAGGAAHLPGMIAAKTLVPVLGVPVKSSMLSGVDSLYSIVQMPKGIPVGTLAIGPAGAANAGLLAAQILASWDAELLSRLQSFRESQTSNVLDNPDPRT

SEQ ID NO: 52359 - DNA, 513 bp, Corynebacterium jeikeium K411
  CDS (1)..(513): transl_table=11
atgactgaaaacgcacgcaccccgctggtcggcctggtgatgggctccgactccgactggcccaccgtcgagccagccgccgaggtgttggccgagttcggcatccccttcgaggtcggagtggtctctgcgcaccgcaccccggagcgcatgctcgactacgcccgcaccgcgcacacccgcggcgtgaaggtgatcatcgcctgcgccggcggtgccgcccacctgcccggcatggttgccgcggccactccgctgccggtgatcggcattccgcgtgccctgggcaatctggatggcctggattctctgctctccatcgtgcagatgcccggcggcgtgccgactgccaccgtctccatcgacggtgcgaagaacgccggactgctggctgtgcgcaccctcgcggtggctgacgaggctctgatggacaagatggtcgaataccaggagaacatgcgcgacgcggtgctggagaaggatcgcgccctgcagcagaagctgatggggtga

SEQ ID NO: 52360 - protein, 170 aa, Corynebacterium jeikeium K411
MTENARTPLVGLVMGSDSDWPTVEPAAEVLAEFGIPFEVGVVSAHRTPERMLDYARTAHTRGVKVIIACAGGAAHLPGMVAAATPLPVIGIPRALGNLDGLDSLLSIVQMPGGVPTATVSIDGAKNAGLLAVRTLAVADEALMDKMVEYQENMRDAVLEKDRALQQKLMG

SEQ ID NO: 52361 - DNA, 483 bp, Staphylococcus haemolyticus JCSC1435
  CDS (1)..(483): transl_table=11
gtgaaagtagcggttattatgggtagttcttcagattggaaggttatgcaagaaagttgtgcgatgttagatgaattcgaaataccgtacgaaaagaaagtcgtttcggcacatcgtacgcctaaattaatgtatgaatttgcaagtcaagctagaacaaatggatacgatgtcattattgctggtgcaggtggtgctgcgcatctaccaggaatggttgcatcaatgacaacaatacctgttataggtgtaccgattgagtccaagagtttaaaaggattggattctttattatcgattgttcaaatgccaggaggtattccagtagctacaactgcaataggtaatgcaggtgcaaaaaatgctgggatactagctgcgagaattttaagtattagtaatgaatcggttcgtaaacatttagatgaatatgagcaaagtctagtagataaagttggtgaaatgcaaaatgaacttcaataa

SEQ ID NO: 52362 - protein, 160 aa, Staphylococcus haemolyticus JCSC1435
MKVAVIMGSSSDWKVMQESCAMLDEFEIPYEKKVVSAHRTPKLMYEFASQARTNGYDVIIAGAGGAAHLPGMVASMTTIPVIGVPIESKSLKGLDSLLSIVQMPGGIPVATTAIGNAGAKNAGILAARILSISNESVRKHLDEYEQSLVDKVGEMQNELQ

SEQ ID NO: 52363 - DNA, 474 bp, Sulfolobus acidocaldarius DSM 639
  CDS (1)..(474): transl_table=11
atgcccaaagtagcggtaattatgggaagtaagaacgattgggaatatatgaaggatgcagtggatattttgaaagagtttggagtggaagttgaggtaagggttgtttcggctcatagaaccccagagtttatgatggagtttgcgaaaactgcgtcccaaaaagggattgaagtaataattgctggagctggaggagcagcccatttaccaggaatgactgcttccttaactcacctacctgttataggtgttcctgtgccttctaagaacctaaatggacttgactcactgttatctatagttcagatgccttatggggttccagtagctacagttgctataggaaatagtaaaaacgcagcattgctagcactaagaatattaggaattaagtactcagagattgccgagagaattaagaagtttatggaggatatgaaaagtgaagtccttaacacgaaactaccttaa

SEQ ID NO: 52364 - protein, 157 aa, Sulfolobus acidocaldarius DSM 639
MPKVAVIMGSKNDWEYMKDAVDILKEFGVEVEVRVVSAHRTPEFMMEFAKTASQKGIEVIIAGAGGAAHLPGMTASLTHLPVIGVPVPSKNLNGLDSLLSIVQMPYGVPVATVAIGNSKNAALLALRILGIKYSEIAERIKKFMEDMKSEVLNTKLP

SEQ ID NO: 52365 - DNA, 492 bp, Pseudomonas fluorescens Pf-5
  CDS (1)..(492): transl_table=11
atgagtgcactggttggcgtgatcatgggctccaagtccgattggtccacccttagccacaccgccgatatgctggaaaagctcggcatcccttacgaggtgaaggtggtttccgcacaccgcaccccggacctgctgttccagtacgccgatgaggctgaggcgcgaggcatcgaggtgatcatcgccggtgccggcggcgcggcgcacctgccgggcatgtgcgcggccaagacccacctgccggtgctgggcgtgccggtgcagtcgtcgatgctctcaggcgtggattcgctgctgtccatcgtgcagatgccggccggcatccccgtggccaccctggccatcggcaaggccggcgcgatcaacgcggcgctgctctcggcgagcatcctgggcgccaagcacccgcagttccatgcggtgctgaaaaaattccgtgctgaacagacagacagcgtcctggacaatccagacccgcgcgtcgcctga

SEQ ID NO: 52366 - protein, 163 aa, Pseudomonas fluorescens Pf-5
MSALVGVIMGSKSDWSTLSHTADMLEKLGIPYEVKVVSAHRTPDLLFQYADEAEARGIEVIIAGAGGAAHLPGMCAAKTHLPVLGVPVQSSMLSGVDSLLSIVQMPAGIPVATLAIGKAGAINAALLSASILGAKHPQFHAVLKKFRAEQTDSVLDNPDPRVA

SEQ ID NO: 52367 - DNA, 561 bp, Psychrobacter arcticum 273-4
  CDS (1)..(561): transl_table=11
atgagcaccacatcagcgactgttaacgctattgatcagaacggacctattacctcgcctgctggtcaaccaaaagttggtattatcatgggctcacaatctgactgggcgaccatgagcgcggcggcacaattgcttgcagactttgatatcgcctttgaatgtgaagtagtatcagcgcaccgtacgcctgatagattgtttgattatgccaaaagtgcaaaaggtaacggcttacaagtgattatcgctggtgccggtggtgccgcccacctacctggtatgtgcgccagtcaaacgccgctacctgtttttggtgtccccgtaaaatcttctatgctgagtggttgggacagcttactttctatcgttcagatgcctaaaggcgtggcagttggaacgttagcgattggatccgctggtgcttataatgctgcactgcttgccatccaagtgttggcattacatgatgaatcgattgcgactaagcttggccatctgcgtcatacccaaactaataccattcttgccagtccaatacccggtattatcaatccttaa

SEQ ID NO: 52368 - protein, 186 aa, Psychrobacter arcticum 273-4
MSTTSATVNAIDQNGPITSPAGQPKVGIIMGSQSDWATMSAAAQLLADFDIAFECEVVSAHRTPDRLFDYAKSAKGNGLQVIIAGAGGAAHLPGMCASQTPLPVFGVPVKSSMLSGWDSLLSIVQMPKGVAVGTLAIGSAGAYNAALLAIQVLALHDESIATKLGHLRHTQTNTILASPIPGIINP

SEQ ID NO: 52369 - DNA, 492 bp, Candidatus Pelagibacter ubique HTCC1062
  CDS (1)..(492): transl_table=11
atggctaaaaataaattaaacaaagtatcaattgttatgggtagtcaatctgactacaaaaccatgacattttgtcaaaatattcttaaaaaattaaacataaaatttgaaacaaaaataatatcagctcatagaacccctaaaagaatgtatgaatttgctattaatgctgaaaaaaatggtattgcagtaattattgctggagctggtggatctgcacatttaccaggaatgatttcagcccttacttctctaccggtactaggtgttccaattgaaagtaaaaagctgaaaggtcttgatagtcttctatccattgcacaaatgccaaaaggaatacctgttggaacattagcaattggagaagatggtgcaattaatgctgccttattagctgcatctattattggtcttagtgatttaactgttaagagaaaattaaatcagtttcgtttaaatcaaagcaaatctgttaaaaaaaaacccaaatag

SEQ ID NO: 52370 - protein, 163 aa, Candidatus Pelagibacter ubique HTCC1062
MAKNKLNKVSIVMGSQSDYKTMTFCQNILKKLNIKFETKIISAHRTPKRMYEFAINAEKNGIAVIIAGAGGSAHLPGMISALTSLPVLGVPIESKKLKGLDSLLSIAQMPKGIPVGTLAIGEDGAINAALLAASIIGLSDLTVKRKLNQFRLNQSKSVKKKPK

SEQ ID NO: 52371 - DNA, 483 bp, Colwellia psychrerythraea 34H
  CDS (1)..(483): transl_table=11
atgacagtcggtatcatcatgggatcaaaatcagattggccaacaatgcagcatacagcagaaatgcttgattctttaggtgtacagtacgaaaccaaagtagtttctgcacaccgtactcctcacttacttgctgagtatgctgaaagtgcaaaagatagaggtattaaggtaattattgcaggcgctggtggtgcagctcatttaccaggtatggccgcagcttatacttctttacctgttttaggtgtgccagtgcaatctaaagcgcttaatggacaagattctttattatctattgtgcaaatgccaaaaggtattgcagtaggtacattggccatcggcaatgccggtgctgccaacgcaggtttacttgcagcacaaattattggcactcataacactgagatccaacaaaatatcgaagagtttcgtcgaaagcagacagaaaccatacttgctaacccaaacccggcagaataa

SEQ ID NO: 52372 - protein, 160 aa, Colwellia psychrerythraea 34H
MTVGIIMGSKSDWPTMQHTAEMLDSLGVQYETKVVSAHRTPHLLAEYAESAKDRGIKVIIAGAGGAAHLPGMAAAYTSLPVLGVPVQSKALNGQDSLLSIVQMPKGIAVGTLAIGNAGAANAGLLAAQIIGTHNTEIQQNIEEFRRKQTETILANPNPAE

SEQ ID NO: 52373 - DNA, 648 bp, Pseudomonas syringae pv. phaseolicola 1448A
  CDS (1)..(648): transl_table=11
gtgatcgcaggtgctttaaactcaccactttgcggtatactgcgcggcctttggccggctaaatcggtcactattcgtacaacaagccacgccggttcccctgcgtggcttgttgttttcagacgcgcctgcgggcgcccgatgagaggcacgacgatgagcgcactggttggcgtgatcatgggctccaagtccgattggtccacccttagccacactgccgacatgctggaaaagctcggcatcccttatgaagtcaaggtggtgtcagctcaccgcacgccggacctgctgttccagtacgccgacgaagcagagggccgtggcattgaagtgatcatcgccggtgctggcggtgctgctcacttgcctggcatgtgtgccgccaagacccacctgcctgtgctgggcgttccggtgcagtcgtcgatgctgtcgggggtcgactccctgctgtcgatcgtgcagatgcctgcgggtattccggtagcgaccctggccatcggcaaagcgggggcgatcaacgctgcgctgctttcggccagtatcctgggcgccaaacaccctcaattccacgcagcgctgaagaaattccgcgctgagcagacagacagcgtcctggacaatccagacccacgccacgcctga

SEQ ID NO: 52374 - protein, 215 aa, Pseudomonas syringae pv. phaseolicola 1448A
MIAGALNSPLCGILRGLWPAKSVTIRTTSHAGSPAWLVVFRRACGRPMRGTTMSALVGVIMGSKSDWSTLSHTADMLEKLGIPYEVKVVSAHRTPDLLFQYADEAEGRGIEVIIAGAGGAAHLPGMCAAKTHLPVLGVPVQSSMLSGVDSLLSIVQMPAGIPVATLAIGKAGAINAALLSASILGAKHPQFHAALKKFRAEQTDSVLDNPDPRHA

SEQ ID NO: 52375 - DNA, 612 bp, Streptococcus pyogenes MGAS6180
  CDS (1)..(612): transl_table=11
atgctaaagcacctagtcgccctgacgtgggttcgtcttcgaaatcaaagatttcggacttaccgcatatttttctacggaaattttcgacaagtcgaaacgcccctttgtatcttaattatgaaaactccaattatttctattatcatgggctccaaatctgactgggcaaccatgcaaaaaacggctgaagttctagacaactttggcattgcttacgagaagaaagtcgtctctgcccaccgtacgccagacctcatgttcaagcatgctgaggaagcacgtggtcgtggcatcaaaatcatcatcgcaggagcaggtggggcagctcacttgcctggtatggtggcagctaaaacaaccctgcctgttatcggtgtgcctgtcaaatcacgtgccctttcaggtttggattcactctattcgattgtgcagatgcctggcggtgtgcctgtggcaaccatggctatcggagaagcgggagcgactaacgctgccctgacagccctccgtattctctccatcgaggatcaaaatctggctgatgcgctagctcatttccatgaggaacaaggaaaaatcgcagaggagtcaagtggtgaactcatttaa

SEQ ID NO: 52376 - protein, 203 aa, Streptococcus pyogenes MGAS6180
MLKHLVALTWVRLRNQRFRTYRIFFYGNFRQVETPLCILIMKTPIISIIMGSKSDWATMQKTAEVLDNFGIAYEKKVVSAHRTPDLMFKHAEEARGRGIKIIIAGAGGAAHLPGMVAAKTTLPVIGVPVKSRALSGLDSLYSIVQMPGGVPVATMAIGEAGATNAALTALRILSIEDQNLADALAHFHEEQGKIAEESSGELI

SEQ ID NO: 52377 - DNA, 612 bp, Streptococcus pyogenes MGAS5005
  CDS (1)..(612): transl_table=11
atgctaaagcacctagtcgccctgacgtgggttcgtcttcgaaatcaaagatttcggacttacctcatatttttctacggaaagtttcgacaagtcgaaacgcccctttgtatcttaattatgaaaactccaattatttctattatcatgggctccaaatctgactgggcaaccatgcaaaaaacggctgaagttctagacaactttggcattgcttacgagaagaaagtcgtctctgcccaccgtacgccagacctcatgttcaagcatgctgaggaagcacgtggtcgtggcatcaaaatcatcatcgcaggagcaggtggggcagctcacttgcctggtatggtggcagctaaaacaacgctgcctgttatcggtgtgcctgtcaaatcacgtgccctttcaggtttggatttgctatattccattgtgcagatgcctggcggtgtgcctgtggcaaccatggctatcggagaagcgggagcgactaacgctgccctgacagccctccgtatcctctctatcgaggaccaaaatctggctgatgcgctagctcatttccatgaggaacaaggaaaaatcgcagaggagtcaagtggtgaactcatttaa

SEQ ID NO: 52378 - protein, 203 aa, Streptococcus pyogenes MGAS5005
MLKHLVALTWVRLRNQRFRTYLIFFYGKFRQVETPLCILIMKTPIISIIMGSKSDWATMQKTAEVLDNFGIAYEKKVVSAHRTPDLMFKHAEEARGRGIKIIIAGAGGAAHLPGMVAAKTTLPVIGVPVKSRALSGLDLLYSIVQMPGGVPVATMAIGEAGATNAALTALRILSIEDQNLADALAHFHEEQGKIAEESSGELI

SEQ ID NO: 52379 - DNA, 501 bp, Dechloromonas aromatica RCB
  CDS (1)..(501): transl_table=11
atgaacgccgtgcaacaacccgtcgtcggtatcgtcatgggttccgattccgactggccgaccatgcaggccgccgccgtcatcctcaaggatttcggcgtgcccttcgaggcccgtgtcgtttccgctcaccgcaccccggatctgctattcgattacgccgccatggctggcgagcgtggcctcaaggcaatcattgccggggccggcggtgccgcccacctgccgggcatgctggccgccaagaccatcgtgccggtgctcggcgtgccggtgcaatcgaaagccctgtccggtgtcgattcgctgcattccatcgtccagatgccgaagggtattcccgtcgccaccttcgccatcggtgaagccggtgccgccaatgcagcactgtttgccgttgccatgctggccaacgagaacccggcgttgaatgccaagctgcaggccttccgccaggctcagaccgaaaaggtcctggccatgaaactccccggggtttaa

SEQ ID NO: 52380 - protein, 166 aa, Dechloromonas aromatica RCB
MNAVQQPVVGIVMGSDSDWPTMQAAAVILKDFGVPFEARVVSAHRTPDLLFDYAAMAGERGLKAIIAGAGGAAHLPGMLAAKTIVPVLGVPVQSKALSGVDSLHSIVQMPKGIPVATFAIGEAGAANAALFAVAMLANENPALNAKLQAFRQAQTEKVLAMKLPGV

SEQ ID NO: 52381 - DNA, 534 bp, Thermobifida fusca YX
  CDS (1)..(534): transl_table=11
gtgagccagagcccgcccgccgtcggcatcgtgatgggaagcgactccgactggccgttcatggaagaggcagccgaggcactggacgagttcagtgtcccctacgaggttgacgtggtctcggcgcaccggatgccgcacgagatgatcgcctacggctcccaggcagcggagcggggcctgaaagtcctcattgccggggccggcggggcagcccacctgccgggcatgctcgcctcggtcactccgctgccggtcatcggggtgccggtcccgctgaagtacctcgacgggctcgactcgctgctgtccatcgtgcagatgcccgcgggagtcccggtggccacggtggcggtgggcgcggcccgcaatgcgggcctgctggcagtgcggatcctcggcgcccacgacgaggagctgcgcgcgaagatggccgacttccaggacgacctcaaccagcaggccaaagccaagggggagcggctgcgccgcaaactcacggaaggctcctcgttcggcttcggcgcccgctga

SEQ ID NO: 52382 - protein, 177 aa, Thermobifida fusca YX
MSQSPPAVGIVMGSDSDWPFMEEAAEALDEFSVPYEVDVVSAHRMPHEMIAYGSQAAERGLKVLIAGAGGAAHLPGMLASVTPLPVIGVPVPLKYLDGLDSLLSIVQMPAGVPVATVAVGAARNAGLLAVRILGAHDEELRAKMADFQDDLNQQAKAKGERLRRKLTEGSSFGFGAR

SEQ ID NO: 52383 - DNA, 537 bp, Prochlorococcus marinus str. NATL2A
  CDS (1)..(537): transl_table=11
ttgtctttaactgaagctaatacatttaagcaagtagctgtagtaatgggtagtgattcagatcttaaaactcttaagcctgcggtggcaattctagatcaatttggaatatctaatgaagtaaggattctgtctgctcataggactccaaaagaaatgatggattttgctcaaatggcagaatcaaatggttttggagtgataattgctggggctggcggggctgctcatctaccaggaatgatcgcatctcttacaacccttcctgtcataggcgttcccgtcaagagcaaggcactttcagggatagattctatgtattcaatcttgcaaatgccctcaggcatccccgtagcaacagttgccatagaagggggcctaaatgctggccttttggcaactcaaattttagccatcaacaatactgaattaaaaaataaattaaacgcctacagatgtgagctgcacgaccttgtggttaaaaaagatcacacacttaaagagattggagccataacttatctagaaaaaatgtaa

SEQ ID NO: 52384 - protein, 178 aa, Prochlorococcus marinus str. NATL2A
MSLTEANTFKQVAVVMGSDSDLKTLKPAVAILDQFGISNEVRILSAHRTPKEMMDFAQMAESNGFGVIIAGAGGAAHLPGMIASLTTLPVIGVPVKSKALSGIDSMYSILQMPSGIPVATVAIEGGLNAGLLATQILAINNTELKNKLNAYRCELHDLVVKKDHTLKEIGAITYLEKM

SEQ ID NO: 52385 - DNA, 498 bp, Ralstonia eutropha JMP134
  CDS (1)..(498): transl_table=11
gtgagcaagcaagaaaagccggtcgtcggcgtcgtaatgggcagcagttccgactgggacgtgatgcagcacgccgtggccatgctgaaggatttcggcgtgccgttcgaggcacaggtcgtttcggcgcaccgcatggccgacgacatgttccgctatgcggagaccgcgcgcagccgtggcatccgcgcgatcatcgccggtgccggcggtgccgcgcatctgccgggcatgatcgccgccaagaccatcgtgccggtgttcggcgtgccggtgccgtccaagtacctgcgcggcgaggactcgctgctgtcgatcgtgcagatgcccaagggcgtgcccgtcgcgacgttcgcgatcggcgaagccggcgcggccaatgcggcgctgcatgcgatcgccacgctggccaccaccgacgacgcgctggccagcgcgctggaagcattccgcgccaggcagaccgaagccgcgcgcgcgatgacgctgccgctgtaa

SEQ ID NO: 52386 - protein, 165 aa, Ralstonia eutropha JMP134
MSKQEKPVVGVVMGSSSDWDVMQHAVAMLKDFGVPFEAQVVSAHRMADDMFRYAETARSRGIRAIIAGAGGAAHLPGMIAAKTIVPVFGVPVPSKYLRGEDSLLSIVQMPKGVPVATFAIGEAGAANAALHAIATLATTDDALASALEAFRARQTEAARAMTLPL

SEQ ID NO: 52387 - DNA, 483 bp, Staphylococcus saprophyticus subsp. saprophyticus ATCC 15305
  CDS (1)..(483): transl_table=11
ttgaaagtagtagtcattatgggaagttcttctgattgggaaacaatgaaagaaagttgttcgatgttagaccaatttgaaattccgtatgataaaaaagtagtttcagcacatcgtacgcctcaattaatgtttgaattttcaagagaagcgagagatgcaggatatgatgtcattatcgctggtgcaggcggtgctgcgcatttaccaggtatggttgcgtcaatgacgactttaccagtaattggcgttcctattgagtctaaaagtttaaaaggaatggattcgctattgtcaattgtacaaatgccaggtggtattccagtagcaacgacagcaataggtaaagctggcgctaaaaatgcgggtatcttggctgcaagaatacttagtattggtaatcaaacagtgcaaaagaatttggaaaattatgaaaaatctttagttgagaaagtgagtgatatgcaagatgaacttgagtaa

SEQ ID NO: 52388 - protein, 160 aa, Staphylococcus saprophyticus subsp. saprophyticus ATCC 15305
MKVVVIMGSSSDWETMKESCSMLDQFEIPYDKKVVSAHRTPQLMFEFSREARDAGYDVIIAGAGGAAHLPGMVASMTTLPVIGVPIESKSLKGMDSLLSIVQMPGGIPVATTAIGKAGAKNAGILAARILSIGNQTVQKNLENYEKSLVEKVSDMQDELE

SEQ ID NO: 52389 - DNA, 504 bp, Ehrlichia canis str. Jake
  CDS (1)..(504): transl_table=11
atgtcaattaatcaaaacacagtagacgtcgcagtaatcatgggaagtcaatcagattttccaacaatgaataattcgatctcaatactaaaagaactcaatataacacacaaagtaatgattatatctgcacatagaacaccagacaggctttacacatttgcaaaatctgcagaagacaatgggtttaaagtaattatagcaggagcaggaggagcagcgcatttaccaggattagtagcatctttaacacatataccagttataggggtaccaataaaaagtagtaatttaaacggaatagatagcttgctatcaatagtacaaatgcccaaaggaatacctgttgcaacaatgtccataggatcatcaggagcatacaacgcagctatcatagcagcatctattttatctttagaaaatgatattatcaaagacaatctaaaaacatggagaaaaaatctatctgattcagtaaaactgataccagacacatcactataa

SEQ ID NO: 52390 - protein, 167 aa, Ehrlichia canis str. Jake
MSINQNTVDVAVIMGSQSDFPTMNNSISILKELNITHKVMIISAHRTPDRLYTFAKSAEDNGFKVIIAGAGGAAHLPGLVASLTHIPVIGVPIKSSNLNGIDSLLSIVQMPKGIPVATMSIGSSGAYNAAIIAASILSLENDIIKDNLKTWRKNLSDSVKLIPDTSL

SEQ ID NO: 52391 - DNA, 402 bp, Methanosarcina barkeri str. fusaro
  CDS (1)..(402): transl_table=11
atggttgatatctcagtaattatgggttccgaatccgataggcctatcgccaaccgtgcgatatccgtacttgaaaagagcaaatacacttacgaagtaatggttatctctgctcacaggaaccctgaagaacttgaaagctacatatcaagtaccgacgcaaaagtctttattacaattgcaggtttatctgcagcccttcctggggttgtagcttccagaacaaaaagacctgtagtaggagtccctgtaagcgcgaagcttggtggactcgatgccctgctctctattgcccagatgcccccaggagtgcctgtcggaagcgtagggatcgataatggagcaaatggtgcacatcttgctctgagaattatggatttgattgacaccacgaagccttaa

SEQ ID NO: 52392 - protein, 133 aa, Methanosarcina barkeri str. fusaro
MVDISVIMGSESDRPIANRAISVLEKSKYTYEVMVISAHRNPEELESYISSTDAKVFITIAGLSAALPGVVASRTKRPVVGVPVSAKLGGLDALLSIAQMPPGVPVGSVGIDNGANGAHLALRIMDLIDTTKP

SEQ ID NO: 52393 - DNA, 465 bp, Dehalococcoides sp. CBDB1
  CDS (1)..(465): transl_table=11
atgccattagttagtattgttatggggtccaagtctgacgccgagtttatgaagcccactgaagaaatactggagaaaatggctatttcttttgaaactctggttatgtctgcccatcgtactccggaaaaagtgcaggagttttgtttgaatgcacctgaccgggggattgaactgattatagctgctgccgggggcgcagcgcatctgccgggggtaattgccagctgggtaacactgccggttattggtgtccctattgcttccagtgaactcaaaggagttgacgccctgtactctatagtccagatgccggccggtataccggtagctacagtagctattggtgctgcgggtgctaaaaatgcggcttatctggcggccgaaattctgggtttaaaatatcaaaatatccgtcaggcttacgtaagctaccgtcaggaactaaaaggtgaaaacaaatga

SEQ ID NO: 52394 - protein, 154 aa, Dehalococcoides sp. CBDB1
MPLVSIVMGSKSDAEFMKPTEEILEKMAISFETLVMSAHRTPEKVQEFCLNAPDRGIELIIAAAGGAAHLPGVIASWVTLPVIGVPIASSELKGVDALYSIVQMPAGIPVATVAIGAAGAKNAAYLAAEILGLKYQNIRQAYVSYRQELKGENK

SEQ ID NO: 52395 - DNA, 498 bp, Thiobacillus denitrificans ATCC 25259
  CDS (1)..(498): transl_table=11
atgatgagcgcgcctgaggtaggggtggtgatgggatcttccagcgactgggaggtgatgaagcatgcggcgattctgctcaagcagctcggcatccacttcgaaaccaaggtggtgtcggcgcaccgtacccccgacctgctctacgaatacgcggcgagcgccgaggcgcgcggcatcaaggcgatcatcgcgggcgcgggcggcgcggcgcacctgccgggcatgatcgcggcgaagacgatcgttccggtgctcggcgtgccggtgccgtcgaaatatctcaagggcgtcgattcgctgctctcgatcgtgcagatgccgcgcggcatcccggtcgcgaccttcgcgatcggcgaggccggcgccgccaacgccgcgctcttcgcggcggcgctgatcgcgcgcgccgaccccggcctcgcggcgcagctcaacgaattccgccgcggccagtccgattcggtgctcgcgatggagctgcccgatgtcgaatga

SEQ ID NO: 52396 - protein, 165 aa, Thiobacillus denitrificans ATCC 25259
MMSAPEVGVVMGSSSDWEVMKHAAILLKQLGIHFETKVVSAHRTPDLLYEYAASAEARGIKAIIAGAGGAAHLPGMIAAKTIVPVLGVPVPSKYLKGVDSLLSIVQMPRGIPVATFAIGEAGAANAALFAAALIARADPGLAAQLNEFRRGQSDSVLAMELPDVE

SEQ ID NO: 52397 - DNA, 498 bp, Haemophilus somnus 129PT
  CDS (1)..(498)
atgcaagataataaacctcaaatagccattgtcatgggatcaaaaagtgactggtcgactatgcaagaaaccgctatcattttagatagcttggatttaccttaccatgttgaagttgtatcggcacatcgcactcccgataaactctttgagtttgcagaaaatgcagaagcaaaaggttataaagtgattattgctggtgccggtggtgccgcacatttacctggtatgattgcagcaaaaactatcttgcctgtattaggtgtaccagtaaaaagctcaatgttaaatggtgtagatagtttatattctattgtgcaaatgcccaaaggcattcctgtgggaaccttggctatcggatctgccggagctgcaaatgccgctttgttagcctcacaaattctcgctgctttcgatccgcacttagcacaaaaattgcaccaatttcgccaagctcaaactgacagtgttttgaataattccgatccgagagaataa

SEQ ID NO: 52398 - protein, 165 aa, Haemophilus somnus 129PT
MQDNKPQIAIVMGSKSDWSTMQETAIILDSLDLPYHVEVVSAHRTPDKLFEFAENAEAKGYKVIIAGAGGAAHLPGMIAAKTILPVLGVPVKSSMLNGVDSLYSIVQMPKGIPVGTLAIGSAGAANAALLASQILAAFDPHLAQKLHQFRQAQTDSVLNNSDPRE

SEQ ID NO: 52399 - DNA, 498 bp, Haemophilus somnus 2336
  CDS (1)..(498)
atgcaagataataaacctcaaatagccattgtcatgggatcaaaaagtgactggtcgactatgcaagaaaccgctatcattttagatagcttggatttaccttaccatgttgaagttgtatcggcacatcgcactcccgataaactctttgagtttgcagaaaatgcagaagcaaaaggttataaagtgattattgctggtgctggtggtgccgcacatttacccggtatgattgcagcaaaaactatcgtgcctgtattaggtgtgccagtaaaaagctcaacgttaaatggtgtagatagtttatattctattgtgcaaatgcccaaaggcattcctgtgggaaccttggctatcggatctgccggagctgcaaatgccgctttgttagcctcacaaattctcgctgctttcgatccgcacttagcacaaaaattgcaccaatttcgccaagctcaaactgacagtgttttgaataattccgatccgagagaataa

SEQ ID NO: 52400 - protein, 165 aa, Haemophilus somnus 2336
MQDNKPQIAIVMGSKSDWSTMQETAIILDSLDLPYHVEVVSAHRTPDKLFEFAENAEAKGYKVIIAGAGGAAHLPGMIAAKTIVPVLGVPVKSSTLNGVDSLYSIVQMPKGIPVGTLAIGSAGAANAALLASQILAAFDPHLAQKLHQFRQAQTDSVLNNSDPRE

SEQ ID NO: 52401 - DNA, 495 bp, Haemophilus influenzae R2846
  CDS (1)..(495)
atgtcaaacactgcacaaattgccgttgtaatgggttccaaaagcgattgggctaccatgcaagaggcaactcagattttagatgaattaaaagtaccttatcatgtggaagtcgtctctgctcatcgtacgcctgataaactttttgaatttgctgaaaatgcacaaaaaaatggatacaaagtaattattgctggggcaggcggtgcggcacatttaccaggtatgatcgcagcgaaaacccttgtgccagtgctgggcgtgccagtaaaaagttctatgttaagtggcgtagatagcctttattcaattgtgcaaatgccaaaagggattccagtcggaacattagcaattggccctgcgggtgccgcaaatgctggattgttagccgcacaaattctagcaagttgggatgcagaattattttcacgcttgcaatctttccgtgaaagccaaactcgtactgtactggacaatcccgatccacgcacataa

SEQ ID NO: 52402 - protein, 164 aa, Haemophilus influenzae R2846
MSNTAQIAVVMGSKSDWATMQEATQILDELKVPYHVEVVSAHRTPDKLFEFAENAQKNGYKVIIAGAGGAAHLPGMIAAKTLVPVLGVPVKSSMLSGVDSLYSIVQMPKGIPVGTLAIGPAGAANAGLLAAQILASWDAELFSRLQSFRESQTRTVLDNPDPRT

SEQ ID NO: 52403 - DNA, 495 bp, Haemophilus influenzae R2866
  CDS (1)..(495)
atgtcaaacactgcacaaattgccgttgtgatgggttccaaaagcgattgggctactatgcaagaggcaactcagattttagatgaattaaaagtaccttatcatgtggaagtcgtctctgctcatcgtacgcctgataaactttttgaatttgctgaaaatgcacaaaaaaatggctacaaagtgattattgctggggctggcggtgcggcacatttacctggtatgatcgcagccaaaacccttgtgccagtgctgggcgtgccagtaaaaagttctatgttaagtggcgtagatagcctttattcaattgtgcaaatgccaaaagggattccagtcggaacattagcaattggccctgcgggtgccgcaaatgctggattgttagccgcacaaattctagcaagttgggatgcagaattgctttcacgcttgcaatctttccgtgaaagccaaactcgtgctgtactggacaatcccgatccacgcacataa

SEQ ID NO: 52404 - protein, 164 aa, Haemophilus influenzae R2866
MSNTAQIAVVMGSKSDWATMQEATQILDELKVPYHVEVVSAHRTPDKLFEFAENAQKNGYKVIIAGAGGAAHLPGMIAAKTLVPVLGVPVKSSMLSGVDSLYSIVQMPKGIPVGTLAIGPAGAANAGLLAAQILASWDAELLSRLQSFRESQTRAVLDNPDPRT

SEQ ID NO: 52405 - DNA, 486 bp, Lactococcus lactis subsp. cremoris SK11
  CDS (1)..(486)
atgacagaagttgcaattatcatgggttcaagttcagactgggccacaatgaaagaaacagcgaagattttagatgattttgggttagcttatgagaaaaaagttgtctcagctcatcggacaccggctttaatggctgaattttccaatcaggcccatgaacaaggctataaggttatcattgctggcgctggtggagctgcacacttaccaggaatggttgctgctcagacgcttgttccagtgattggtgtgccaatcaaatcacgggctttatccggtcttgactctctttattcaattgttcaaatgccagcaggcgttcctgtagcgacaatggcaattggagaggctggggcaaaaaatgcggcattatttgccttgcaacttttggcaaataatgatgatgatttatacaataaattagtgaactatcgggcagccgctcaagaaatggttgagcaatcaaacaatgaattgaaatga

SEQ ID NO: 52406 - protein, 161 aa, Lactococcus lactis subsp. cremoris SK11
MTEVAIIMGSSSDWATMKETAKILDDFGLAYEKKVVSAHRTPALMAEFSNQAHEQGYKVIIAGAGGAAHLPGMVAAQTLVPVIGVPIKSRALSGLDSLYSIVQMPAGVPVATMAIGEAGAKNAALFALQLLANNDDDLYNKLVNYRAAAQEMVEQSNNELK

SEQ ID NO: 52407 - DNA, 462 bp, Bacillus anthracis str. A2012
  CDS (1)..(462)
atgggaagcacgtcagactgggaaacaatgaaatatgcttgtgacattttagatgaattaaatataccgtatgagaaaaaggttgtatccgctcatcggactccggattatatgtttgaatatgcagagacggctcgtgaacgtggattgaaagttattattgctggagctggtggagcagcgcatttaccaggaatggttgcagcgaagacgaatcttcctgtaatcggagttccagttcaatcaaaagcgttaaacggcttagattcattattatccatcgtccaaatgccaggaggggttccagttgcaactgttgcaattggtaaggctggttcaacaaatgctggtttacttgctgcacaaatacttggatcattccatgatgacatacatgatgcattagaattgagaagagaagcaattgaaaaagatgtgcgcgaaggtagtgagctagtatga

SEQ ID NO: 52408 - protein, 153 aa, Bacillus anthracis str. A2012
MGSTSDWETMKYACDILDELNIPYEKKVVSAHRTPDYMFEYAETARERGLKVIIAGAGGAAHLPGMVAAKTNLPVIGVPVQSKALNGLDSLLSIVQMPGGVPVATVAIGKAGSTNAGLLAAQILGSFHDDIHDALELRREAIEKDVREGSELV

SEQ ID NO: 52409 - DNA, 483 bp, Jannaschia sp. CCS1
  CDS (1)..(483): transl_table=11
atggttcaggtcgcgatcatcatgggctctcaatcggattggcccaccctgcgggaagcggccgacattctcgatacgctgggggtggcctatgacgcgaagatcgtttcggctcaccgcacaccggaccgcttgtgggacttcggcaaaggcgcggtggatgcgggcctgaaagtgatcatcgcaggtgcaggcggggcggcgcatttgcctggcatggtggcgtcgaaaacccgcgtgccggtgatcggcgtaccggtccagaccaaggcacttggcggcgtcgatagcctgtattccatcgtgcagatgcccaaaggctaccccgtggcaaccatggcgatcggtgcggcgggggcggcaaatgcgggcttgatggcggcagcgatcctggccaatgaagaccccgccctcgccgcacgactggaccagtggcgcgccgatctgagcgcctcaatcccggaggcccccagcgatgagtga

SEQ ID NO: 52410 - protein, 160 aa, Jannaschia sp. CCS1
MVQVAIIMGSQSDWPTLREAADILDTLGVAYDAKIVSAHRTPDRLWDFGKGAVDAGLKVIIAGAGGAAHLPGMVASKTRVPVIGVPVQTKALGGVDSLYSIVQMPKGYPVATMAIGAAGAANAGLMAAAILANEDPALAARLDQWRADLSASIPEAPSDE

SEQ ID NO: 52411 - DNA, 495 bp, Methylobacillus flagellatus KT
  CDS (1)..(495): transl_table=11
atgtccaaaccattggttggtatcatcatgggctcagacagcgactggcccgtcatgcgcgccgcggcgcagacgttggccgatttaggcattgtctacgaggcacgcgtggtctctgcgcaccgtacgcctgacctgatgtttgagtttgccgagcaagcggccgaacgcggcttgcgtgtcattattgctggcgctggcggcgccgcccacctgcctggcatggtggcggccaagacgacattgccggtactaggcgtgccggtgccatcacgccatctacaggggcaggattccctgctatccatcgtccagatgcctaaagggattccagtcgcgacgtttgcgatcggtgaggcaggggctgccaacgccggtttgtttgccgccgccatcctggcgacgacggatagcgcacttgcgcagcagctggcagattttcgtgccgcacaggcggcccgggtgctggacatgacattgccggaccagccctga

SEQ ID NO: 52412 - protein, 164 aa, Methylobacillus flagellatus KT
MSKPLVGIIMGSDSDWPVMRAAAQTLADLGIVYEARVVSAHRTPDLMFEFAEQAAERGLRVIIAGAGGAAHLPGMVAAKTTLPVLGVPVPSRHLQGQDSLLSIVQMPKGIPVATFAIGEAGAANAGLFAAAILATTDSALAQQLADFRAAQAARVLDMTLPDQP

SEQ ID NO: 52413 - DNA, 492 bp, Shewanella denitrificans OS-217
  CDS (1)..(492): transl_table=11
atgtcagcccaagttgcaatcgttatgggttctaagagtgattggccgaccatggaagccgctgccgatattttagatttactgcaagtgccctaccatgtggaagttgtctcggcgcaccgcactccggataagttaatggaatttgccagtgccgcagtaaagtccggctttaaaattatcataggcggcgctggcggcgcggctcatctaccaggcatgattgccgctaagactcgccttcctgtactcggggtacccgtgcaaagtaaagccctgtcaggcatggacagcttattatccatagtacaaatgcctaaaggcatagccgttggcacactggctattggcacagctggggcgtttaacgccggattactcgccgcacaaatgttggcaaaccatgatgcacagcttgcggcacgtcttgatgcctttagagagcaacaaacccgcaccgtattagagaatcccgatccgagagtcgattaa

SEQ ID NO: 52414 - protein, 163 aa, Shewanella denitrificans OS-217
MSAQVAIVMGSKSDWPTMEAAADILDLLQVPYHVEVVSAHRTPDKLMEFASAAVKSGFKIIIGGAGGAAHLPGMIAAKTRLPVLGVPVQSKALSGMDSLLSIVQMPKGIAVGTLAIGTAGAFNAGLLAAQMLANHDAQLAARLDAFREQQTRTVLENPDPRVD

SEQ ID NO: 52415 - DNA, 504 bp, Xylella fastidiosa Dixon
  CDS (1)..(504): transl_table=11
atgatctccaatcaatcccccccgctggtcggtattgtcatgggttcctcttcggattggggagcgatgcagcacgccgcacaaaagctcgatgctctcagcgtcgcgtatgaagtgaaggtcgtttcggcgcatcgtactccggataaattgtttgcttatgctgagcaggctgaaggacgtggtttgcgtgccatcattgccggggccggtggtgcagcgcaccttccaggtatgttggcggctaagacgatggttccagtgttgggggtgccaatgcagtccagggctctgaatggtttggattcgctgttatcgatcgtacagatgccggcgggtattccagtagccacgttcgcgattggggaagctggtgcagtcaatgccgccctgtttgccgcagcgctgttggtacccgaaaatccagcaatgcgtcggatgctgactgagttccgccaacgtcagacggatcaggtgaatgctgcggacgatccacgccaatga

SEQ ID NO: 52416 - protein, 167 aa, Xylella fastidiosa Dixon
MISNQSPPLVGIVMGSSSDWGAMQHAAQKLDALSVAYEVKVVSAHRTPDKLFAYAEQAEGRGLRAIIAGAGGAAHLPGMLAAKTMVPVLGVPMQSRALNGLDSLLSIVQMPAGIPVATFAIGEAGAVNAALFAAALLVPENPAMRRMLTEFRQRQTDQVNAADDPRQ

SEQ ID NO: 52417 - DNA, 504 bp, Xylella fastidiosa Ann-1
  CDS (1)..(504): transl_table=11
atgatctccaatcaatcccccccgctggtcggtattgtcatgggttcctcttcggattggggggcgatgcagcatgccgcacaaaagctcgatgctctcagcgtcgcgtatgaagtgaaggtcgtttcggcgcatcgtactccggataaattgtttgcttatgctgagcaggctgaaggacgtggtttgcgtgccatcattgccggggccggtggcgcagcgcaccttccaggtatgttggctgctaagacgatagttccagtgttgggggtgccaatgcagtccagggctctgaatggtttggattcgctgttatcgatcgtacagatgccggcgggtattccagtagccacgttcgcgattggggaagctggtgcagtcaatgccgccctgtttgccgccgcgctgttggtacccgaaaatccagtaatgcgtcggatgctgactgagttccgccaacgtcagacggatcaggtgaatgctgcggacgatccacgccaatga

SEQ ID NO: 52418 - protein, 167 aa, Xylella fastidiosa Ann-1
MISNQSPPLVGIVMGSSSDWGAMQHAAQKLDALSVAYEVKVVSAHRTPDKLFAYAEQAEGRGLRAIIAGAGGAAHLPGMLAAKTIVPVLGVPMQSRALNGLDSLLSIVQMPAGIPVATFAIGEAGAVNAALFAAALLVPENPVMRRMLTEFRQRQTDQVNAADDPRQ

SEQ ID NO: 52419 - DNA, 1938 bp, Arabidopsis thaliana
  CDS (1)..(1938)
atgttgcttttgaaacaaagctcagctgctgttcttgtcgttggaaatacaactccagtccttcacacttctcgctccacctacagagttggaccttttccagtgaccagaacgcagtcgttccagagtttgactatggcaaatttgcagaagcttcccacttcttcgtctgggaaattgaatacggcttcagctgtgccctgtagctctcacgatgcttctcctatcagtgagaatcgcgagaataaacatgtccatggagtttctgagaaaattgtgggagttcttgggggtggacaattgggtcgtatgctttgccaagctgcttctcagttggctatcaaagtgatgattttagatccttctaaaaattgttcagcaagtgcattgtcctacggtcacatggttgatagctttgacgacagtgctacagtagaagaatttgcaaaaagatgtggagtcttaactgtagaaattgaacatgttgacgtggacacactagagaagcttgagaaacaaggagtggattgccaacccaaagcttctactattaggataatacaggataaatacatgcaaaaggttcatttctctcagcatggcatcccacttccagaatttatggagataagcgatattgaaggagcaagaaaagcaggtgaacttttcggttaccctcttatgatcaagagcaaacgattggcttatgatggacgtggaaatgcagttgccaacaaccaagatgagctttcttctgctgtaacggctcttggaggtttcagtcgtggtttgtatattgagaaatgggcaccttttgttaaggagttagctgttattgtggctagggggagagatggttctatggtttgttatcccgttgttgaaaccattcacagggataacatatgccatatagttaaagcacctgcagatgtgccttggaagattaacaaacttgccaccgatgttgcccaaaaggctgtcggttctttagaaggtgctggtgtttttgcagttgaactgttcttgacagaggatagtcagattctgctaaacgaagttgcacctagaccacacaacagtggccatcaaacgatcgagtgctgttatacttcacagtttgaacaacacttgcgagctgtggttggtcttccacttggtgatccgtcaatgagaactccggcgtccattatgtacaatattctgggagaagatgatgtaattgatggagaagcaggtttcaaattggctcatcggcttattgcaagggctctgtgtattccaggtgcatctgttcattggtatgacaagccagaaatgagaaagcagagaaagatgggtcacatcactcttgttgggcagtctatgggcattttggaacaaaggttacaatgcatattaagtgagcaaagccaccaagtacacgagacacctcgtgttgctatcatcatgggttcagacacggatcttcctgttatgaaggatgctgccaaaattctggacctgtttggtgtgacacatgaggtaaagatagtttctgctcatcgcaccccagagatgatgtatacatatgcaacctcagctcatagtcgaggcgttcaagtcattattgcaggtgctggtggtgctgctcacttaccaggtatggttgcttcactcactcctttgcctgtgattggtgtccctgtccgtgctacccgtttggatggagttgattcacttctttccatcgttcagatgcctagaggtgttcctgttgcgacagttgcaataaacaatgcgaccaacgcagccttgcttgcagttcggatgttgggaatctctgatacggatcttgtctcaaggatgaggcagtaccaggaagacatgagagatgagaacctgaataaaggagagaaactggagacagaaggttgggaatcatatttgaaccagtga

SEQ ID NO: 52420 - protein, 645 aa, Arabidopsis thaliana
MLLLKQSSAAVLVVGNTTPVLHTSRSTYRVGPFPVTRTQSFQSLTMANLQKLPTSSSGKLNTASAVPCSSHDASPISENRENKHVHGVSEKIVGVLGGGQLGRMLCQAASQLAIKVMILDPSKNCSASALSYGHMVDSFDDSATVEEFAKRCGVLTVEIEHVDVDTLEKLEKQGVDCQPKASTIRIIQDKYMQKVHFSQHGIPLPEFMEISDIEGARKAGELFGYPLMIKSKRLAYDGRGNAVANNQDELSSAVTALGGFSRGLYIEKWAPFVKELAVIVARGRDGSMVCYPVVETIHRDNICHIVKAPADVPWKINKLATDVAQKAVGSLEGAGVFAVELFLTEDSQILLNEVAPRPHNSGHQTIECCYTSQFEQHLRAVVGLPLGDPSMRTPASIMYNILGEDDVIDGEAGFKLAHRLIARALCIPGASVHWYDKPEMRKQRKMGHITLVGQSMGILEQRLQCILSEQSHQVHETPRVAIIMGSDTDLPVMKDAAKILDLFGVTHEVKIVSAHRTPEMMYTYATSAHSRGVQVIIAGAGGAAHLPGMVASLTPLPVIGVPVRATRLDGVDSLLSIVQMPRGVPVATVAINNATNAALLAVRMLGISDTDLVSRMRQYQEDMRDENLNKGEKLETEGWESYLNQ

SEQ ID NO: 52421 - DNA, 483 bp, Pseudoalteromonas haloplanktis TAC125
  CDS (1)..(483): transl_table=11
atgaaagttggcattattatgggttctaaatcagattggccaaccatggaacatgcggcgctcatgctagaaaaatttggcattgagtacgaaacaaaagtagtttctgcccaccgaactcctcaactccttgctgattacgcaagctcagcaagtgaccgtggtattaaagttataattgcaggcgcaggcggcgcggcccatttgccgggtatggcagctgcatttacctcattaccagtacttggtgtgccagttaaatcaaaagcgcttaatggtattgattcgctactttctatttgccaaatgcctaaaggtgttgcagtaggaacattagctattggcgagcctggtgctgctaatgcaggtttacttgcagcgcaaatattagggtgtcaaaaccctgaaatattcgcaaaaattgaagcgtttcgtaaagaacaaaccgacactattttagctaaccctaatcctgcagagtaa

SEQ ID NO: 52422 - protein, 160 aa, Pseudoalteromonas haloplanktis TAC125
MKVGIIMGSKSDWPTMEHAALMLEKFGIEYETKVVSAHRTPQLLADYASSASDRGIKVIIAGAGGAAHLPGMAAAFTSLPVLGVPVKSKALNGIDSLLSICQMPKGVAVGTLAIGEPGAANAGLLAAQILGCQNPEIFAKIEAFRKEQTDTILANPNPAE

SEQ ID NO: 52423 - DNA, 621 bp, Natronomonas pharaonis
  CDS (1)..(621): transl_table=11
atgacacgttccgaggaagtggcggcgcttatcgacctgttcgaagccgaagccgagcgggaccgctccgatgcggagacgcccgatatcggcatcgtcatggggtcggattcggacctcgatacgatgtatggggcctacgaggcgctgacggaactcggcttcgaggaggtgaccgactacgacgacccgccggagagccggtttaccttcgagacgttcgtcgtctcggcccaccggacgccggagctgatgtacgcctacggcgagacggcccgcgaccgcggcctcgatgtcatcatcgccggcgcgggcggtaagtcggctgacctcccgaacatgaccgcctcgatagcgtacccgcttccggtcgtcggcgttccggtccacgaaaagtcagtcagttcggtcattggaatgccgaccggcgcgccgatagtcgctgtcgacgccggcaagtcgttcaacgctgcgctgtcggccgtccagatgcttgcccgcggccacccggaactcgaagccagactcgaagcgtatcacgatgacctgcaggacaacgtcggtgcggtctcgaagcggctccacgaacaaggcaccgaccggttccgcgagtcccggtga

SEQ ID NO: 52424 - protein, 206 aa, Natronomonas pharaonis
MTRSEEVAALIDLFEAEAERDRSDAETPDIGIVMGSDSDLDTMYGAYEALTELGFEEVTDYDDPPESRFTFETFVVSAHRTPELMYAYGETARDRGLDVIIAGAGGKSADLPNMTASIAYPLPVVGVPVHEKSVSSVIGMPTGAPIVAVDAGKSFNAALSAVQMLARGHPELEARLEAYHDDLQDNVGAVSKRLHEQGTDRFRESR

SEQ ID NO: 52425 - DNA, 486 bp, Rhodobacter sphaeroides 2
  CDS (1)..(486): transl_table=11
atgactgtggacgttgggatcatcatgggcagccagtcggactgggccacgatgaaggaggccgcggcgatcctcgacgagctcggcatctctcacgaggcgaggatcgtctcggcgcaccgcacgcccgaccggctctggaactacggcaagaccgccgtcgggcgcgggctcaaggtcatcatcgcgggcgcgggcggtgcggcgcaccttcccggcatgatggcctcgaaaacgcgggtgcccgtcatcggcgtgcccgtccagacccgcgcgctctcgggcgtcgacagcctctattccatcgtccagatgcccaagggttttccggtcgccaccatggcgatcggcagcgccggcgcggcgaacgcgggcctgatggccgcgggcatcctcgccctctccgatccggcgctcggccagcggctcgacgcctggcgcgcagccctctccgcctccatccccgaggagccctccgatgactga

SEQ ID NO: 52426 - protein, 161 aa, Rhodobacter sphaeroides 2
MTVDVGIIMGSQSDWATMKEAAAILDELGISHEARIVSAHRTPDRLWNYGKTAVGRGLKVIIAGAGGAAHLPGMMASKTRVPVIGVPVQTRALSGVDSLYSIVQMPKGFPVATMAIGSAGAANAGLMAAGILALSDPALGQRLDAWRAALSASIPEEPSDD

SEQ ID NO: 52427 - DNA, 501 bp, Nitrosococcus oceani ATCC 19707
  CDS (1)..(501): transl_table=11
atgaacaacccctttgttgccgtgctgatgggatcggaatcggatttacctattatgcagactaccttggacgtattaaaaacattagaagtgccttttgaggtgcggatcagttctgcccaccgaactccagaggctaccgcccattatgtcaaagaagcggatgcccgtggctgtggggtgtttattgctgcggctgggttagcagctcatcttgccggcgctgttgccgccaataccctaaagccggtaattggggtgcccatggagggggggccattaaaggggatggacgctttattgtctacggtacagatgcccggaggcgttcccgtggcttgtgtggctattggtaaagcgggggcaaaaaacgccgcttatttggcagcccaaattttaggaatcacagataccgctctagctcagcgtcttctttcggatcgccaagccatggctgatgctatcctcgccaaagctaatgttttggagcaccattcctga

SEQ ID NO: 52428 - protein, 166 aa, Nitrosococcus oceani ATCC 19707
MNNPFVAVLMGSESDLPIMQTTLDVLKTLEVPFEVRISSAHRTPEATAHYVKEADARGCGVFIAAAGLAAHLAGAVAANTLKPVIGVPMEGGPLKGMDALLSTVQMPGGVPVACVAIGKAGAKNAAYLAAQILGITDTALAQRLLSDRQAMADAILAKANVLEHHS

SEQ ID NO: 52429 - DNA, 489 bp, Streptococcus agalactiae A909
  CDS (1)..(489): transl_table=11
atgcaaccaattatttctattatcatgggatccaaatctgactggacaaccatgcaaaaaacggctgaagttctagataactttggcattgcttacgagaagaaagtcgtctctgcccaccgcacaccagacctcatgttcaagcatgctgaggaagcacgtgaccgtggcatcaaaatcatcatcgctggtgcaggtggagcagctcacttgcctggtatggtggcagctaaaacaacgctacctgttatcggtgtgcctgtcaaatcacgtgctctttcaggtttggattcgctctattccattgtgcagatgcctggcggtgtgcctgtggcaaccatggctatcggagaagcgggagcgactaacgctgccctgacagccctccgtatcctctctatcgaagaccaaaatttggctgatgcgctagctcatttccatgaggaacaaggaaaaatcgcagaggagtcaagcaatgaactcatttaa

SEQ ID NO: 52430 - protein, 162 aa, Streptococcus agalactiae A909
MQPIISIIMGSKSDWTTMQKTAEVLDNFGIAYEKKVVSAHRTPDLMFKHAEEARDRGIKIIIAGAGGAAHLPGMVAAKTTLPVIGVPVKSRALSGLDSLYSIVQMPGGVPVATMAIGEAGATNAALTALRILSIEDQNLADALAHFHEEQGKIAEESSNELI

SEQ ID NO: 52431 - DNA, 489 bp, Nitrobacter winogradskyi Nb
  CDS (1)..(489): transl_table=11
atgaccgccgttgtcgccatcatcatgggaagccagtcggactgggagaccatgcgtcacgccgctgaaacgctggccgcgctcggcgtcacgagcgagaaccggatcgtctccgcgcaccgtacccctgaaagactgtttgcgttcgccaggggcgccaaggccgaagggttcaaggtcatcatcgcgggcgcgggcggcgcggcgcacctgcccggcatgacggcggcgctgacggaacttccggtgctgggtgtgcccgtggagtccagggcgcttgccggagtcgattcgctctattccatcgtgcagatgccggccggcgttccggtggggacgctcgcgatcggcaaggcgggcgccatcaatgcggcgctgctggcggcaagcgtgctggcgctcaatgacccgccgctcgccggccgcctcgaagcatggcgcaagcggcagacggatgcggtggccgagcatccggaggaatcggcgtga

SEQ ID NO: 52432 - protein, 162 aa, Nitrobacter winogradskyi Nb
MTAVVAIIMGSQSDWETMRHAAETLAALGVTSENRIVSAHRTPERLFAFARGAKAEGFKVIIAGAGGAAHLPGMTAALTELPVLGVPVESRALAGVDSLYSIVQMPAGVPVGTLAIGKAGAINAALLAASVLALNDPPLAGRLEAWRKRQTDAVAEHPEESA

SEQ ID NO: 52433 - DNA, 1896 bp, Oryza sativa
  CDS (1)..(1896)
atgcactccaggctcctcagcgccccctcccacgcctccgccgcctcctcctcccccctccccttcgccgccgcccacccttgccgcgcctcctggacgccgcggcccacctccccgctgccgcctctatcgctgctgcgcgccaccgcctccatgcatccttctcctcctcccgaggggcatagcgaccagcctgtgcatggcgtcaccaacacggtcgtcggcgtgctggggggaggccagctggggaagatgctgtgccaggcggccagccagatgggggtcaggatggccatacttgatcccctcgaggactgcccggcgagctcggtttgccacgagcatgtcgtcgggagcttcaatgatggcgccacggttagcgagttcgcaaagaggtgcggggttttgacggtggaaattgagcatgtcgacgctgtaacactcgagaagcttgagaaacagggcatcgattgtgagcccaaagcctccaccatcatgattattcaagacaagtacaggcagaaaactcatttctcaaaatttggaattccgttacctgactttgtggaagtagatactttaagtagcatagagaaagctggggaaatgtttggttatcctctaatggtcaaaagcaagagattagcatatgatggccgtggaaatgctgttgctcacgacaaaaaagagctatcttctgttgttgcttctcttggtgggtttgagcatggcttgtatgttgagaggtggacatcttttgtaaaggagctttctgtcattgtggcaaggagcagagacggttctacggtgtgctatcctgttgttgaaaccatccacaaggataacatctgccatgttgttgaggctcctgccgaggtgcctgataaaataaagaagttggctactaatgtagctgaaaaggctatcaaatcattggaaggtgctggtgttttcgctgtagaattatttttaacacaagataatcaggttttattgaatgaagtagctccaaggcctcacaacagtgggcatcacacaattgagtcatgttatacctcgcaatatgagcaacatttacgtgctattcttggccttcctcttggtgatccttcaatgaaagcgcctgcatcaataatgtacaacatcctgggtgaggatgagggtgaggcaggatttactcaagctcatcagttgattgagagagctttggacatttcaggtgcatctgtccattggtatgcaaaaccagaaatacggaagcagagaaagatgggccatattacaattgtggggccttcaaagtacagtgtaaaagcacgcttagataagttgctgcaaagagacgcatatgaccccaagaaagttgcagttaaacctcgtgctgcaataataatgggttctgattctgatcttcctgtcatgaaagatgctgcagtagtattgaagaaattcaacataccttttgagcttacaattgtttcggctcatcgtacaccagagaggatgtaccattatgcattatctactaaagaaagaggcttagaggtcataattgcaggtgcaggtggagcggctcacttaccagggatggtggcttcattgacttctgtcccagtaataggagtacccatcatgacttcatctttacatggaactgattccctcctatctattgtccagatgccgaaaggtattcctgttgctactgttgcaattggaaatgcggaaaatgcaggtttattggcagttaggatgctggcctcaagagatcctgagttgggggacaaggcaactgaataccagcatgatctgagggatatggtgttggagaaagcaaaaaggctcgaggaactaggttgggaggaatataccgagctatacttgaagaagcattga

SEQ ID NO: 52434 - protein, 631 aa, Oryza sativa
MHSRLLSAPSHASAASSSPLPFAAAHPCRASWTPRPTSPLPPLSLLRATASMHPSPPPEGHSDQPVHGVTNTVVGVLGGGQLGKMLCQAASQMGVRMAILDPLEDCPASSVCHEHVVGSFNDGATVSEFAKRCGVLTVEIEHVDAVTLEKLEKQGIDCEPKASTIMIIQDKYRQKTHFSKFGIPLPDFVEVDTLSSIEKAGEMFGYPLMVKSKRLAYDGRGNAVAHDKKELSSVVASLGGFEHGLYVERWTSFVKELSVIVARSRDGSTVCYPVVETIHKDNICHVVEAPAEVPDKIKKLATNVAEKAIKSLEGAGVFAVELFLTQDNQVLLNEVAPRPHNSGHHTIESCYTSQYEQHLRAILGLPLGDPSMKAPASIMYNILGEDEGEAGFTQAHQLIERALDISGASVHWYAKPEIRKQRKMGHITIVGPSKYSVKARLDKLLQRDAYDPKKVAVKPRAAIIMGSDSDLPVMKDAAVVLKKFNIPFELTIVSAHRTPERMYHYALSTKERGLEVIIAGAGGAAHLPGMVASLTSVPVIGVPIMTSSLHGTDSLLSIVQMPKGIPVATVAIGNAENAGLLAVRMLASRDPELGDKATEYQHDLRDMVLEKAKRLEELGWEEYTELYLKKH

SEQ ID NO: 52435 - DNA, 396 bp, uncultured archaeon GZfos32E7
  CDS (1)..(396)
atggacaaagtagctataatcatgggttctgagagtgatcgtgcggttgcggataaggcggttgcggtactggcagagtataatgtcccttacgaagtaaagatgatttccgcacataggaatcccgatgagctggatagatatctgaaggaaagcgaagatgtatcggtgataatagcgattgcaggtctatcggctgcgttaccgggtgtgatagcgtcaaaaacggaaaagcccgttattggcgtgcccgtgagtggtaagttgttaggcatggatgctctgctttctatggttcaaatgccccctggtgttccggtaggcgtagtgggtatagacagcgggaaaaatgcggctttgcttgcgcttcggatgctgaacgtgaaaaagcaatag

SEQ ID NO: 52436 - protein, 131 aa, uncultured archaeon GZfos32E7
MDKVAIIMGSESDRAVADKAVAVLAEYNVPYEVKMISAHRNPDELDRYLKESEDVSVIIAIAGLSAALPGVIASKTEKPVIGVPVSGKLLGMDALLSMVQMPPGVPVGVVGIDSGKNAALLALRMLNVKKQ

SEQ ID NO: 52437 - DNA, 405 bp, uncultured archaeon GZfos13E1
  CDS (1)..(405)
atggataaaatagcggtgatactgggctcggagagcgatagggcgatagcggacaaagtggtaaaggtgctgggtgagcataagatttcttatgacgtgaaggtgatttctgcacacaggaatcccgatgagctggatagatatttaaaagaaagcgaagaagaggtggaagtgataatagcaattgcagggttatcggcggcattgccgggggtaatagcgtcaaaaacgaaaaagcccgtgattggtgttcccgtgagtgggaagttgctcggtatggatgctctgctttccatggtgcagatgcctccgggtgttcctgtagcggtagtaggcatagacaacggcgaaaatgctgctttgcttgctttacgaattttagaacttacaatgaaatgcggatag

SEQ ID NO: 52438 - protein, 134 aa, uncultured archaeon GZfos13E1
MDKIAVILGSESDRAIADKVVKVLGEHKISYDVKVISAHRNPDELDRYLKESEEEVEVIIAIAGLSAALPGVIASKTKKPVIGVPVSGKLLGMDALLSMVQMPPGVPVAVVGIDNGENAALLALRILELTMKCG

SEQ ID NO: 52439 - DNA, 1758 bp, Hebeloma cylindrosporum
  CDS (1)..(1758)
atgtcagaacaggttgttggaatacttggaggaggccagcttggtcgcatgcttgcagcatcggcttccttgttaaaccagaaagttattattcttgatacgggagaacatggaccagccaagcagattatcgcaccgacggaacctcacttggcccatctcgatggatcgttcgcagatcctgtgaagattcgcgaactcgctagcaaagtagatgtgcttaccgtcgagatcgagcacgtcgatgcagccgccctcgaagaagtacgattggcgacgaaaggaaaagttctcgctatccatccgagtccatccaccatccagattatccaggacaaatttcggcagaagcaacacttgtcgtcccacggtctgccagtatcggaatttgtcgaggtcgagtcctctgtggattcgatatccgaagcggcccagaaacttggcctgcctctcatgttgaagagtcgtaccttagcctacgacggccgtggcaattttgtggtccgaaacttgcgacaggtcgaagaagcaattgctgccctgggagggcggcccctttacgctgaaaagtgggttcccttctccaacgaaattgccattatggtcgttaggactgtcgacggtgaggtccaatcttaccctgtggtagaaaccgttcacaaggacaatgtttgccaccttgtattggcacctttacggagtcgagacccttctcttccatcgaaagcgacatctatcgccgaaaatgccataaaatcgttcaccggcgcaggtgtcttcggcgttgaattgtttctgatggatgatgggaaaatatttatcaatgaaattgctccccgtccccataactctggccattacacgatcgaagcctgtgaaacttctcagtatgaaaatcatttacgcgccatcctctcgctcccccttgggtcaaccgcactaaaggtgccttccgctgccatgcttaacttgatcggccagtcgtcttccatgggtgagatcacgaaaaccaaggatgtcgccctcaccattcccggggcttcggtccacttgtatgggaagtcagaatgcaggaaaggtcgaaagatgggtcatatcaccattgtggccgattcggacgcccaactccgatcccgtctgcgcacccttctccaatccctccccgaaaactactgtccgcctggtgagatagacctgtacgcccccgctgccatggtccctggctctggtttctccgatcccaacccactagtgggggttatcatgggctcagactcggatctgcatgtcatgcttccagcagcccgaattcttgatcatttcaagatcccatacgagttgacgatcgtatcagcgcaccgaactcccgaccgcctcgtcgaatacgcccggtccgcatcgacgaggggcctgcgaaccatcattgcaggcgcaggtggtgcggcccatcttccaggaatggtggctgcgatgacggccctccctgtgatcggcgttcccgtgaaaggcagtaccctcgatggcgtagattctttgcacagtatcgttcagatgccgcgtggtatacctgtggcgaccgttgccattaataacggcacgaacgctggtctattagcggtgcggatattgtcagcgggtatcccacatctcattcactccatggagcattatatgagctccatggaaaatgaagttctgggtaaagtcgaaaaattgaaggaagtggggtgggagaactatcaggtgaaacgaagttga

SEQ ID NO: 52440 - protein, 585 aa, Hebeloma cylindrosporum
MSEQVVGILGGGQLGRMLAASASLLNQKVIILDTGEHGPAKQIIAPTEPHLAHLDGSFADPVKIRELASKVDVLTVEIEHVDAAALEEVRLATKGKVLAIHPSPSTIQIIQDKFRQKQHLSSHGLPVSEFVEVESSVDSISEAAQKLGLPLMLKSRTLAYDGRGNFVVRNLRQVEEAIAALGGRPLYAEKWVPFSNEIAIMVVRTVDGEVQSYPVVETVHKDNVCHLVLAPLRSRDPSLPSKATSIAENAIKSFTGAGVFGVELFLMDDGKIFINEIAPRPHNSGHYTIEACETSQYENHLRAILSLPLGSTALKVPSAAMLNLIGQSSSMGEITKTKDVALTIPGASVHLYGKSECRKGRKMGHITIVADSDAQLRSRLRTLLQSLPENYCPPGEIDLYAPAAMVPGSGFSDPNPLVGVIMGSDSDLHVMLPAARILDHFKIPYELTIVSAHRTPDRLVEYARSASTRGLRTIIAGAGGAAHLPGMVAAMTALPVIGVPVKGSTLDGVDSLHSIVQMPRGIPVATVAINNGTNAGLLAVRILSAGIPHLIHSMEHYMSSMENEVLGKVEKLKEVGWENYQVKRS

SEQ ID NO: 52441 - DNA, 1869 bp, Nicotiana tabacum
  CDS (1)..(1869)
atggggaatgctgagcctgcctctccaattttagctgtcaatcctcaaaaaagtatcagcttccttaaaaatcacagctttgtgttttcatcatctttaatgagacaacagtctgaacacaccccaactatgttatcttgcaaagcttctttggaagttgtaacggactcacccggcggtttagaagtccatggaatatcggaaatggttgtgggtgttttgggaggagggcagctgggtcgtatgctgtgtgaagcggcatcccagatggcgatcaaagtgattgtcttggacccaatgaataattgtcctgctagtgcactggcacatcaacatgtggtaggaagctatgatgacagtgccactgttgaagaatttgggaaaaggtgtggagtactaaccgttgagatcgagcatgttgatgttgtcacacttgagaagcttgagcaacaaggtgtggattgccaacccaaggcctctactattcgtataatccaggataaatatcttcagaaggtccacttttctcgtcatgctatcccacttcctaagtttatgcagattgatgatcttgaaagtgctagacgagcaggggacctgtttggttatcctcttatgataaagagcaggaggttggcatatgatgggcgtggcaacgctgtcgctaaaagcgaggaggagctctcctctgctgttaatgcacttggaggatatggtcgtggtttatatgttgagaaatgggcgccatttgtgaaggagctctctgtgattgtggcgaggggaagggatggttcaattgcatgttaccctgctgtagaaactattcacagggataacatttgtcatatcgtaaagtcacctgctaatgtatcttggaagagtatgaaacttgcaacggacgttgcgcacagagctgttagttcattagaaggtgcaggagtctttgctgttgagttgtttttgacagaagatggtcagattttactaaatgaagtagctcccagacctcataatagtgggcatcacaccattgaggcttgcttcacttcacaattcgagcaacatttgcgggctgtggttggccttccacttggtgatccatcaatgaaaactcctgctgcagtcatgtataacatattgggggaagacgatggcgaacctggatttcttttagctaatcaacttattgaaaaagcattgggaatcccgggggtatctgttcattggtatgacaaaccagagatgcgaaggcaacgcaagatgggacacatcacaatagttggcccttctatgggcattgtggaagctcagctaagggtgattctaaatgaagaaagtgttaatggccatcctgcagttgcaccacgtgttgggatcataatgggatctgattcagatcttcctgttatgaaggatgctgccaagattttaaatgagtttgatgtgcctgctgaagtaaaaatagtttcagcccaccgtacacctgagatgatgttttcttatgctttgtctgcacgggaacgtggcatccaagtaataattgctggtgctggtggtgccgcccacttacctggaatggttgctgcatttactccactacctgttattggcgttccagtacgcgcttccacattagatggacttgactccctattgtccattgttcagatgccaagaggggtcccagttgcaacagttgcaattaacaacgccacaaatgctggtctactggcagtaagattgttagggatcagcgacataaagttgcaagctaggatggcccagtaccaagaggacagaagagatgaggttttggtcaagggggagagactagaaaagattggctttgaagaatatctgaactcttaa

SEQ ID NO: 52442 - protein, 622 aa, Nicotiana tabacum
MGNAEPASPILAVNPQKSISFLKNHSFVFSSSLMRQQSEHTPTMLSCKASLEVVTDSPGGLEVHGISEMVVGVLGGGQLGRMLCEAASQMAIKVIVLDPMNNCPASALAHQHVVGSYDDSATVEEFGKRCGVLTVEIEHVDVVTLEKLEQQGVDCQPKASTIRIIQDKYLQKVHFSRHAIPLPKFMQIDDLESARRAGDLFGYPLMIKSRRLAYDGRGNAVAKSEEELSSAVNALGGYGRGLYVEKWAPFVKELSVIVARGRDGSIACYPAVETIHRDNICHIVKSPANVSWKSMKLATDVAHRAVSSLEGAGVFAVELFLTEDGQILLNEVAPRPHNSGHHTIEACFTSQFEQHLRAVVGLPLGDPSMKTPAAVMYNILGEDDGEPGFLLANQLIEKALGIPGVSVHWYDKPEMRRQRKMGHITIVGPSMGIVEAQLRVILNEESVNGHPAVAPRVGIIMGSDSDLPVMKDAAKILNEFDVPAEVKIVSAHRTPEMMFSYALSARERGIQVIIAGAGGAAHLPGMVAAFTPLPVIGVPVRASTLDGLDSLLSIVQMPRGVPVATVAINNATNAGLLAVRLLGISDIKLQARMAQYQEDRRDEVLVKGERLEKIGFEEYLNS

SEQ ID NO: 52443 - DNA, 1668 bp, Mucor circinelloides
  CDS (1)..(1668): Xaa of translated CDS can stand for any naturally occuring amino acid which can be translated from respective CDS-codon
atgaatagtcaaaaagtcggtattcttggaggcggtcagttgggtcgtatgatggtagaagctgcatccagactcaacctctctgtcaccattcttgatgctcccgtggacgcacccgccaagcaaattgaatccactcaaaaccacattcaaggcgctttcaacgatgccgccaagatcactgaattagcctctcaagtggatgtgttgactgtagagatcgagcatgtcaatgcggatgtgcttgcccagatcgagcaagaaggtcgtgtgcgtgtctgcccctctgccttcactgtcaagaccatccaagacaagtacaaccaaaagaagtacctagagtcacatggcattcccgttgccgagtaccgcgaaatcaaggatgccgatgctgtcaagcaagtcgccaaggagtttggctatccattgatgctcaagtccaagaccatggcctatgacggcaagggcaactacgtcgtcaagtcagaagctgatgtcgagaaggcagtagctgctctgtccaagacacccttgtacgcagaaaagtgggccccctttgtcaaggaactcgctgtcatggtcgtccgtcgtgccaacggcgaaattagatcatatcctgtagtggaaaccattcacaagaacagcatttgccacctcgtcattgctcctgctcaaatcgacggcagcgtcgctgtcaaggctcaaaagattgccgaaaacgccatcaaatccttccctggtgctggtatctttggcgtcgagatgtttgtcatggccgacggtgagattctgctcaacgaaattgctcctcgtccccacaactcgggccattacaccatcgaggcctgtgagacctctcaatacgaaaaccacatgcgcgccatcttggatttgcccttgggctccactgccagtgyaaggtgcctgcgttccatcatggtcaatatcttgggcgaaaacagcgacatggaagcttgttacaagccttgccaagctgctttattggcagagggcgctaccatccacttgtacggtaagaaggaatccagagctggccgtaagatgggccacattacgttggtgggtgaatccatgatgcaagtgcaaaagaacttgaagcccatcttggacgaaatcgagcctggtgtagagagacccttgacattgcgacctttggtgggtatgattatgggttctgacagcgatttgcctgtcatgaaggtgggtgctcagatcctcaaggactttggtattccctttgaattgtccattgtgtctgctcatcgcactcccttgcgtatggtggaatatgcaaagtctgctgctcagcgcggtctgatggccatcattgctggtgctggtggtgctgctcatttgcctggtatggtggctgccatgacacctttgcctgtcattggtgtgcctgtcaagggcagctctcttgacggcgtggactctctctacagtattgtgcaaatgcctcgcggtatccctgtggccaccgtcgctgtcaacaacagcaccaatgctgctctgcttgctattcgtatcttgggtgcttccattcccggcattcaaaagcaaatggctgcttacatggagaagatggagggagaagtcttgaccaaggtcgagaagcttgacaatgttggatgggaaaactactag

SEQ ID NO: 52444 - protein, 555 aa, Mucor circinelloides
  misc_feature (306)..(306): Xaa can be any naturally occuring amino acid
MNSQKVGILGGGQLGRMMVEAASRLNLSVTILDAPVDAPAKQIESTQNHIQGAFNDAAKITELASQVDVLTVEIEHVNADVLAQIEQEGRVRVCPSAFTVKTIQDKYNQKKYLESHGIPVAEYREIKDADAVKQVAKEFGYPLMLKSKTMAYDGKGNYVVKSEADVEKAVAALSKTPLYAEKWAPFVKELAVMVVRRANGEIRSYPVVETIHKNSICHLVIAPAQIDGSVAVKAQKIAENAIKSFPGAGIFGVEMFVMADGEILLNEIAPRPHNSGHYTIEACETSQYENHMRAILDLPLGSTASXRCLRSIMVNILGENSDMEACYKPCQAALLAEGATIHLYGKKESRAGRKMGHITLVGESMMQVQKNLKPILDEIEPGVERPLTLRPLVGMIMGSDSDLPVMKVGAQILKDFGIPFELSIVSAHRTPLRMVEYAKSAAQRGLMAIIAGAGGAAHLPGMVAAMTPLPVIGVPVKGSSLDGVDSLYSIVQMPRGIPVATVAVNNSTNAALLAIRILGASIPGIQKQMAAYMEKMEGEVLTKVEKLDNVGWENY

SEQ ID NO: 52445 - DNA, 1719 bp, Aspergillus oryzae
  CDS (1)..(1719)
atgtggaactctcctaaggtgggaatcctcggcggaggccaattgggccgcatgctggtcgagtccgccaaccgattgaacattcaatgcaacgtgctcgatgcggagaactccccggccaagcagatcagtagccacgatggccacgttaccggttcttttaaggagcgcgaggccgttcgggaactggccaagacctgcgacgttgtgacggcagagattgaacatgtcgatacctacgccctggaggagattgcctctcaggtcaagattgaacccagctggcaagcgattcggacgatccagaacaagttcaaccagaaggagcacctgcggaaatatggtattcccatggcggagcatcgcgagctggccgagaacactcccgaagaattggccaaggtcggcgaacagcttggatatcctatgatgttgaagtcgaagactatggcttacgacggacgtggaaactatcgtgttaactctaaggaggatatccccgaggcccttgaagcgcttaaggaccgcccattgtatgcagagaagtgggcttacttcaagatggaattggccgtcatggtcgtaaagaccaaggatgatgtcctgtcataccctaccgtcgagaccgtccaagaagactcgatatgcaaactcgtctatgcccccgcgcgcaacgtgtccgacgccatcaaccagaaagcccaggagttagcacgtaaggccgtcgcagccttcgacggaaagggtgtttttggtgtcgaaatgttcctcctcgaagacgacagtctgatcctgtgcgaaattgctagccgcattcacaactccggtcactacaccattgaaggttgccccctgtctcaattcgatacccatatccgcgccatcctcgatctccccatccctcctaagagcctcgagctccgtcaaccctccatcatgctcaacatcatcggcggtgccgcccccgacacacacctcaaggccgcagagcatgctctctccatccccaacgccagcatccatctctacagcaagggcgccgccaaaccaggccgcaagatgggccatatcactgtcaccgcgccgaccatgcacgaagccgagacacacatccagcccctgatcgacgtggtcgacgagatccgctcccagcgcagcgacatcaagacccagccccagaagtcgggcccctcgaagcctgcaccctccgtggccgtcatcatgggctcggacagcgatctcaagaccctcgttccaggactcaagctccttaaagagtacttcggcatcgaacccgcagtcgacatcacctccgctcaccgcaccccggagtacatggccgaatactccgccagtgccgctgcccgcggtatcaaggttatcatcgccgctgctggcggcgccgcccatctccccggtatggccgccgctcacaccgctcttcctgtgatcggtgtcccggtcaagggcagctccttggatggtgtcgacagtctgtacagcatcgtgcagatgcccagaggtgtccctgtcgccaccgtcggaatcaacaacagcattaacgccgctctcctggccgccagaatcctgggctcctttgatccagccattcagcgcaaggtggaggcgtatgctgagcaggctaagaccgagaatctcgacttcaagggcactaagatgcgcgaactcggttgggaaaagtactttgagcaaatgtga

SEQ ID NO: 52446 - protein, 572 aa, Aspergillus oryzae
MWNSPKVGILGGGQLGRMLVESANRLNIQCNVLDAENSPAKQISSHDGHVTGSFKEREAVRELAKTCDVVTAEIEHVDTYALEEIASQVKIEPSWQAIRTIQNKFNQKEHLRKYGIPMAEHRELAENTPEELAKVGEQLGYPMMLKSKTMAYDGRGNYRVNSKEDIPEALEALKDRPLYAEKWAYFKMELAVMVVKTKDDVLSYPTVETVQEDSICKLVYAPARNVSDAINQKAQELARKAVAAFDGKGVFGVEMFLLEDDSLILCEIASRIHNSGHYTIEGCPLSQFDTHIRAILDLPIPPKSLELRQPSIMLNIIGGAAPDTHLKAAEHALSIPNASIHLYSKGAAKPGRKMGHITVTAPTMHEAETHIQPLIDVVDEIRSQRSDIKTQPQKSGPSKPAPSVAVIMGSDSDLKTLVPGLKLLKEYFGIEPAVDITSAHRTPEYMAEYSASAAARGIKVIIAAAGGAAHLPGMAAAHTALPVIGVPVKGSSLDGVDSLYSIVQMPRGVPVATVGINNSINAALLAARILGSFDPAIQRKVEAYAEQAKTENLDFKGTKMRELGWEKYFEQM

SEQ ID NO: 52447 - DNA, 1278 bp, Xenopus laevis
  CDS (1)..(1278)
atggagtcttacgcagaactgaagctgggtaagaaattaaatgaagggaaaacgaaagaagtgtacgaactgcccgagcaccctggctgcgtactgatgaagtccaaagacctgattactgccggcgatgcagtacggaaagatcacatggaagggaaagcctctatttccaacaagactactagctgcgtcttcaaactgctgcaggaggctgggatcaaaacggcgtttgtgcggaagtgcagcgacgcggctttcattcctactcactgcgagatgattcccattgaatgggtgtgccgcagaatcgccacgggctcattcttgaagagaaatcctggtgttaaggaaggctacaaattcctcccccctaaagtggagaccttttttaaggatgatgccaaccatgatcctcagtggtctgaggaacaactgatctcggcaaaactcagctgtgcagggcttgtgattggtcaggctgaggtggatatcatgactcactccacagcggccatctttgagattctagagaaggcttggatgactcaggagtgcacactagtagacatgaagattgagtttggtgtggatgttacaaagaaggagattgtcctcgctgatgttattgataatgactcttggcgcctgtggccggctggggacaaatctcaacagaaagataagcaaacatatcgggaactaaaggaggtgacacctgaagctctgcagatggtgaagagaaactttgagtgggtggcagacagagtagagctcctgctgaagtcaaacagccaaggtagggtggtggtgctgatgggatccatttctgacctggcacactgcgaaaagataaagaaatcctgtgcaaactatggcattccctgtgagctgagagtgacttctgcacacaaaggcccggatgaaaccctgcgtatcaagtctgagtacgatggtgatggcattcctacagtcttcatagcagtggctggcagaagcaacggtttgggaccggtcatgtctggaaacactgcttatcccgtgatcaactgcccccctctcactgcagattggggtgcacaggatgtgtggtcgtccctccgaatgcccagtgggcttggatgttccaccgttctctcaccagaagctgcagctcagtttgctgctcaaatctttggcttaaacaaccacctagtgtggtgcaagctccgctcctgcaccctgaacacctggatatctctcaagcaagcggacatgaagctgagggagtgcagcatctga

SEQ ID NO: 52448 - protein, 425 aa, Xenopus laevis
MESYAELKLGKKLNEGKTKEVYELPEHPGCVLMKSKDLITAGDAVRKDHMEGKASISNKTTSCVFKLLQEAGIKTAFVRKCSDAAFIPTHCEMIPIEWVCRRIATGSFLKRNPGVKEGYKFLPPKVETFFKDDANHDPQWSEEQLISAKLSCAGLVIGQAEVDIMTHSTAAIFEILEKAWMTQECTLVDMKIEFGVDVTKKEIVLADVIDNDSWRLWPAGDKSQQKDKQTYRELKEVTPEALQMVKRNFEWVADRVELLLKSNSQGRVVVLMGSISDLAHCEKIKKSCANYGIPCELRVTSAHKGPDETLRIKSEYDGDGIPTVFIAVAGRSNGLGPVMSGNTAYPVINCPPLTADWGAQDVWSSLRMPSGLGCSTVLSPEAAAQFAAQIFGLNNHLVWCKLRSCTLNTWISLKQADMKLRECSI

SEQ ID NO: 52449 - DNA, 405 bp, Salmonella typhi
  CDS (1)..(405): transl_table=11
atgagcgactgggctaccatgcaattcgccgccgaaatttttgaaattctggatgtcccgcaccatgtagaagtggtttccgcccatcgcacccccgataaactgttcagcttcgccgaaacggcggaagagaacggatatcaagtgattattgccggcgcgggcggcgcggcacacctgccgggaatgattgcggcaaaaacgctggtcccggtactcggcgtgccggtacaaagcgctgcgctcagcggcgtggatagcctctactccatcgtgcagatgccgcgcggcattccggtgggtacgctggcgatcggtaaagccggggcggcgaacgccgcactgctggcagcgcaaattttggctacgcatgatagcgcgctgcatcggcgcatcgccgactag

SEQ ID NO: 52450 - protein, 134 aa, Salmonella typhi
MSDWATMQFAAEIFEILDVPHHVEVVSAHRTPDKLFSFAETAEENGYQVIIAGAGGAAHLPGMIAAKTLVPVLGVPVQSAALSGVDSLYSIVQMPRGIPVGTLAIGKAGAANAALLAAQILATHDSALHRRIAD

SEQ ID NO: 52451 - DNA, 405 bp, Salmonella enterica subsp
  CDS (1)..(405): transl_table=11
atgagcgactgggctaccatgcaattcgccgccgaaatttttgaaattctggatgtcccgcaccatgtagaagtggtttccgcccatcgcacccccgataaactgttcagcttcgccgaaacggcggaagagaacggatatcaagtgattattgccggcgcgggcggcgcggcgcacctgccgggaatgattgcggcaaaaacgctggtcccggtactcggcgtgccggtacaaagcgctgcgctcagcggcgtggatagcctctactccatcgtgcagatgccgcgcggcattccggtgggtacactggcgatcggtaaagccggtgccgctaacgccgccctgctcgccgcacagattctggcgcaacacgacgcggaactgcatcagcgcatcgccgactag

SEQ ID NO: 52452 - protein, 134 aa, Salmonella enterica subsp
MSDWATMQFAAEIFEILDVPHHVEVVSAHRTPDKLFSFAETAEENGYQVIIAGAGGAAHLPGMIAAKTLVPVLGVPVQSAALSGVDSLYSIVQMPRGIPVGTLAIGKAGAANAALLAAQILAQHDAELHQRIAD

SEQ ID NO: 52453 - DNA, 1905 bp, Vigna unguiculata
  CDS (1)..(1905)
atgcttcacagtgcacgcgtagtattgtcaggccactccaccatcccagcttttgccttcagaccctctaatccctgtattaagacaacctcttcacttggtttctacatggagcaatctccttctttaaagctaaaacagtgtcaccagccccatcttgcctgtcaagcgacatcacgggatgatgatgatgcttctctaaggaatgatgaaccacctgttcatggaatatctgaagtggttgttggggttctgggaggtgggcaacttggtcgtatgatgtgtcaagccgcttctcagatggccattaaagtcatggttttggatccgcaagaaaattgccctgctagttctctctcttatcatcatatggtcggaagctttgacgaaagcactaaagtggaggaatttgccaagagatgtggagtattgaccgttgaaattgaacatgttgatgttgatacattggaaaaacttgagaaacagggagttgactgccagcccaaagcctctacagtcagaattattcaggataagtatcaacaaaaggttcacttctccaagcatggcattccacttcctgaatttatgaagatagatgatcttgaaagtgctaagaaagttggggaactctttgggtatcctcttatgattaagagtaggagactagcttatgatgggcgaggaaattttgttgctaaaagtgaagaggaactttcatctgctgtggatgctctaggaggatttgatcgaggtttatatgctgaaaaatgggcaccttttgtcaaggaactagctgttattgtggcaagaggaagagacaattcaatttcatgttatcctgttgttgaaactattcacagggacaatatatgccacatagttaaggctccggctaatgtgaaatggaagacgagggagcttgccactgaagttgctgttaatgctgttaagtccctggaaggtgccggtgtgtttgcagttgaattgtttttgactaatgatggagagattttattaaatgaagtagcacctagacctcacaacagtgggcatcatacaatagaatcttgccatacctcgcaatttgagcaacatttgcgggctgttgttggtcttccccttggtgatccatcattgaaaactccagctgctatcatgtacaacatattaggtgaagaagagggggaacttggttttcaattagcacatgaattgatgaaaagggcactggccatccctggtgcttctgttcattggtatgataagccagaaatgagaaagcaacggaagatgggccatataactatcgttgggccctcccttaacaatattgaaagcaatcttgcaattctgctggaagggaaaagattacatgataagactgctgttgctccacgtgtggggattataatgggttctgattcagatctgcctgttatgaaaagtgctgctgaaatcttggagatgtttggtgtgcctcatgaggtaagaatagtttcagcccacaggactccagaattgatgttttcttatgcctcatctgctcatgaacgaggcatacaagtcattattgctggtgctggtggtgcagctcacttgcctggtatggttgctgccctcactcccttgcctgttgttggcgttcctgtgcgtgcttctaccttggatggacttgattcactcttgtcaattgtccagatgccgagaggtgttccagttgccactgttgcagttaataatgcaactaatgctggattgctggcagtgaggatattgggtgttgccaacgataatcttctgtcaaggatgagtcaatatcaagaggaccaaaaagaaatcgtcttgaacaaaggagataaattagaaaaacatggctgggaatcctacttaaaaaatagttag

SEQ ID NO: 52454 - protein, 634 aa, Vigna unguiculata
MLHSARVVLSGHSTIPAFAFRPSNPCIKTTSSLGFYMEQSPSLKLKQCHQPHLACQATSRDDDDASLRNDEPPVHGISEVVVGVLGGGQLGRMMCQAASQMAIKVMVLDPQENCPASSLSYHHMVGSFDESTKVEEFAKRCGVLTVEIEHVDVDTLEKLEKQGVDCQPKASTVRIIQDKYQQKVHFSKHGIPLPEFMKIDDLESAKKVGELFGYPLMIKSRRLAYDGRGNFVAKSEEELSSAVDALGGFDRGLYAEKWAPFVKELAVIVARGRDNSISCYPVVETIHRDNICHIVKAPANVKWKTRELATEVAVNAVKSLEGAGVFAVELFLTNDGEILLNEVAPRPHNSGHHTIESCHTSQFEQHLRAVVGLPLGDPSLKTPAAIMYNILGEEEGELGFQLAHELMKRALAIPGASVHWYDKPEMRKQRKMGHITIVGPSLNNIESNLAILLEGKRLHDKTAVAPRVGIIMGSDSDLPVMKSAAEILEMFGVPHEVRIVSAHRTPELMFSYASSAHERGIQVIIAGAGGAAHLPGMVAALTPLPVVGVPVRASTLDGLDSLLSIVQMPRGVPVATVAVNNATNAGLLAVRILGVANDNLLSRMSQYQEDQKEIVLNKGDKLEKHGWESYLKNS

SEQ ID NO: 52455 - DNA, 1752 bp, Dipodascus magnusii
  CDS (1)..(1752)
atggactctagaactgttggaattctcggtggtggccagctgggtcgtatgcttgttgaagcagccaacagattgaacatcacgaccgccattctggacgctgaaaactcaccagctactcagatcaactcggttggacctcacgtcagcggctctttcaaagatgctgtcagcattgccaagtttgctgaaaagtgcgacgtcttgactgtagagatcgagcacgtcaatgcagacattttacaagatcttttggaccagaagaaagtgaaggaaatccatccatctcctgccactatcaagttgattcaagacaagtatacccagaagcttcattatcttaaacacaaattaccgactcctgctgttttggacgttcctaatgccactcaggaatccgttgctgctgtcggtcaaaagtttggttatccatttgttctcaaggctagaactaatgcttatgatggtcgcggaaactatgttgtcaagaccgctgaggatattcctgaagccttaaaagcccttaaagatactcctttatatgccgaaaagtttgccagatttgaccgtgaattggctgttatggttatccgtactaaggatggtcaaactatttcataccctgctgttgaaaccgttcaagaaaacaatgtttgtcatactgtttatgctcctgccagactttctgattctattcaacaacaagccagaaacgttgccgaaaacgctgtcaagactttagatggtgctggtatttatggtgttgaaatgttccttatgaatggtgacaatgaagaaaccaattctgatttgattcttctcaacgaaattgctcctcgtcctcacaactctggtcattatactcaagacggttgtgccgtttctcaatttgatgctcatattcgtgcagttcttggcttacctattcctcctcttaccatgtctacacctagcacctacacaatcatgctcaacattttgggcgccaaagaagccaatggcgaacttgaagtgtgtaaaagagctcttgaagttccaggctgcactatccatttgtatggaaaaactactagacctggcagaaagatgggtcatatcaacatcactgctggaagcatgcgtgaagctgaagcaaaattagctgccatttcaggtgctacctctaaaaataccatcgaacaaactattcctaaagaagtcgctattgctggaacatcttctactcccaccgttggcatcattatgggttcagattccgatcttcccgtcatgagtgcagcttgcaaggttcttactgaattcaatgttccctacgaagtcaagatcgttagtgctcatcgtacacccagtcgtatgtacagctacgccatcaacggcgtgaaccgtggtttacgcgtcattattgcaggcgccggcggtgctgctcatcttcctggtatggtcgctgctcttactcctttacctgtaattggtgttcctgttaagggttctacactcgatggtgttgattctcttcatagtattgttcaaatgccccgtggcgttcctgtcgctactgttgctattaataatgccatgaacgccggtcttttggctgtcagaatcttggccactggtagcgaaaccaaagatgctgtcttgcttgctaagcttgaaaagtatattcaaaatatggaaaacgaagtgttggcaaagacggaaaagttggaaaccattggctatgaaaagtatttagaagaaaagaagaattaa

SEQ ID NO: 52456 - protein, 583 aa, Dipodascus magnusii
MDSRTVGILGGGQLGRMLVEAANRLNITTAILDAENSPATQINSVGPHVSGSFKDAVSIAKFAEKCDVLTVEIEHVNADILQDLLDQKKVKEIHPSPATIKLIQDKYTQKLHYLKHKLPTPAVLDVPNATQESVAAVGQKFGYPFVLKARTNAYDGRGNYVVKTAEDIPEALKALKDTPLYAEKFARFDRELAVMVIRTKDGQTISYPAVETVQENNVCHTVYAPARLSDSIQQQARNVAENAVKTLDGAGIYGVEMFLMNGDNEETNSDLILLNEIAPRPHNSGHYTQDGCAVSQFDAHIRAVLGLPIPPLTMSTPSTYTIMLNILGAKEANGELEVCKRALEVPGCTIHLYGKTTRPGRKMGHINITAGSMREAEAKLAAISGATSKNTIEQTIPKEVAIAGTSSTPTVGIIMGSDSDLPVMSAACKVLTEFNVPYEVKIVSAHRTPSRMYSYAINGVNRGLRVIIAGAGGAAHLPGMVAALTPLPVIGVPVKGSTLDGVDSLHSIVQMPRGVPVATVAINNAMNAGLLAVRILATGSETKDAVLLAKLEKYIQNMENEVLAKTEKLETIGYEKYLEEKKN

SEQ ID NO: 52457 - DNA, 480 bp, Thermoplasma volcanium
  CDS (1)..(480): transl_table=11
ttgcgattcatgccaaaggttgcagtaatcatggggagttcaagcgattacgaagtaatgaaagccgccatagatacactcaacgagttcggtgtagatgtaatctcgaaagtggtctctgcacataggactccagagtttatgatgcagtttgcaaaggaggcagcttcctctggaatagaagctataatagctggagcaggcggagctgcacacctgcctggcatggttgctgcgatgactccattgccggtgattggagtgccagttcctacgaaaaacctaggagggatggattccctgctatcaatagtgcaaatgccttctggtgtgccagtagctactgttgctattggcaattcgaagaatgcagctctgttggcaattcgaatactgtcaataaaatatcccgatcttatggccaaaatgtctgaatttatggaatctgaaaaacagcgggttcttcaagaaaagatctga

SEQ ID NO: 52458 - protein, 159 aa, Thermoplasma volcanium
MRFMPKVAVIMGSSSDYEVMKAAIDTLNEFGVDVISKVVSAHRTPEFMMQFAKEAASSGIEAIIAGAGGAAHLPGMVAAMTPLPVIGVPVPTKNLGGMDSLLSIVQMPSGVPVATVAIGNSKNAALLAIRILSIKYPDLMAKMSEFMESEKQRVLQEKI

SEQ ID NO: 52459 - DNA, 1875 bp, Nicotiana tabacum
  CDS (1)..(1875)
atgggtcctcagagaagcagttttgcctctccaattttagctgtcaatcctcaaaaaagtatcagcttccttaaaaatcacagctttgtgttttcatcatctttaatgagacaacagtctgaacacaccccaactatgttatcttgcaaagcttctttggaagttgtaacggactcacccggcggtttagaagtccatggaatatcggaaatggttgtgggtgttttgggaggagggcagctgggtcgtatgctgtgtgaagcggcatcccagatggcgatcaaagtgattgtcttggacccaatgaataattgtcctgctagtgcactggcacatcaacatgtggtaggaagctatgatgacagtgccactgttgaagaatttgggaaaaggtgtggagtactaaccgttgagatcgagcatgttgatgttgtcacacttgagaagcttgagcaacaaggtgtggattgccaacccaaggcctctactattcgtataatccaggataaatatcttcagaaggtccacttttctcgtcatgctatcccacttcctaagtttatgcagattgatgatcttgaaagtgctagacgagcaggggacctgtttggttatcctcttatgataaagagcaggaggttggcatatgatgggcgtggcaacgctgtcgctaaaagcgaggaggagctctcctctgctgttaatgcacttggaggatatggtcgtggtttatatgttgagaaatgggcgccatttgtgaaggagctctctgtgattgtgccgaggggaagggatggttcaattgcatgttaccctgctgtagaaactattcacagggataacatttgtcatatcgtaaagtcacctgctaatgtatcttggaagagtatgaaacttgcaacggacgttgcgcacagagctgttagttcattagaaggtgcaggagtctttgctgttgagttgtttttgacagaagatggtcagattttactaaatgaagtagctcccagacctcataatagtgggcatcacaccattgaggcttgcttcacttcacaattcgagcaacatttgcgggctgtggttggccttccacttggtgatccatcaatgaaaactcctgctgcagtcatgtataacatattgggggaagacgatggcgaacctggatttcttttagctaatcaacttattgaaaaagcattgggaatcccgggggtatctgttcattggtatgacaaaccagagatgcgaaggcaacgcaagatgggacacatcacaatagttggcccttctatgggcattgtggaagctcagctaagggtgattctaaatgaagaaagtgttaatggccatcctgcagttgcaccacgtgttgggatcataatgggatctgattcagatcttcctgttatgaaggatgctgccaagattttaaatgagtttgatgtgcctgctgaagtaaaaatagtttcagcccaccgtacacctgagatgatgttttcttatgctttgtctgcacgggaacgtggcatccaagtaataattgctggtgctggtggtgccgcccacttacctggaatggttgctgcatttactccactacctgttattggcgttccagtacgcgcttccacattagatggacttgactccctattgtccattgttcagatgccaagaggggtcccagttgcaacagttgcaattaacaacgccacaaatgctggtctactggcagtaagattgttagggatcagcgacataaagttgcaagctaggatggcccagtaccaagaggacagaagagatgaggttttggtcaagggggagagactagaaaagattggctttgaagaatatctgaactcttaa

SEQ ID NO: 52460 - protein, 624 aa, Nicotiana tabacum
MGPQRSSFASPILAVNPQKSISFLKNHSFVFSSSLMRQQSEHTPTMLSCKASLEVVTDSPGGLEVHGISEMVVGVLGGGQLGRMLCEAASQMAIKVIVLDPMNNCPASALAHQHVVGSYDDSATVEEFGKRCGVLTVEIEHVDVVTLEKLEQQGVDCQPKASTIRIIQDKYLQKVHFSRHAIPLPKFMQIDDLESARRAGDLFGYPLMIKSRRLAYDGRGNAVAKSEEELSSAVNALGGYGRGLYVEKWAPFVKELSVIVPRGRDGSIACYPAVETIHRDNICHIVKSPANVSWKSMKLATDVAHRAVSSLEGAGVFAVELFLTEDGQILLNEVAPRPHNSGHHTIEACFTSQFEQHLRAVVGLPLGDPSMKTPAAVMYNILGEDDGEPGFLLANQLIEKALGIPGVSVHWYDKPEMRRQRKMGHITIVGPSMGIVEAQLRVILNEESVNGHPAVAPRVGIIMGSDSDLPVMKDAAKILNEFDVPAEVKIVSAHRTPEMMFSYALSARERGIQVIIAGAGGAAHLPGMVAAFTPLPVIGVPVRASTLDGLDSLLSIVQMPRGVPVATVAINNATNAGLLAVRLLGISDIKLQARMAQYQEDRRDEVLVKGERLEKIGFEEYLNS

SEQ ID NO: 52461 - DNA, 489 bp, Streptococcus suis
  CDS (1)..(489): transl_table=11
atgaatattccaatttccatcatcatgggctctagttccgactggaaaaccatgaaaaaagcagccgatgtgctggacaaatttggcgtagcctatgaaaagaaagtggtttttgcccaccgcaccccagacctcgtgttccgtcatgccgaagaggcgcgtggtcgtggtattaaggttattatcgcgggagcgggtggtgcggctcatttgccaggtatggtagcagccaagaccaccctgcctgttatcggtgttcctgtccaatcccgtgccctcagcggtgtggattcgctctattctatcgtgcaaatgccaggcggcgtacctgtggcaacgatggcaattggagaagcgggagcaaccaatgcggctttgactgccctgcgtatcctgtccatcgaagatagcggtatagcagatcaactggccagctttgctattgaacaaggaaaaatcgcggaggctatgagcgatgaactcaactaa

SEQ ID NO: 52462 - protein, 162 aa, Streptococcus suis
MNIPISIIMGSSSDWKTMKKAADVLDKFGVAYEKKVVFAHRTPDLVFRHAEEARGRGIKVIIAGAGGAAHLPGMVAAKTTLPVIGVPVQSRALSGVDSLYSIVQMPGGVPVATMAIGEAGATNAALTALRILSIEDSGIADQLASFAIEQGKIAEAMSDELN

SEQ ID NO: 52463 - DNA, 483 bp, Thermoplasma acidophilum
  CDS (1)..(483): transl_table=11
gtgagtcttatgcctagggttgcggttataatgggcagttcaagcgactacgagaccatgaagcccgctgtggatttcctcagatccatgcacatagatgttgtgctcaagattgtctcagcgcacaggacacctgaatatatgtttcagttcgcgtccagcgccagagatcaaggcatagaggttataattgctggggcaggcggtgcagcgcatcttccgggtatggttgcatcgatgacaacgctgcctgttataggcgtccctgttccgagcaggaatttaaatgggctggattcgcttctttccatagtgcagatgccatccggaatacctgttgccacggtcgcgatagggaattcgaaaaatgccgccatactggcatgcaggatactctccataaagtatcctgagatcgagaaagccattaagaagtacatggatgacgagcgagacagggtgcttaacgaaaagcttgaatga

SEQ ID NO: 52464 - protein, 160 aa, Thermoplasma acidophilum
MSLMPRVAVIMGSSSDYETMKPAVDFLRSMHIDVVLKIVSAHRTPEYMFQFASSARDQGIEVIIAGAGGAAHLPGMVASMTTLPVIGVPVPSRNLNGLDSLLSIVQMPSGIPVATVAIGNSKNAAILACRILSIKYPEIEKAIKKYMDDERDRVLNEKLE

SEQ ID NO: 52465 - DNA, 1719 bp, Candida boidinii
  CDS (1)..(1719)
atggattcaaagacaattggtatcttaggtggtggtcaacttggccgtatgttagttgaggctgctagtagattaaacatcaaaacagttattcttgaaaatggtgatcaatcaccagctaaacaaattaatgcttcttctactcacatagatggatctttcaatgatccagaagctattgctaaattagctgctgcttgtgatatcatgacagtagaaattgaacatgttaatacagaagccttacaaaaaatttcagattcaacaggtttaccaatttatccaactcctgctacattgtctgtcatcaaagataaatatttacaaaaagaacatttaataaaacatggtattgcagttgctgaatctgttgctgttgaatcaaatgaggaatcattattaaaagttggtgaacaatttggttaccctttcatgcttaaggctagaactttagcttatgacggaagaggtaattttgtcgttaaatctcaagataaaataaaagaagctatcgaattcttaggtgatagacctttatacgctgaaaaatgggctccatttactaaagaattagctgtcatggttgttagatccgttgatggtaacgtttactcttacccaacagttgaaacaatccatcgtgataatatctgtcatacagtctttgctccagctagagttcaagattctatcttaaagaaagctcaaatcttagctgataacgcagttaagtcatttgatggtgctggtatctttggtgttgaaatgttcttattaccttcaggtgatttattagttaatgaaattgccccaagaccacataactcaggtcattacacaattgacgcttgcgttacttcacaatttgaagctcttattagagctttagccggtttaccaatgccagataatttcactaaattctcaactccacaaacaaatgccattatgttaaacgttttaggtactgatatcccaaattctgaatttgaattatgtagacgtgctttagaaactccaaattcttctgtttatttatacggtaaaacaacaagacctaagagaaaaatgggtcacattaatattgtttcaggttctatgcaagattgtgaacgtcgtttaagatatatcgaaggtgaaacagatgaaaaacctgctgctgccaactcaaagaccaacgctgtcgctggtacttctgaaaaacctttggtcggtgttatcatgggttcagattctgatttacctgttatgtcattaggctgtaatatactgaaacaatttggtgtcccatttgaagtcactattgtatcagctcacagaaccccagaacgtatggctaaatacgcagctgacgctccagcaagaggtattaaagctataatagcaggtgctggtggtgctgctcacttaccaggtatggtcgctgccatgaccccattaccagtcattggtgtcccagttaaaggatcaactttagatggtgttgattctttacactcaattgttcaaatgccaagaggtatcccagttgctacagttgctattaataatgctacaaatgcggctttattagctattagaatattaggtgcttctgatagtaaatggtttacagaaatggatgcttatatgaaaggtatggaaaaagaagttttacaaaaagctgaaaaacttgaaaaaggcggttatgaagattacttatcaacctacaaaaaataa

SEQ ID NO: 52466 - protein, 572 aa, Candida boidinii
MDSKTIGILGGGQLGRMLVEAASRLNIKTVILENGDQSPAKQINASSTHIDGSFNDPEAIAKLAAACDIMTVEIEHVNTEALQKISDSTGLPIYPTPATLSVIKDKYLQKEHLIKHGIAVAESVAVESNEESLLKVGEQFGYPFMLKARTLAYDGRGNFVVKSQDKIKEAIEFLGDRPLYAEKWAPFTKELAVMVVRSVDGNVYSYPTVETIHRDNICHTVFAPARVQDSILKKAQILADNAVKSFDGAGIFGVEMFLLPSGDLLVNEIAPRPHNSGHYTIDACVTSQFEALIRALAGLPMPDNFTKFSTPQTNAIMLNVLGTDIPNSEFELCRRALETPNSSVYLYGKTTRPKRKMGHINIVSGSMQDCERRLRYIEGETDEKPAAANSKTNAVAGTSEKPLVGVIMGSDSDLPVMSLGCNILKQFGVPFEVTIVSAHRTPERMAKYAADAPARGIKAIIAGAGGAAHLPGMVAAMTPLPVIGVPVKGSTLDGVDSLHSIVQMPRGIPVATVAINNATNAALLAIRILGASDSKWFTEMDAYMKGMEKEVLQKAEKLEKGGYEDYLSTYKK

SEQ ID NO: 52467 - DNA, 1713 bp, Zygosaccharomyces rouxii
  CDS (1)..(1713)
atgaattcgcaaactgttggtatacttggtggtggccaattgggtcgtatggttgttgaagctgctaatagattaaacatcaagactattatattagatgcaccaaattccccagctaagcaaattaatgcgttaaatgaacatgtagatggttcattctcaaatccagctgatattgaaaaattagctgaaaaatgtgatgtcttgacagttgaaattgaacatgtcgatgtgcccactttgaagaaactacaatcaaaacatcctaacctaaaaatttatccatctccagaaaccattggtttaattcaagataagtatgtccaaaaaaaccatttagtggccaataatattgcagtagcagaatctatacccattgaatccacaactagtgaaggtttagctctagctggtagacaattgggatacccctacatgttaaaatcaagaacaatggcttacgatggtagaggaaattttgtagttaagagcgaggaatcaattccaaaagcccttgagtttttgaaagatagaccattatatgccgaaaaatgggctccatttactaaagaattggctgttatgattgtgcgttccattgatggtcgtgtgttttcatacccaaccgtagagacaattcataaggataacatctgtttcctatgttatgcaccagcaagagttcccgattccgttcaattaaaggccaaactattagcagaaaatgcagttagagcttttcccggttgtggtatctttggtgttgaaatgttctatttagaaacaggggaattgctcatcaacgaaattgcaccaagacctcataattctggtcactatacgattgatgcctgtattacttcacaatttgaagcacacctaagagctatcctagacttaccaatgcccaaggatttctcctctctttctacatcttgcaccaacgccattatgctcaacgtgcttggagaagatgtaaagaatcaagaattacagacttgcgaaagagcgttagagaccccaggtgcctctgtgtacctgtacggtaaggaatcaagacctaagcgcaaattaggtcacattaatgtggttacttcatccatggaggagtgtgaaagacgtctttcattcattactggcgagacttctgagccagttaagatcactgtagctcaaaagatagattcggaatccaatgggaaacctgttgtcggcattattatgggttccgattcagacctaccagtaatgtccaaggcatgtgctattcttgaagaatttgaggtcccattcgaagtgacaatcgtttctgctcacagaacccctcaaagaatgaacaaatatgcatcagaagcctcttctcgtggtctaaaggccatcattgcaggtgcaggtggtgctgcccatctacctggtatggttgccgctatgactcctctaccagttatcggtgtaccagtgaaaggctcctccctagatggtgtcgattccctacattccattgtacaaatgcctagaggggtgcctgtagctacagtggcaatcaacaatagcaccaacgcagccctgctggcagtcaggttcatcggtgctttcgaaccaaagtaccataagaaaatgcaacagtacctgttaaaacaagaggtagaagtgctagaaaaggctaaaaaattggaaaattctggttacaagaattacatgggccttgagtaa

SEQ ID NO: 52468 - protein, 570 aa, Zygosaccharomyces rouxii
MNSQTVGILGGGQLGRMVVEAANRLNIKTIILDAPNSPAKQINALNEHVDGSFSNPADIEKLAEKCDVLTVEIEHVDVPTLKKLQSKHPNLKIYPSPETIGLIQDKYVQKNHLVANNIAVAESIPIESTTSEGLALAGRQLGYPYMLKSRTMAYDGRGNFVVKSEESIPKALEFLKDRPLYAEKWAPFTKELAVMIVRSIDGRVFSYPTVETIHKDNICFLCYAPARVPDSVQLKAKLLAENAVRAFPGCGIFGVEMFYLETGELLINEIAPRPHNSGHYTIDACITSQFEAHLRAILDLPMPKDFSSLSTSCTNAIMLNVLGEDVKNQELQTCERALETPGASVYLYGKESRPKRKLGHINVVTSSMEECERRLSFITGETSEPVKITVAQKIDSESNGKPVVGIIMGSDSDLPVMSKACAILEEFEVPFEVTIVSAHRTPQRMNKYASEASSRGLKAIIAGAGGAAHLPGMVAAMTPLPVIGVPVKGSSLDGVDSLHSIVQMPRGVPVATVAINNSTNAALLAVRFIGAFEPKYHKKMQQYLLKQEVEVLEKAKKLENSGYKNYMGLE

SEQ ID NO: 52469 - DNA, 486 bp, Lactococcus lactis
  CDS (1)..(486): transl_table=11
atggcagaagtagcaattatcatgggttgcagctcagattgggcgacaatgaaagaaacagcaaaaattttagatgactttggtttagcttatgaaaaaaaggtcgtatcagcacaccgaacaccagctttgatggctgaattttcgagccaagcccgtgagcgaggttataaagttatcatcgcaggtgctggtggagccgctcatttgccaggaatggtatctgctcagactctcgttccagtcattggcgttccaataaaatcacgcgctttatctggtctggattcactttattcaattgttcaaatgccggcaggggttcctgtagcgacaatggcaattggagaggctggagcaaaaaatgctgctttatttgctttgcaacttttggcgaatacaaacgagaatttaatccaaaaattgttggtctatcgggctgctgcgcaagaaatggttgaggaatcaaacaaagcattactttaa

SEQ ID NO: 52470 - protein, 161 aa, Lactococcus lactis
MAEVAIIMGCSSDWATMKETAKILDDFGLAYEKKVVSAHRTPALMAEFSSQARERGYKVIIAGAGGAAHLPGMVSAQTLVPVIGVPIKSRALSGLDSLYSIVQMPAGVPVATMAIGEAGAKNAALFALQLLANTNENLIQKLLVYRAAAQEMVEESNKALL

SEQ ID NO: 52471 - DNA, 504 bp, Aquifex aeolicus
  CDS (1)..(504): transl_table=11
atgaaaccactcgttggcgtaataatgggaagtatttccgactgggagtatatgaaaaaggctgttgaagttttaaaggaattcggagttcctcacgaggttaaagtggtctccgcacacagaacgcccgaactcatgtatgaatacgcaaaaaccgcaagggagaggggaatagaggtgataatagcgggagcgggaggctccgcccatcttccgggaatgaccgcctctatgactacacttcccgttataggcgttcccatacccactaaaaacctcggaggagtggactcgttgtactcgatagtccagatgccagcgggtattcccgtggctacggtggctataggaaacgcaacaaatgccgggctcttagcggtaagaattctctcaataaagtaccccgagtatgctaagaaattggacgagtacacggaaaaactgaaggagaaagtggctaaaatgaacgaagaactgcaaaaggaggtggaaaatggaatttga

SEQ ID NO: 52472 - protein, 167 aa, Aquifex aeolicus
MKPLVGVIMGSISDWEYMKKAVEVLKEFGVPHEVKVVSAHRTPELMYEYAKTARERGIEVIIAGAGGSAHLPGMTASMTTLPVIGVPIPTKNLGGVDSLYSIVQMPAGIPVATVAIGNATNAGLLAVRILSIKYPEYAKKLDEYTEKLKEKVAKMNEELQKEVENGI

SEQ ID NO: 52473 - DNA, 543 bp, Archaeoglobus fulgidus
  CDS (1)..(543): transl_table=11
atgtctcaattcctgagcttaaggaactgcttgaggcttacgataaggttgttgaggcaatttcgaagaggtgaagggatgaaggcggtaataattatgggttcgaaatctgacctggattactcgaagaagatagcttcaaagctcgcagattttggcattgatgctgtaatgagaatcgcttcagcccacaaaactcccgagaaggttctggaaatcataaaggagtacgagaaggaggatgtggtcttcgtcaccgtagcgggaaggagcaacgctctgagcggttttgttgacgcaaacacctcaaagccggtaatagcgtctcccccctacagcgacaagtttggaggggcagacatcttctcaagcataaggatgccttcaggcgttgcgccaatgctcgttcttgaggctgagaacgctgccttagcggttgcaaagattttcgctcttaaggatgagggggtcagggagaaagttgtccagttccaggagaacaagaggagagaaatttataaagcggatgaggaactgaggtga

SEQ ID NO: 52474 - protein, 180 aa, Archaeoglobus fulgidus
MSQFLSLRNCLRLTIRLLRQFRRGEGMKAVIIMGSKSDLDYSKKIASKLADFGIDAVMRIASAHKTPEKVLEIIKEYEKEDVVFVTVAGRSNALSGFVDANTSKPVIASPPYSDKFGGADIFSSIRMPSGVAPMLVLEAENAALAVAKIFALKDEGVREKVVQFQENKRREIYKADEELR

SEQ ID NO: 52475 - DNA, 489 bp, Bacillus subtilis
  CDS (1)..(489): transl_table=11
atgcagccgctagtaggaatcatcatgggaagcacttccgattgggagacaatgaaacacgcatgcgacatacttgacgaactcaatgttccgtacgaaaaaaaggtcgtttccgctcaccggacgcctgatttcatgtttgaatatgctgaaactgctagagaaagaggcatcaaggtgattattgccggtgccggaggagcggcgcatctgccagggatgacggctgcgaaaacaacactgccagtcattggagttccggttcagtccaaggcgctgaacggaatggattcacttctttccatcgtccaaatgcctggaggcgtgcctgttgcgacaacatccatcggcaaagcgggtgctgtgaacgcaggcctgttagcggcgcaaattttgtcagcatttgacgaagaccttgcccgtaagctggatgagagaagagaaaatacaaaacagacagtgttagaaagcagtgatcagcttgtctaa

SEQ ID NO: 52476 - protein, 162 aa, Bacillus subtilis
MQPLVGIIMGSTSDWETMKHACDILDELNVPYEKKVVSAHRTPDFMFEYAETARERGIKVIIAGAGGAAHLPGMTAAKTTLPVIGVPVQSKALNGMDSLLSIVQMPGGVPVATTSIGKAGAVNAGLLAAQILSAFDEDLARKLDERRENTKQTVLESSDQLV

SEQ ID NO: 52477 - DNA, 489 bp, Brucella melitensis
  CDS (1)..(489)
atgagcgttgatgtcgccattatcatgggaagccagtccgattgggaaaccatgcaccatgcagccgacacattggaggcgctcggcatctccttcgacgcacggatcgtttccgcccatcgcacccctgacaggctggtcgccttcgccaagggggcgaaagcggaaggcttcaaggtcatcatcgcaggcgccggcggcgcggcccacctgcccggcatggccgctgccatgacaccgcttcccgtctttggcgttccagttcaatccaaggcgctttcgggccaggattcgctactctccatcgtacagatgccagcgggtattcccgtcggcactctcgccatcggccgtgcaggcgcggtcaatgccgcccttctcgccgccgccgttctggcgctatatgatgaagcacttgccgcccgtcttgatgaatggcgcaaggcgcagaccgaaagcgttgcagaacgcccctcgaacgaagcctga

SEQ ID NO: 52478 - protein, 162 aa, Brucella melitensis
MSVDVAIIMGSQSDWETMHHAADTLEALGISFDARIVSAHRTPDRLVAFAKGAKAEGFKVIIAGAGGAAHLPGMAAAMTPLPVFGVPVQSKALSGQDSLLSIVQMPAGIPVGTLAIGRAGAVNAALLAAAVLALYDEALAARLDEWRKAQTESVAERPSNEA

SEQ ID NO: 52479 - DNA, 489 bp, Brucella suis
  CDS (1)..(489): transl_table=11
atgagcgttgatgtcgccattatcatgggaagccagtccgattgggaaaccatgcgccatgcagcccacacattggaggcgctcggcatctccttcgacgcacggatcgtttccgcccatcgcacccctgacaggctggtcgccttcgccaagggggcgaaagcggaaggcttcaaggtcatcatcgcaggcgccggcggcgcggcccacctgcccggcatggccgctgccatgacaccgcttcccgtctttggcgttccagttcaatccaaggcgctttcgggccaggattcgctactctccatcgtacagatgccagcgggtattcccgtcggcactctcgccatcggccgtgcaggcgcggtcaatgccgcccttctcgccgccgccgttctggcgctatatgatgaagcacttgccgcccgtcttgatgaatggcgcaaggcgcagaccgaaagcgttgcagaacgcccctcgaacgaagcctga

SEQ ID NO: 52480 - protein, 162 aa, Brucella suis
MSVDVAIIMGSQSDWETMRHAAHTLEALGISFDARIVSAHRTPDRLVAFAKGAKAEGFKVIIAGAGGAAHLPGMAAAMTPLPVFGVPVQSKALSGQDSLLSIVQMPAGIPVGTLAIGRAGAVNAALLAAAVLALYDEALAARLDEWRKAQTESVAERPSNEA

SEQ ID NO: 52481 - DNA, 1272 bp, Caenorhabditis elegans
  CDS (1)..(1272)
atgtcgtcgttggctgaaatcgcgtcgagacccgaaaacttggagcttcttgctgaaggaaaaaccaagcaaatctttgatattaaaggagaaaaggattatgtgctcattcgttccaaagatagcttgaccgcattcaacgctgtccgtaaaaatgagcttgaaggaaagtctagaatcgcaagtaaaaccacatcaaacgtgtttgaatatcttcaacttctcggtctaccaacacactttgaaaaaagcatctctgaaactgaatttgtcgcccgtaaatgcaccatgattccgattgaatgggtggcacgacgtgttgcgacaggatccttcttgaagagaaatcctggagttaaagagggtttcagatttaatgatctgaaattggagacatttttcaaagacgacgctaatgatgatccacaatggactgatgaacaaattgtgtcgaatggtttgatgattgatcatttgaaaattggaagagaagagatttcattgatgaagaagatgacaaagttggtgtttagagcattggagaaaggatgggctctttcaaatagtgctctgattgatatgaagatcgaattcggagtcacagttgaaggagaaattctcctggccgacgtgattgacaatgactcgtggagagtttggcctgaaaatgatagacgtctgcagttggataagcaagtttacagggatatgaaggaagtgacagaagaggggttggctctcgttttgaagaattatacaaaggttatggatatcactgccaccttctcaaaacaccagcaaaaatgccatgttcttgtgatcatgggatctggttcggatggcgtattcgcacggaaaatctctgatgaagccaagaaatttggactggaaactacgctgaaagtaagctcagctcataaaactacctcggacactctggaagttatcgctgatttcgaagaaagtggagttccgacagttgtgattgcagtagctggaagatccaatggactcggtccagttattgctggaaactcgtctcttccggtgatcaactgcccgccaccaagtgaatcaacgagtcttgacatttggtcatcactccgaatgccgaatggaatcgggtgtactacagtgttggacccatcggaggccgcgcttgccgccgcaaaaatcctcgcgtctcacaatcatattgtgtttggaaaagtgctcactgcacagctcaagaatcaaatcaacatttacaacgccaatcgcaaacttgaatag

SEQ ID NO: 52482 - protein, 423 aa, Caenorhabditis elegans
MSSLAEIASRPENLELLAEGKTKQIFDIKGEKDYVLIRSKDSLTAFNAVRKNELEGKSRIASKTTSNVFEYLQLLGLPTHFEKSISETEFVARKCTMIPIEWVARRVATGSFLKRNPGVKEGFRFNDLKLETFFKDDANDDPQWTDEQIVSNGLMIDHLKIGREEISLMKKMTKLVFRALEKGWALSNSALIDMKIEFGVTVEGEILLADVIDNDSWRVWPENDRRLQLDKQVYRDMKEVTEEGLALVLKNYTKVMDITATFSKHQQKCHVLVIMGSGSDGVFARKISDEAKKFGLETTLKVSSAHKTTSDTLEVIADFEESGVPTVVIAVAGRSNGLGPVIAGNSSLPVINCPPPSESTSLDIWSSLRMPNGIGCTTVLDPSEAALAAAKILASHNHIVFGKVLTAQLKNQINIYNANRKLE

SEQ ID NO: 52483 - DNA, 1707 bp, Candida albicans
  CDS (1)..(1707): transl_table=12
atggatagcaaaactgttggtattttaggaggtggccaattaggtcgtatgattgttgaagcagcacatagattgaatatcaagaccgtaattttggacgcagccaaatcaccagctaaacagatcaatgctctagacgatcacgttgatggatcgttcacaaactatgattcgattgtgaaattagctgaaaaggcagacgtattaactgttgaaatcgaacatgttgatgttgatgctttaatcaaagttcaagagaaattccctaaagttgaaatatatccattacctgaaaccataagattgattcaagataaatatttacagaaaaatcatttaatcaaacacgatgttgcagttacagaatctgttgcagttgaaaccaacacagtcgatgacttgttacacattggggaaaagtttggatacccttatatgttaaaatcgagaactttggcgtatgatggtagaggtaactttgttgtcaaagacaagtcatactgtgagaaagctttagaatttttaaaagaccgtccattatatgctgaaaaatggtgtcctttcaccaaagaattggctgtgatggttgtcagatcattagaaggggaagtctttgcttacccaactgttgaaactattcatgaaaacaatatttggcatttagtgtatgctcctgccaggatcccagatactttgggccaaaaggcatctatattagccaaaaatgcagttaagtcattccccgggtgtggtattttcggtgttgaaatgttcttgttggaaaacaacgaattattgatcaatgaaattgcaccaagacctcacaactctggtcattataccattgatgcatgtgtcacttcacaatttgaagctcatgttcgtgctgtcacaggattacctatgccaaaggggttcactgaattctccacttccatcaccaatgctattatgttgaatgtcttgggtgataaggcaaccccaaataaagaactggagatttgtcgccgtgctttggaaactccacatgcgtcagtgtatctttatggtaaagctactagaccagagcgaaagatgggtcatatcaatgttgtcacatcttccatgcaagatgccgagagtagattaagttatatattgggtgataccactgaaattcctaaatctttagctaccgacaaggaatctccattggtgggaataataatgggttccgattcggatctaccagttatggcagttggtgctcgtattttgaaacaattcggtgtgccatttgaactcacaatcgtaagtgcacacagaactcctcatagaatgtctgagtatgctattgaagcaccaaagcgtggcttgaaatgtatcattgctggtgcaggtggtgctgctcatttgccaggtatggtggcggccatgaccccattgcctgtcattggtgttccagttaagggatctacattagatggggttgattcgttacactctatagtacagatgccaagaggtattcctgttgcaactgttgctattaacaatagtactaatgctgcattgttggcaatcagaatattaggcgcctatgactcaaaatggttgactgagatgaaccaatatatgttgaacatggaaactgaagtattaggtaaagcagaaactttagaagaaattggatatgaagactatttaactgataaattgaaaaaatag

SEQ ID NO: 52484 - protein, 568 aa, Candida albicans
MDSKTVGILGGGQLGRMIVEAAHRLNIKTVILDAAKSPAKQINALDDHVDGSFTNYDSIVKLAEKADVLTVEIEHVDVDALIKVQEKFPKVEIYPLPETIRLIQDKYLQKNHLIKHDVAVTESVAVETNTVDDLLHIGEKFGYPYMLKSRTLAYDGRGNFVVKDKSYCEKALEFLKDRPLYAEKWCPFTKELAVMVVRSLEGEVFAYPTVETIHENNIWHLVYAPARIPDTLGQKASILAKNAVKSFPGCGIFGVEMFLLENNELLINEIAPRPHNSGHYTIDACVTSQFEAHVRAVTGLPMPKGFTEFSTSITNAIMLNVLGDKATPNKESEICRRALETPHASVYLYGKATRPERKMGHINVVTSSMQDAESRLSYILGDTTEIPKSLATDKESPLVGIIMGSDSDLPVMAVGARILKQFGVPFELTIVSAHRTPHRMSEYAIEAPKRGLKCIIAGAGGAAHLPGMVAAMTPLPVIGVPVKGSTLDGVDSLHSIVQMPRGIPVATVAINNSTNAALLAIRILGAYDSKWLTEMNQYMLNMETEVLGKAETLEEIGYEDYLTDKLKK

SEQ ID NO: 52485 - DNA, 1713 bp, Candida glabrata
  CDS (1)..(1713)
atggactctagaactgtcggtattttgggtggaggccagttgggccgtatgattgtcgaggctgcaaaccgcttgaatatcaagactttgatacttgacgcaccaaattcacctgcgaagcaaattacgaatgcatctgatcatgtcgatggatcatttgcaaataaggaggatatcgaggccttggctgccaagtgtgatgttatgacagttgaaatcgagcatgtggatgttaatgcattgaaggaagtccaaaaacaattccccaaattggaaatctaccctacgcctgaaaccattggtttgatccaggataagtatgtgcaaaaacaacatttagttaagaatagaattcccgtagtaccgagcatcactgttgaaaattcgaaggaatccttaattaaaacaggatcctcattgggttacccatttgtcttgaaatcaagaacattagcctacgatggaagaggcaactttgttgttaaatctgaagaagacattgagaaaggacttgaatttttggcgaacagaccactatacgctgaaaaatgggcttcctttaagaaggaattatctgtaatgattatcagatcattggatggaagagtatattcataccctattgttgaaacaattcacaaaaacaatgtgtgccacttgtgctatgttccggctcgtgtaccagactcagtacaacacaaggccaaattaatggcggaaaatgcaatcaagtcattcccaggttgtggtatatttggtgtagaaatgtttttgttggatgatgactctatcgtcttgaatgaaattgcacccagacctcataactcaggtcattacaccattaatgcttgtgttgtatctcaatttgaagcacacttgagagccatattagatttacccatgcccaagaactttacttccttaagtactaactctacaaatgctataatgctaaacctattaggagatcctgaaactaaagacaaggaacttcaaatatgtgagagggccttgaatacgcctggcgcatctgtatacctatacggcaaagagtccaagcctaacagaaaggtcggtcatatcaatattgtatgttcgagtatgaaggaatgtgacaagagattacagtttattatgggtctaaaaaccgacccaattaagcattcagttatggaaattttaaatgcggaggaagtaagaaaacctttagttggtgttataatgggatccgattctgatttacccgtaatgtcagcagcttgtaaaatgttggagcaattcgaggtcccatttgaggtcactatagtctcagcacacagaactccttacagaatgaataaatatgcttcagaagcagtatcccgtggtattaaagttatcattgcaggtgcgggtggagcagcacatcttccaggtatggtagcagctatgacacctgtaccagttattggagtacctgtcaagggctctactttagatggtgtagactcactacattctattgttcaaatgccaagaggtgtaccagtagccacagtagccataaataacagcactaacgcaggtattctggctgttaggatgttaggaatacataattatgactatgttaagaaaatggaggaatttttgaacaaacaggaagaggaagtacttcagaaagcagccaaactcgaaagcattggatatgaaaagtacctagagtccaaatag

SEQ ID NO: 52486 - protein, 570 aa, Candida glabrata
MDSRTVGILGGGQLGRMIVEAANRLNIKTLILDAPNSPAKQITNASDHVDGSFANKEDIEALAAKCDVMTVEIEHVDVNALKEVQKQFPKLEIYPTPETIGLIQDKYVQKQHLVKNRIPVVPSITVENSKESLIKTGSSLGYPFVLKSRTLAYDGRGNFVVKSEEDIEKGLEFLANRPLYAEKWASFKKELSVMIIRSLDGRVYSYPIVETIHKNNVCHLCYVPARVPDSVQHKAKLMAENAIKSFPGCGIFGVEMFLLDDDSIVLNEIAPRPHNSGHYTINACVVSQFEAHLRAILDLPMPKNFTSLSTNSTNAIMLNLLGDPETKDKELQICERALNTPGASVYLYGKESKPNRKVGHINIVCSSMKECDKRLQFIMGLKTDPIKHSVMEILNAEEVRKPLVGVIMGSDSDLPVMSAACKMLEQFEVPFEVTIVSAHRTPYRMNKYASEAVSRGIKVIIAGAGGAAHLPGMVAAMTPVPVIGVPVKGSTLDGVDSLHSIVQMPRGVPVATVAINNSTNAGILAVRMLGIHNYDYVKKMEEFLNKQEEEVLQKAAKLESIGYEKYLESK

SEQ ID NO: 52487 - DNA, 534 bp, Corynebacterium ammoniagenes
  CDS (1)..(534): transl_table=11
atgactgcaccgctagttgggctcatcatgggctctgattctgattggccaaccgttgaaccagcagctgaggttctcgacgaattcggtgttccttttgaggtgggcgtggtctctgcgcaccgcacgccggaaaagatgctggattacgccaagcaagcccacactcgcggcatcaaggtgattgttgcttgtgccggtggggcagcgcacctaccaggcatggtggctgcagcaactcctttgccagttattggtattccacgtgccttgaaagatttggaaggtctggactctttgctgtctatcgtgcagatgccagctggggttccggttgcgaccgtgtctatcggcggcgctaagaatgctggcttgctcgccatccgtaccctgggcgtgcagtactcagaattggttgaacgcatggccgattaccaagaaaatatggccgattaccaaccgaaaatatggccaaggaagttgagcaaaaagacgccaatcttcgcgccaagctcatgggggactagaccttag

SEQ ID NO: 52488 - protein, 177 aa, Corynebacterium ammoniagenes
MTAPLVGLIMGSDSDWPTVEPAAEVLDEFGVPFEVGVVSAHRTPEKMLDYAKQAHTRGIKVIVACAGGAAHLPGMVAAATPLPVIGIPRALKDLEGLDSLLSIVQMPAGVPVATVSIGGAKNAGLLAIRTLGVQYSELVERMADYQENMADYQPKIWPRKLSKKTPIFAPSSWGTRP

SEQ ID NO: 52489 - DNA, 1749 bp, Cryptococcus neoformans
  CDS (1)..(1749)
atggcccccagaaagactgtcggtatcctcggcggtggccagctcggccggatgcttacccaccctgcggcccttctcggcattcctctccttatcctcgactctggctcctacacgcccgccaaacagactcttcttcctcctcctcctcattctcaccctgatggtcccttcacttcggaaactcatattcgcaaacttgcctctgcgtgcgacatcctgacagtggagatcgagcacgttaacgccgatgtccttgaggctgtagaaaaggaaggtctttgtgaagtccagcccagtccccaaactatcagattgatccagaacaagtacgaccaaaagaagtaccttgctgaaagaggtgtggctgttgcaccttttgaggagcttcccgcaaacccgacggaagaggattttaaggctatcgcaggtcgattgggtttgcctttgatgctcaaagctaagacccttgcctacgatggacgtgggaactcacctcttaaatccgcatcttcaggggacattcaggcttccttgaaattccttggtgacaggcctctttatgctgaaggatgggcgccctttgtcaaggaagttgcggttatggtcgttaggaataaggagggcgaagtccgaagttacgacgccgtcgagactattcacagggagagcattttacgagtctgtttggcccccctcagaggtgaaaagggtgtgaatcagagggctagggaattagctgagaaggcggttggacaccttgagggtgctggtatctttggggttgagatgttcctcatgcctgatggtgaacttcttctgaacgagattgctcctcgtcctcataactctggtcatcacactattgaggcctgtcttacttcccaatttgagaaccaccttcgagccattctctccttgcctcttggttctactgctcttcgtgttccctccgctgccatggtcaacattctcggtgcctcgtcgactatggacgccatcgacaaaatggcagacaatgctctcactgttcctggtgctgccgtgcatctctacggcaaagctgagagccgaaaggcccgtaagatgggccacatcacggtgactgccgaaagcgatgctgagctcaatgagcgccttagagccctcttattcgcccagcctgatgcccatgccgactggatcgacctcatcgcccctccttcccctgctcccgctcattcccacgccaaaccccttgttggtatcatcatgggtagcgactctgacttgcccgttatgcaccctgctaccaagatcctcgaaaaattcggtgtcccctacgagctcaccataacttctgcccatcgcactcctgagcgaatggtgaagtatgcgaagactgctgcagaccgaggattgcgagccatcattgctggggctggcggtgctgcccatttaccaggtatggtcgccagcgagaccagtttgccagtcatcggtgtgcccgtcaaggccagtgtactggatggcgtggattcattgtatagtattgtgcaaatgccccgaggtattccatgcgccactgtgggtatcaacaactctacaaatgccgcgctacttgcagtccgtatccttggaacatctgtacccgcccttaacaaggctactgaggaatattccaaggcgctagaggaagaagttttggctaaagccgacattttggaggaggaaggctgggacaagtacatcgagaggctgaagaaataa

SEQ ID NO: 52490 - protein, 582 aa, Cryptococcus neoformans
MAPRKTVGILGGGQLGRMLTHPAALLGIPLLILDSGSYTPAKQTLLPPPPHSHPDGPFTSETHIRKLASACDILTVEIEHVNADVLEAVEKEGLCEVQPSPQTIRLIQNKYDQKKYLAERGVAVAPFEELPANPTEEDFKAIAGRLGLPLMLKAKTLAYDGRGNSPLKSASSGDIQASLKFLGDRPLYAEGWAPFVKEVAVMVVRNKEGEVRSYDAVETIHRESILRVCLAPLRGEKGVNQRARELAEKAVGHLEGAGIFGVEMFLMPDGELLLNEIAPRPHNSGHHTIEACLTSQFENHLRAILSLPLGSTALRVPSAAMVNILGASSTMDAIDKMADNALTVPGAAVHLYGKAESRKARKMGHITVTAESDAELNERLRALLFAQPDAHADWIDLIAPPSPAPAHSHAKPLVGIIMGSDSDLPVMHPATKILEKFGVPYELTITSAHRTPERMVKYAKTAADRGLRAIIAGAGGAAHLPGMVASETSLPVIGVPVKASVLDGVDSLYSIVQMPRGIPCATVGINNSTNAALLAVRILGTSVPALNKATEEYSKALEEEVLAKADILEEEGWDKYIERLKK

SEQ ID NO: 52491 - DNA, 1674 bp, Debaryomyces occidentalis
  CDS (1)..(1674)
atggataacaagatagttgggattttaggcggtggccaattaggtcgtatgatagttgaagcagctaacaggctaaacatcaaaaccgtcgtattagatgtaccaaactcacctgcaaagcaaattaattcaaatgaacatgttgatggatcattcacagatttaaaatctattattcaattagctgaaaaatgtgacattttaaccgttgaaattgaacatgttgatgttgaagctttaaaatatgttaaggaaaaatttggcgttgaaatttatccattgccagacacaattaaattaattcaagataaatatttacagaaggagcatttgattcaacatggaatttctgtaactgaatcggtagcagtgccatccaatgatgaacaatccttaattgagatcggtaataaatttaattatcccttcatgttgaaatcgagaactttagcctatgatggaagaggtaactacgttgttaaaacaaaagaatcaattcctgaagctcttgagtttttaaaagacagacctttgtatgctgaaaaatggtgtccgtttaacaaagaattagcagtaatggttgttagatcaattgaaggtgaagtatttgcatatcctactgttgaaactatccataaaaataatatctgtcatgtagtgtatgctcctgcaagggtttcagactccatagcagtgaaagcttcagtattagctaaaaacgctgttaaatctttcccaggttgtggtatttttggtgttgaaatgttcttattaccaaacaatgaaatattaattaatgagattgctccaagacctcataactctggacattacactatcgatgcttgtgtcacatcacaatttgaagctcatgtcagagcagttgttggattaccaatgccaaagaactttaccagtctctctacaactacaacaaatgcaattatgttaaatgtgttaggtgacgaagaatcaaataaagaattagaaatttgtcgtagagctttggaaactccaaatgcttctgtttatctctacgggaagtcaactagaccaaacagaaaaatgggtcatattaacattgtctcatcttcaatggaagattgtgagagtagattggactatattataggcaaatcatcaaaaatcccagaaaatttaattccaaaagaaaaacccttagtcagtataataatgggttcagattcagacttgccagttatgtctgttggtgcaaacattttaaagaggtttggagttccatttgaattaactatcgttagtgcgcatagaacacctcatagaatgacacaatatgctattgaagcaccaaagagaggcttaaaagtcataattgctggtgcaggtggtgctgctcatttaccaggtatggttgctgccatgacaccattaccagttattggcgttcctgtgaaaggctcgactttagatggtgttgattcattgcattcaatcgttcaaatgccaaggggtattcctgttgcaactgtcgcaattaataacagtactaatgctgccttgttggcagtccgtattttgggagcctacgactacaagtggttaaatgagatgaaccagtatatgaataacatggaaaacgaagtgttagctaaagctgaaagattggaagaagttggttatgaaaaatattaa

SEQ ID NO: 52492 - protein, 557 aa, Debaryomyces occidentalis
MDNKIVGILGGGQLGRMIVEAANRLNIKTVVLDVPNSPAKQINSNEHVDGSFTDLKSIIQLAEKCDILTVEIEHVDVEALKYVKEKFGVEIYPLPDTIKLIQDKYLQKEHLIQHGISVTESVAVPSNDEQSLIEIGNKFNYPFMLKSRTLAYDGRGNYVVKTKESIPEALEFLKDRPLYAEKWCPFNKELAVMVVRSIEGEVFAYPTVETIHKNNICHVVYAPARVSDSIAVKASVLAKNAVKSFPGCGIFGVEMFLLPNNEILINEIAPRPHNSGHYTIDACVTSQFEAHVRAVVGLPMPKNFTSLSTTTTNAIMLNVLGDEESNKELEICRRALETPNASVYLYGKSTRPNRKMGHINIVSSSMEDCESRLDYIIGKSSKIPENLIPKEKPLVSIIMGSDSDLPVMSVGANILKRFGVPFELTIVSAHRTPHRMTQYAIEAPKRGLKVIIAGAGGAAHLPGMVAAMTPLPVIGVPVKGSTLDGVDSLHSIVQMPRGIPVATVAINNSTNAALLAVRILGAYDYKWLNEMNQYMNNMENEVLAKAERLEEVGYEKY

SEQ ID NO: 52493 - DNA, 495 bp, Haemophilus influenzae
  CDS (1)..(495): transl_table=11
atgtcaaaaactgcacaaattgccgttgtaatgggttccaaaagcgattgggctactatgcaagaggcaactcagattttagatgaattaaacgtgccttatcatgtggaagtcgtctcggctcatcgtacgcctgataaactttttgaatttgctgaaaatgcacaaaaaaatggctataaagtaattattgctggtgcagggggggcggcacatttacccggtatgatcgcagcgaaaacacttgtgccagtgctgggggtgccagtaaaaagttctatgttaagtggtgtggatagcctttattcaattgtgcaaatgccaaaagggattcctgtcggaacattagcgattggccctgcgggtgcggcaaatgctgggttgttagcagcccaaattctagcaggttgggatgatgcgttattcactcgcctacaagcattccgcgaaaatcaaaccaatatggtattggacaatcctgatccacgcacataa

SEQ ID NO: 52494 - protein, 164 aa, Haemophilus influenzae
MSKTAQIAVVMGSKSDWATMQEATQILDELNVPYHVEVVSAHRTPDKLFEFAENAQKNGYKVIIAGAGGAAHLPGMIAAKTLVPVLGVPVKSSMLSGVDSLYSIVQMPKGIPVGTLAIGPAGAANAGLLAAQILAGWDDALFTRLQAFRENQTNMVLDNPDPRT

SEQ ID NO: 52495 - DNA, 474 bp, Methanococcus jannaschii
  CDS (1)..(474): transl_table=11
atgatatgtataatcatgggtagtgaaagcgatttaaaaatagctgaaaaagcagttaatattttaaaagaatttggtgtagagtttgaggttagagttgcctctgcccatagaacaccagagttagttgaggagattgttaaaaattcaaaggctgatgtatttatagctatagctggattagccgctcatctaccgggagttgtagcaagcttaacaacaaaaccagttattgctgttcctgttgatgcaaagttagatggtttagacgctttacttagctcagtccagatgcctcctggaattcctgttgctactgttggaattgatagaggagaaaacgctgctatattagccttagaaatcttagctttaaaagatgaaaatattgcaaaaaaattgattgaatatagagagaagatgaagaagaaagtttatgcatcagatgaaaaagttaaggaaatgtttaaataa

SEQ ID NO: 52496 - protein, 157 aa, Methanococcus jannaschii
MICIIMGSESDLKIAEKAVNILKEFGVEFEVRVASAHRTPELVEEIVKNSKADVFIAIAGLAAHLPGVVASLTTKPVIAVPVDAKLDGLDALLSSVQMPPGIPVATVGIDRGENAAILALEILALKDENIAKKLIEYREKMKKKVYASDEKVKEMFK

SEQ ID NO: 52497 - DNA, 1020 bp, Methanobrevibacter smithii
  CDS (1)..(1020): transl_table=11
atgacaccaaaagtaatgataattctgggaagtgggtcagatattgctatcgctgaaaaaagtatgaagattttggaaaaacttgaaataccatatagtttgaaaatagcttcagcacatagaacacctgatcttgtaagagaacttgttgtacagggaaccaatgcaggtataaaagtatttattggaattgcaggattagctgctcatcttccaggagcaatagctgcatatactcacaaaccggttattggagttcctgtagatgttaaagttagcggactggatgcactatattcttcagttcaaatgccttatccctctcctgtagccactgttggaattgataggggagataatggagctattttagctgcacgaatcctagggctttatgacgaggaaatacgcaaaaaagtattggaatcaaaagaaggatatagacagaaagtcattaaaaacaatgaagaaattgtccaaaaaatagacaatccacatattaccaatgactttttaaggattaaaaacctcgaattaaatgaaactacagaagaatttaatggaagctacattaataaaaatgctgaggtagtcattattgttggaagacatactgatttaattactggaaaaaaagtaagtgttacactagacagacttaaaatacctcatgatatgcaagtaatttgcccgattagatcaggaaaaaaattcagagcatatgtaaacactatgaaaaatgctaaaatatttattggaattaattccaactcttcccaggtaagtggaggtcttgtaggtcttactgaaaagcctgttattggagttccatgtgaaaatgaacttggaaataattacctgctttcaactgtaaatatgccaccaggagtacctgtagctactgttggtgttaataatggtcgtaatgctgctgttttaagtggtgaaatactttctattaacaatcctgttcttttagagcttttagaaaaattaaaaaataaaaaaatcaacatataa

SEQ ID NO: 52498 - protein, 339 aa, Methanobrevibacter smithii
MTPKVMIILGSGSDIAIAEKSMKILEKLEIPYSLKIASAHRTPDLVRELVVQGTNAGIKVFIGIAGLAAHLPGAIAAYTHKPVIGVPVDVKVSGLDALYSSVQMPYPSPVATVGIDRGDNGAILAARILGLYDEEIRKKVLESKEGYRQKVIKNNEEIVQKIDNPHITNDFLRIKNLELNETTEEFNGSYINKNAEVVIIVGRHTDLITGKKVSVTLDRLKIPHDMQVICPIRSGKKFRAYVNTMKNAKIFIGINSNSSQVSGGLVGLTEKPVIGVPCENELGNNYLLSTVNMPPGVPVATVGVNNGRNAAVLSGEILSINNPVLLELLEKLKNKKINI

SEQ ID NO: 52499 - DNA, 1005 bp, Methanobacterium thermoautotrophicum
  CDS (1)..(1005): transl_table=11
atgaagcccagagtgatgatactccttggaagtgcatctgatttcaggatagccgaaaaggcaatggaaatctttgaggaactcaggataccctatgacctgagggttgcctcagcccacaggacacatgaaaaggtaaaggcaatagtctcagaggccgtgaaggcgggtgttgaggtattcataggaatagcaggactatcagcccatcttccaggcatgatatctgcaaacacccacagacccgtcataggggtccctgttgacgttaaacttggagggctcgacgccctctttgcatgttcacagatgcccttccctgcccccgtcgccactgtgggggtagacaggggagaaaacgccgcaatactcgctgcccagataatagggataggagatcccggggtaagggaaagggttgcagatctaaggagaggtttctatgaacgcgtgcggagagatgaatgtcaggtgctcaacagcatagaggggtcctactatgcacccctggaggttgaaatgcctcccattggtgataaggtcccgtcagattcccaggatgaccccatggtatctgtgatacctggcagctactctgacatgaagatagccaagaagaccaccatgttcctcgaaaggatgggtataagctatgatctgaacgtcatatcacccataaggtaccctgaaagatttgagaggtaccttgagaagatggagaacgtgaagctcttcatagccataagcggcctctctgcacatgttacgggtgctgttgttgccctcagcgacaggccggtgataggggttccctgccccctcaagatgaacggctgggactcactcctctcaatgatcaacatgccgccgggtgtacctgttggaacggtgggggtaggtaacggtggtaacgccgcaatactggctgctgaaatgcttggaatatacgatgaaaagatagaatcgaggataaagaggataaagagccgttccgttaagttctaa

SEQ ID NO: 52500 - protein, 334 aa, Methanobacterium thermoautotrophicum
MKPRVMILLGSASDFRIAEKAMEIFEELRIPYDLRVASAHRTHEKVKAIVSEAVKAGVEVFIGIAGLSAHLPGMISANTHRPVIGVPVDVKLGGLDALFACSQMPFPAPVATVGVDRGENAAILAAQIIGIGDPGVRERVADLRRGFYERVRRDECQVLNSIEGSYYAPLEVEMPPIGDKVPSDSQDDPMVSVIPGSYSDMKIAKKTTMFLERMGISYDLNVISPIRYPERFERYLEKMENVKLFIAISGLSAHVTGAVVALSDRPVIGVPCPLKMNGWDSLLSMINMPPGVPVGTVGVGNGGNAAILAAEMLGIYDEKIESRIKRIKSRSVKF

SEQ ID NO: 52501 - DNA, 516 bp, Mycobacterium leprae
  CDS (1)..(516): transl_table=11
atgaccaggcagccccgagtcggggtgatcatgggcagcgacagcgactggtcggtgatgcaagatgcggcccatgcactggcggagtttgacatcccgatcgaggttcgggtggtgtcggcgcatcgcacccctgctgagatgttcgactatgcgcgcaatgctgtcgaccgcagcatcgcggtgatcattgccggcgccggcggcgcagctcacctgcctggaatggtcgcttccgcgactccgctgccggtgatcggggtgccggtgccgctggccaggctcgacggcctggactcgctgctgtcgatcgtgcagatgccagcgggagttccggttgccacagtgtctatcggtggtgcccgcaacgcgggtttgttggcggtgcgtattttgggatcgtcggacctgcagcttcgagcgcagctggtcgcgttccaggaccggttggccgataccgtgcgggccaaggatgcggatttacagcggtttcgaggtaagttaatcggcgactaa

SEQ ID NO: 52502 - protein, 171 aa, Mycobacterium leprae
MTRQPRVGVIMGSDSDWSVMQDAAHALAEFDIPIEVRVVSAHRTPAEMFDYARNAVDRSIAVIIAGAGGAAHLPGMVASATPLPVIGVPVPLARLDGLDSLLSIVQMPAGVPVATVSIGGARNAGLLAVRILGSSDLQLRAQLVAFQDRLADTVRAKDADLQRFRGKLIGD

SEQ ID NO: 52503 - DNA, 525 bp, Mycobacterium tuberculosis
  CDS (1)..(525): transl_table=11
atgactcctgccggcgagcggccccgggtcggggtgatcatgggcagcgacagcgactggccggtgatggccgacgctgcggcggcgctggccgagttcgacattccggccgaggttcgggttgtttcggcccatcgcacccctgaggcgatgttcagttatgcgcgcggcgcggccgagcgcggtctcgaggtgatcatcgccggagcgggcggggccgcgcacttgcccggtatggtcgccgccgcgacgccgctgccggtgatcggggtgccggtaccgctgggcaggctggacggccttgactccctgctgtcgatcgtgcaaatgccggccggggttccggtggccacggtgtccatcgggggcgccggtaatgccggactgctggcggtgcggatgctgggagccgccaacccccagctgagggcccggatcgtcgcattccaggaccggctggccgacgtcgtggcggccaaggatgcggaactgcagcggcttgcgggtaagttaacccgcgactag

SEQ ID NO: 52504 - protein, 174 aa, Mycobacterium tuberculosis
MTPAGERPRVGVIMGSDSDWPVMADAAAALAEFDIPAEVRVVSAHRTPEAMFSYARGAAERGLEVIIAGAGGAAHLPGMVAAATPLPVIGVPVPLGRLDGLDSLLSIVQMPAGVPVATVSIGGAGNAGLLAVRMLGAANPQLRARIVAFQDRLADVVAAKDAELQRLAGKLTRD

SEQ ID NO: 52505 - DNA, 1632 bp, Pichia methanolica
  CDS (1)..(1632)
atggactcgcaaactgtcgggattttaggtggtggccaacttggtcgtatgatcgttgaagctgcacacagattgaatatcaaaactgtgattctcgaaaatggagaccaggctccagcaaagcaaatcaacgctttagatgaccatattgacggctcattcaatgatccaaaagcaattgccgaattggctgccaagtgtgatgttttaaccgttgagattgaacatgttgacactgatgcgttggttgaagttcaaaaggcaactggcatcaaaatcttcccatcaccagaaactatttcattgatcaaagataaatacttgcaaaaagagcatttgattaagaatggcattgctgttgccgaatcttgtagtgttgaaagtagcgcagcatctttagaagaagttggtgccaaatacggcttcccatacatgctaaaatctagaacaatggcctatgacggaagaggtaattttgttgtcaaagacaagtcatatatacctgaagctttgaaagttttagatgacaggccgttatacgccgagaaatgggctccattttcaaaggagttagctgttatggttgtgagatcaatcgatggccaagtttattcctacccaactgttgaaaccatccaccaaaacaacatctgtcacactgtctttgctccagctagagttaacgatactgtccaaaagaaggcccaaattttggctgacaacgctgtcaaatctttcccaggtgctggtatctttggtgttgaaatgtttttattacaaaatggtgacttattagtcaacgaaattgccccaagacctcacaattctggtcactataccatcgacgcttgtgtcacctcgcaatttgaagctcatgttagggccattactggtctacccatgccgaagaacttcacttgtttgtcgactccatctacccaagctattatgttgaacgttttaggtggcgatgagcaaaacggtgagttcaagatgtgtaaaagagcactagaaactcctcatgcttctgtttacttatacggtaagactacaagaccaggcagaaaaatgggtcacattaatatagtttctcaatcaatgactgactgtgagcgtagattacattacatagaaggtacgactaacagcatccctctcgaagaacagtacactacagattccattccgggcacttcaagcaagccattagtcggtgtcatcatgggttccgattcggacctaccagtcatgtctctaggttgtaatatattgaagcaatttaacgttccatttgaagtcactatcgtttccgctcatagaaccccacaaagaatggccaagtatgccattgatgctccaaagagagggttgaagtgcatcattgctggtgctggtggtgccgctcatttaccgggaatggttgcggcgatgacgccgctgcctgttattggtgtccctgttaaaggctctactttggatggtgttgattcactacactccatcgttcaaatgccaagaggtattcctgttgctactgtggctattaacaatgctactaacgctgccttgctagctatcacaatcttaggtgccggcgatccaaatacttgtctgcaatggaagtttatatga

SEQ ID NO: 52506 - protein, 543 aa, Pichia methanolica
MDSQTVGILGGGQLGRMIVEAAHRLNIKTVILENGDQAPAKQINALDDHIDGSFNDPKAIAELAAKCDVLTVEIEHVDTDALVEVQKATGIKIFPSPETISLIKDKYLQKEHLIKNGIAVAESCSVESSAASLEEVGAKYGFPYMLKSRTMAYDGRGNFVVKDKSYIPEALKVLDDRPLYAEKWAPFSKELAVMVVRSIDGQVYSYPTVETIHQNNICHTVFAPARVNDTVQKKAQILADNAVKSFPGAGIFGVEMFLLQNGDLLVNEIAPRPHNSGHYTIDACVTSQFEAHVRAITGLPMPKNFTCLSTPSTQAIMLNVLGGDEQNGEFKMCKRALETPHASVYLYGKTTRPGRKMGHINIVSQSMTDCERRLHYIEGTTNSIPLEEQYTTDSIPGTSSKPLVGVIMGSDSDLPVMSLGCNILKQFNVPFEVTIVSAHRTPQRMAKYAIDAPKRGLKCIIAGAGGAAHLPGMVAAMTPLPVIGVPVKGSTLDGVDSLHSIVQMPRGIPVATVAINNATNAALLAITILGAGDPNTCLQWKFI

SEQ ID NO: 52507 - DNA, 492 bp, Pseudomonas aeruginosa
  CDS (1)..(492): transl_table=11
atgagcgcactggttggcgtgatcatgggttccaaatcggactggagcaccctcagtcacaccgcggacatgctggacaagctgggcatcccctacgaagtgaaggtggtttccgcccaccgcaccccggacctgctcttccagtacgccgaggaagccgaaggccgcggcctcgaagtgatcatcgccggcgctggcggcgccgcccacctgccgggcatgtgcgcggccaagacccacctgccggtactcggcgtgccggtacagtcgtcgatgctgtcgggtgtcgactcgctgctctccatcgtgcagatgcccgccggcgtaccggtcgccaccctggccatcggcaaggccggcgcggtcaacgcggcgctgctctcggcgagcatcctcggcgccaagcacccgcagtaccacgaggcgctgaagcagttccgcgccaaccagaccgaaaccgtgctggacaatcccgacccgcgcgatgcgtga

SEQ ID NO: 52508 - protein, 163 aa, Pseudomonas aeruginosa
MSALVGVIMGSKSDWSTLSHTADMLDKLGIPYEVKVVSAHRTPDLLFQYAEEAEGRGLEVIIAGAGGAAHLPGMCAAKTHLPVLGVPVQSSMLSGVDSLLSIVQMPAGVPVATLAIGKAGAVNAALLSASILGAKHPQYHEALKQFRANQTETVLDNPDPRDA

SEQ ID NO: 52509 - DNA, 525 bp, Pyrococcus abyssi
  CDS (1)..(525): transl_table=11
ttggtgaaggttgggatgcctaaggtagggataataatgggtagcgattctgacctcccagtaatgaaagaggccgcaaaggttctcgaagactttgaagttgattacgagatgaaggtgatctcagcgcacagaacaccagaaaggttacacgagtacgcaagaacagcagaagagaggggaatagaagttataatcgcaggagctggaggcgctgcccatctcccaggagttttagctgcgctaacgatgattccagttataggggttcccataaaaagcaaagcactaaacggtcttgactcgctcctatcgatagtccaaatgcccccaggaattccagttgcaactgtaggaatagatggagcaaagaacgccgcactcttagctttggagattttatcaataaagtatcctgagataaaggagaagctgaagaagtacagagaagacatgaagagaaaggtagaagaaaaatccaaaaagttggaagagctaggatggaggaaatacttggagggctag

SEQ ID NO: 52510 - protein, 174 aa, Pyrococcus abyssi
MVKVGMPKVGIIMGSDSDLPVMKEAAKVLEDFEVDYEMKVISAHRTPERLHEYARTAEERGIEVIIAGAGGAAHLPGVLAALTMIPVIGVPIKSKALNGLDSLLSIVQMPPGIPVATVGIDGAKNAALLALEILSIKYPEIKEKLKKYREDMKRKVEEKSKKLEELGWRKYLEG

SEQ ID NO: 52511 - DNA, 534 bp, Pyrococcus horikoshii
  CDS (1)..(534): transl_table=11
gtggtgataagcatgaaaagtgaaaagccactcgttggaattataatgggtagtgactctgatttaccagtaatgaaagaggccgcaaggattttggaagagtttggggttccgtatgagataacgataatatcggcccataggactccagagagagcttatgaatacgcaaagaaagcggaggaaaggggaatagaagtaataatagctggagctggaggagcggcccacctcccagggattattgcatcactaacggttctacccgttattggagtgccaataaagagtaaagccttgaatggtctcgactccttgttatcgatagttcaaatgccaagtgggatcccggttgctaccgtagctatagataacgcgaagaacgctgcacttttagccctgaggatcctgggaataaaataccccgagatcaaagaaaagcttagaaggtacatgaaagatatgaaaaggaaagtcgaagaaaaggcaaaaagattagaagagatgggatgggaaaggtatctatcggagtaa

SEQ ID NO: 52512 - protein, 177 aa, Pyrococcus horikoshii
MVISMKSEKPLVGIIMGSDSDLPVMKEAARILEEFGVPYEITIISAHRTPERAYEYAKKAEERGIEVIIAGAGGAAHLPGIIASLTVLPVIGVPIKSKALNGLDSLLSIVQMPSGIPVATVAIDNAKNAALLALRILGIKYPEIKEKLRRYMKDMKRKVEEKAKRLEEMGWERYLSE

SEQ ID NO: 52513 - DNA, 1659 bp, Schizosaccharomyces pombe
  CDS (1)..(1659)
atgagcgaaaaacaggttgtagggatccttggaggtggtcaattgggccgaatgatggtagaggcagcccatcgcttaaacatcaaatgcatcatcttggatgcagcaaattctcctgccaaacaaattgatggaggacgtgagcacattgatgcatcatttactgaccccgatgcaattgttgaactgtctaagaagtgcacgttattaacaactgaaattgagcatattaacactgatgccttggcagccgttacgaaatctgttgctgttgaaccctctcctgcaactctgcgatgcattcaagacaaatatcttcaaaaacagcatttacaggtttttaagattgcacttcctgaattttgcgatgcacctgaccaggaaagtgttgaaaaagcaggccaagagtttggttatccttttgtactgaaaagtaaaacattggcttacgacggtcgtggaaattacgttgttcatcaaccatctgagattcctactgccatcaaagcacttggtgatcgtccgctttatgttgaaaagttcgttcctttctccatggaaattgcagtgatggtagtacgcagtttagacggaaaagtttatgcttatcctacaactgagaccattcaaaaggataatgtttgtcatttagtatatgcccctgctcgtcttcccttctcaattcaacagcgtgctcaaacccttgccatggatgcggtgcgcacttttgaaggcgctggtatatatggtgtagagatgtttgttttgcaagatggtgagaccattttactcaacgaaattgctcctcggcctcacaattcaggtcactacaccattgaagcttgcccaacttctcagtttgaagctcacttacgggccatatgtggtcttcctttcagcgaaatcaacacccaactctcgacttccacaactcatgcgttgatggtaaatattttaggtactgatgatcctgattatgtttcaaagatcgctaaacgttctctgtccattcccggtgcaactttgcatctttatggtaaagctgaatctagaaagggtcgcaagatgggacacgttaccatcatttctgattcacctcaagaatgtgaacgtaggtatcagatgcttcttgacgtcaaagatcctgtcgaatcacctgttgttggtattatcatgggttcggattctgatttaagcaagatgaaagatgctgccgtcattttagatgaattcaaggtgccttacgaacttactattgtttcagctcaccgcacaccagatcgcatggttacttatgctcgtaccgcagcttcaagagggttgcgtgtgattattgctggtgctggtggtgccgctcatttgcctggtatggttgctgcaatgacacctcttccagtaatcggcgttcctgtaaaaggaagcactcttgacggagttgactctcttcactctattgttcagatgcctcgaggtgtccctgtcgccactgttgctatcaataatagccaaaatgccggtattttagcctgtcgtatacttgctacatttcaaccctcccttttggctgctatggagagctttatggacaatatgaaagagattgttttagaaaaggctgataaattagaaaaagttggttggaaaaattattctgcatag

SEQ ID NO: 52514 - protein, 552 aa, Schizosaccharomyces pombe
MSEKQVVGILGGGQLGRMMVEAAHRLNIKCIILDAANSPAKQIDGGREHIDASFTDPDAIVELSKKCTLLTTEIEHINTDALAAVTKSVAVEPSPATLRCIQDKYLQKQHLQVFKIALPEFCDAPDQESVEKAGQEFGYPFVLKSKTLAYDGRGNYVVHQPSEIPTAIKALGDRPLYVEKFVPFSMEIAVMVVRSLDGKVYAYPTTETIQKDNVCHLVYAPARLPFSIQQRAQTLAMDAVRTFEGAGIYGVEMFVLQDGETILLNEIAPRPHNSGHYTIEACPTSQFEAHLRAICGLPFSEINTQLSTSTTHALMVNILGTDDPDYVSKIAKRSLSIPGATLHLYGKAESRKGRKMGHVTIISDSPQECERRYQMLLDVKDPVESPVVGIIMGSDSDLSKMKDAAVILDEFKVPYELTIVSAHRTPDRMVTYARTAASRGLRVIIAGAGGAAHLPGMVAAMTPLPVIGVPVKGSTLDGVDSLHSIVQMPRGVPVATVAINNSQNAGILACRILATFQPSLLAAMESFMDNMKEIVLEKADKLEKVGWKNYSA

SEQ ID NO: 52515 - DNA, 477 bp, Sulfolobus solfataricus
  CDS (1)..(477): transl_table=11
gtgccaaaagtagctgtaattatgggaagtaaaaatgactgggaatatatgagagaagctgtagagattttgaaacaattcgggatagactatgaggctagagtggtttcagctcatagaacaccagaatttatgatgcaatacgctaaagaagcagaaaaaagaggaatagaagtaattattgctggggctggtggagcagctcatttgccaggcatggttgcttcacttacaagtcttccagttattggtgttcctattccctcaaagaatctaaatggtcttgactcgcttctttcaatagtgcaaatgccctatggagtcccagtagctactgtggcaataggtggtgccaaaaacgctgcgctactggcaattaggattttaggaataaaatataaggaattagcagataaaattaaaaaattctcagaggatatgaggaacgatgttctcagtactagactggaagcctaa

SEQ ID NO: 52516 - protein, 158 aa, Sulfolobus solfataricus
MPKVAVIMGSKNDWEYMREAVEILKQFGIDYEARVVSAHRTPEFMMQYAKEAEKRGIEVIIAGAGGAAHLPGMVASLTSLPVIGVPIPSKNLNGLDSLLSIVQMPYGVPVATVAIGGAKNAALLAIRILGIKYKELADKIKKFSEDMRNDVLSTRLEA

SEQ ID NO: 52517 - DNA, 531 bp, Synechocystis sp
  CDS (1)..(531): transl_table=11
atgacttccccctctcccctggtcggcatcatcatgggaagcgattccgatctccccaccatggcagcggcgatcgccgtctgtgaagaatttgccgtaccaacggaggtggccattatctctgcccatcgcaccccggaaagaatggtggagtatgcccaaactgcccaccagcggggcttgcggataattattgccggggctgggggagcggcccatttaccgggcatggtggcggccctgacccctttaccagtcatcggtgtgccggtgcagactaaaaccttacagggagtggattccctctattccattgtgcaaatgccggggggaatacctgtagctaccgtggcgatcggtaatgccaaaaatgcggggttattggcggtgcaaatactggctagccataatcccgtgctgttggaaaaagtacagcaatatcgccaaagtctagaaaccatggttttggacaaacaagcggagttggagcgactgggctacagggcctatctggaccagcaaaatcagtga

SEQ ID NO: 52518 - protein, 176 aa, Synechocystis sp
MTSPSPLVGIIMGSDSDLPTMAAAIAVCEEFAVPTEVAIISAHRTPERMVEYAQTAHQRGLRIIIAGAGGAAHLPGMVAALTPLPVIGVPVQTKTLQGVDSLYSIVQMPGGIPVATVAIGNAKNAGLLAVQILASHNPVLLEKVQQYRQSLETMVLDKQAELERLGYRAYLDQQNQ

SEQ ID NO: 52519 - DNA, 516 bp, Thermotoga maritima
  CDS (1)..(516): transl_table=11
gtgccaagggtaggaatcatcatgggaagtgactccgatcttcctgtaatgaagcaggcagctgaaattttggaagaattcggaatagattacgagattacgatcgtttccgctcacaggacaccggatcgcatgttcgagtacgcaaagaacgccgaagaacggggaatagaagtgatcattgcgggagcggggggagcggctcaccttccaggaatggtggcaagcatcacccaccttcctgtgataggtgttcccgtgaaaacatccacactgaacggtctggattctcttttctccatagttcagatgccagggggtgtgcccgttgccaccgttgccataaacaacgcgaagaacgcgggaatccttgctgcgtctattctgggaatcaaatatccggagatcgcaaggaaggtaaaagagtataaagaaagaatgaaacgggaagttctggaaaaagcccaaagattagaacaaattggttacaaagaatatctgaaccagaaagagtaa

SEQ ID NO: 52520 - protein, 171 aa, Thermotoga maritima
MPRVGIIMGSDSDLPVMKQAAEILEEFGIDYEITIVSAHRTPDRMFEYAKNAEERGIEVIIAGAGGAAHLPGMVASITHLPVIGVPVKTSTLNGLDSLFSIVQMPGGVPVATVAINNAKNAGILAASILGIKYPEIARKVKEYKERMKREVLEKAQRLEQIGYKEYLNQKE

SEQ ID NO: 52521 - DNA, 486 bp, Vibrio cholerae
  CDS (1)..(486): transl_table=11
atgacagtcggtattatcatgggttccaagtcagactggccaaccatgaaacacgcagcagagatgcttgaccagtttggtgtggcttacgagactaaagtggtttctgcgcaccgaactcctcatcttttggccgactatgcctctagcgccaaagaacgcggtttacaagtgatcatcgctggagcgggcggcgctgcgcatcttcccggaatgaccgccgcattcactagcttgccagtgttaggcgtgcccgttcaatctcgcgctctgtctgggctcgactcgttatactccattgtgcagatgccaaaaggcattgcggtgggtacgctcgccattggtgaagctggtgccgctaatgcaggattacttgccgcacaaatcatcggcattcataacccagaagtgatgagtaaagtggaagctttccgcgctaagcagactcaatctgtgttggataacccaaatccggctgaggagtaa

SEQ ID NO: 52522 - protein, 161 aa, Vibrio cholerae
MTVGIIMGSKSDWPTMKHAAEMLDQFGVAYETKVVSAHRTPHLLADYASSAKERGLQVIIAGAGGAAHLPGMTAAFTSLPVLGVPVQSRALSGLDSLYSIVQMPKGIAVGTLAIGEAGAANAGLLAAQIIGIHNPEVMSKVEAFRAKQTQSVLDNPNPAEE

SEQ ID NO: 52523 - DNA, 486 bp, Vibrio fischeri
  CDS (1)..(486): transl_table=11
atgaaagtcggtattatcatgggttcaaaatcagactggccaacaatgaaactagccgctgagatgcttgaccgctttaatgtgccttatgagacaaaagtggtttctgctcatagaacacctcagttacttgccgattatgcaactcaagcaaaagatcgtggcatcaaagtaattatcgcaggtgcgggtggtgcagcacaccttcctggaatggcagcagcattcacaagtgttcctgttttaggtgttccagtacaatctcgtgcacttaaaggtatggattcattactttcaattgtacagatgccaaaaggtattgctgttggtactcttgcgataggtgaagcgggagcggctaatgcaggtatccttgcagctcaaatcattggaacatcaaacgaagaagtaatggctgcggttgaagctttccgtaaagaacaaactgaaatggtgttagagaacccagatccatcagaggattaa

SEQ ID NO: 52524 - protein, 161 aa, Vibrio fischeri
MKVGIIMGSKSDWPTMKLAAEMLDRFNVPYETKVVSAHRTPQLLADYATQAKDRGIKVIIAGAGGAAHLPGMAAAFTSVPVLGVPVQSRALKGMDSLLSIVQMPKGIAVGTLAIGEAGAANAGILAAQIIGTSNEEVMAAVEAFRKEQTEMVLENPDPSED

SEQ ID NO: 52525 - DNA, 486 bp, Vibrio parahaemolyticus
  CDS (1)..(486): transl_table=11
atgaaagtcggtatcatcatgggttctaaatccgattggccaaccatgaaactagcagcagacatgctggatcaatttggcgtgtcttacgaaacaaaggtggtgtcagctcaccgtactcctcaactattagccgattacgctagcagcgcgaaagaacgcggcatcaaagtgatcatcgcaggtgccggtggtgcagctcacctaccgggaatggcggcagccttcaccagtttgcctgtacttggtgttccggttcaatctcgcgctctaaaaggcatggactctttgctatctattgtacaaatgccaaaaggcattgcagtcggcacgttagcgattggcgaagcgggcgctgcaaacgcgggcatcttagcggcacaaatcctaggcactcatgacgaaagcatcatggcgaaggtagaagcgttccgcaatgaacagacggaaaccgtactggctaacccaaatccagctgaggattaa

SEQ ID NO: 52526 - protein, 161 aa, Vibrio parahaemolyticus
MKVGIIMGSKSDWPTMKLAADMLDQFGVSYETKVVSAHRTPQLLADYASSAKERGIKVIIAGAGGAAHLPGMAAAFTSLPVLGVPVQSRALKGMDSLLSIVQMPKGIAVGTLAIGEAGAANAGILAAQILGTHDESIMAKVEAFRNEQTETVLANPNPAED

SEQ ID NO: 52527 - DNA, 486 bp, Vibrio vulnificus
  CDS (1)..(486): transl_table=11
atgaaagtcggtatcatcatgggttctaaatcagattggccaaccatgaaactggcagcagaaatgctggacagatttggcgtggaatacgaaaccaaagtggtttcagcacatcgaactcctcatctcctcgctgaatatgcctcaaccgccaaagagcgtgggttgaaagtgattattgccggtgcaggtggcgcggcgcatttgccgggcatggcagcggcatttaccagcttgcccgttttgggcgtacccgtgcaatcacgtgctttatcagggctcgactctctctactctattgtgcaaatgccaaaaggcatcgcagtaggtacattggccattggtgaagccggtgccgcgaacgcgggtcttctcgctgcgcaaatccttggaactcacgacgaaaatatcatggccaaagttgaagccttccgcagtgagcaaactgaaagcgtcctcgctaacccaaatcctgcagaggactaa

SEQ ID NO: 52528 - protein, 161 aa, Vibrio vulnificus
MKVGIIMGSKSDWPTMKLAAEMLDRFGVEYETKVVSAHRTPHLLAEYASTAKERGLKVIIAGAGGAAHLPGMAAAFTSLPVLGVPVQSRALSGLDSLYSIVQMPKGIAVGTLAIGEAGAANAGLLAAQILGTHDENIMAKVEAFRSEQTESVLANPNPAED

SEQ ID NO: 52529 - DNA, 1677 bp, Vigna aconitifolia
  CDS (1)..(1677)
atgggcctatatgaagtggttgttggggttctgggaggtgggcaacttggtcgtatgatgtgtcaagctgcttcccagatggccattaaagtaatggttttggatccgcaagaaaattgccctgctagttctctctcttatcatcatatggtcggaagctttgatgaaagcactaaagtggaggaatttgccaagagatgtggagtattgactgttgaaattgaacacgtcgatgttgatacattggaaaaacttgagaaacagggagttgactgccagcccaaagcctctacagtcagaattattcaggataagtatcagcaaaaagttgcacttctgccagcatggattccacttcctgaatttatgaagatagatgacttgaaggctaagaagtgggactctttggatattcacttcatgattaagagtaggaggctagcttatgatgggcgaggaaattttgttgctaaaagtgaagaggagctttcttctgctgtggatgctctaggaggatttgatcgcggtttatatgctgaaaaatgggcaccttttgtcaaggaactagcggttattgtggcaagaggaagagacaattcaatctcatgttatcctgttgttgaactattcacaggacatatatgtcacatagttaagtctccggctaatgtaaattggaagacgagggagcttgccattgaagttgctttcaatgctgttaagtccctggaagtgcccggtgtgtttgcagttgaattgttcttgactaaggaaggagagattttattaaatgaagtagctcctagacctcacaatagtgggcatcacacaatagaatcttgccatacctcgcaatttgagcaacatttgccggctgttgttggtcttcctcttggtgatccatcaatgaaaactccagctgctatcatgtacaacatattaggtgaagaagagggggagcatggttttcaattagcacatcaattgatgaaaagggcaatgaccatccctggtgcttctgtccattggtatgataagccagaaatgagaaagcaacggaagatgtgccatataactattgttgggtcctctcttagcagtattgaaagcaatcttgcaatactgctggaagggaaaggattacatgataagactgctgtttgctccacgttgttgggattcataatgggttctgattcagatctgcctgttatgaaaagtgctgctgaaatgatggagatgtttggtgtgcctcatgaggtaagaatagtttcagcacacaggactccagaattgatgttttgttatgcctcatctgctcacgaacgaggctatcaagtcattattgctggtgctggtggtgcagctcacttgcctggtatggttgcatccctcactcccttgcctgttgttggcgttcctgtgcgtgcttctaccttggacggactcgattcactcttgtcaattgtccagatgccgagaggtgttccagttgccactgttgcagttaataatgcaactaatgctggattgctggcagtgaggatgttgggtgttgccaacgataatcttctgtcaaggatgagtcaatatcaagaggaccaaaaagaagccgtcttgagggaaggagataaattagaaaaacatggctgggaatcctacttaaaaaatagttag

SEQ ID NO: 52530 - protein, 558 aa, Vigna aconitifolia
MGLYEVVVGVLGGGQLGRMMCQAASQMAIKVMVLDPQENCPASSLSYHHMVGSFDESTKVEEFAKRCGVLTVEIEHVDVDTLEKLEKQGVDCQPKASTVRIIQDKYQQKVALLPAWIPLPEFMKIDDLKAKKWDSLDIHFMIKSRRLAYDGRGNFVAKSEEELSSAVDALGGFDRGLYAEKWAPFVKELAVIVARGRDNSISCYPVVELFTGHICHIVKSPANVNWKTRELAIEVAFNAVKSLEVPGVFAVELFLTKEGEILLNEVAPRPHNSGHHTIESCHTSQFEQHLPAVVGLPLGDPSMKTPAAIMYNILGEEEGEHGFQLAHQLMKRAMTIPGASVHWYDKPEMRKQRKMCHITIVGSSLSSIESNLAILLEGKGLHDKTAVCSTLLGFIMGSDSDLPVMKSAAEMMEMFGVPHEVRIVSAHRTPELMFCYASSAHERGYQVIIAGAGGAAHLPGMVASLTPLPVVGVPVRASTLDGLDSLLSIVQMPRGVPVATVAVNNATNAGLLAVRMLGVANDNLLSRMSQYQEDQKEAVLREGDKLEKHGWESYLKNS

SEQ ID NO: 52531 - DNA, 1716 bp, Saccharomyces cerevisiae
  CDS (1)..(1716)
atggattctagaacagttggtatattaggagggggacaattgggacgtatgattgttgaggcagcaaacaggctcaacattaagacggtaatactagatgctgaaaattctcctgccaaacaaataagcaactccaatgaccacgttaatggctccttttccaatcctcttgatatcgaaaaactagctgaaaaatgtgatgtgctaacgattgagattgagcatgttgatgttcctacactaaagaatcttcaagtaaaacatcccaaattaaaaatttacccttctccagaaacaatcagattgatacaagacaaatatattcaaaaagagcatttaatcaaaaatggtatagcagttacccaaagtgttcctgtggaacaagccagtgagacgtccctattgaatgttggaagagatttgggttttccattcgtcttgaagtcgaggactttggcatacgatggaagaggtaacttcgttgtaaagaataaggaaatgattccggaagctttggaagtactgaaggatcgtcctttgtacgccgaaaaatgggcaccatttactaaagaattagcagtcatgattgtgagatctgttaacggtttagtgttttcttacccaattgtagagactatccacaaggacaatatttgtgacttatgttatgcgcctgctagagttccggactccgttcaacttaaggcgaagttgttggcagaaaatgcaatcaaatcttttcccggttgtggtatatttggtgtggaaatgttctatttagaaacaggggaattgcttattaacgaaattgccccaaggcctcacaactctggacattataccattgatgcttgcgtcacttctcaatttgaagctcatttgagatcaatattggatttgccaatgccaaagaatttcacatctttctccaccattacaacgaacgccattatgctaaatgttcttggagacaaacatacaaaagataaagagctagaaacttgcgaaagagcattggcgactccaggttcctcagtgtacttatatggaaaagagtctagacctaacagaaaagtaggtcacataaatattattgcctccagtatggcggaatgtgaacaaaggctgaactacattacaggtagaactgatattccaatcaaaatctctgtcgctcaaaagttggacttggaagcaatggtcaaaccattggttggaatcatcatgggatcagactctgacttgccggtaatgtctgccgcatgtgcggttttaaaagattttggcgttccatttgaagtgacaatagtctctgctcatagaactccacataggatgtcagcatatgctatttccgcaagcaagcgtggaattaaaacaattatcgctggagctggtggggctgctcacttgccaggtatggtggctgcaatgacaccacttcctgtcatcggtgtgcccgtaaaaggttcttgtctagatggagtagattctttacattcaattgtgcaaatgcctagaggtgttccagtagctaccgtcgctattaataatagtacgaacgctgcgctgttggctgtcagactgcttggcgcttatgattcaagttatacaacgaaaatggaacagtttttattaaagcaagaagaagaagttcttgtcaaagcacaaaagttagaaactgtcggttacgaagcttatctagaaaacaagtaa

SEQ ID NO: 52532 - protein, 571 aa, Saccharomyces cerevisiae
MDSRTVGILGGGQLGRMIVEAANRLNIKTVILDAENSPAKQISNSNDHVNGSFSNPLDIEKLAEKCDVLTIEIEHVDVPTLKNLQVKHPKLKIYPSPETIRLIQDKYIQKEHLIKNGIAVTQSVPVEQASETSLLNVGRDLGFPFVLKSRTLAYDGRGNFVVKNKEMIPEALEVLKDRPLYAEKWAPFTKELAVMIVRSVNGLVFSYPIVETIHKDNICDLCYAPARVPDSVQLKAKLLAENAIKSFPGCGIFGVEMFYLETGELLINEIAPRPHNSGHYTIDACVTSQFEAHLRSILDLPMPKNFTSFSTITTNAIMLNVLGDKHTKDKELETCERALATPGSSVYLYGKESRPNRKVGHINIIASSMAECEQRLNYITGRTDIPIKISVAQKLDLEAMVKPLVGIIMGSDSDLPVMSAACAVLKDFGVPFEVTIVSAHRTPHRMSAYAISASKRGIKTIIAGAGGAAHLPGMVAAMTPLPVIGVPVKGSCLDGVDSLHSIVQMPRGVPVATVAINNSTNAALLAVRLLGAYDSSYTTKMEQFLLKQEEEVLVKAQKLETVGYEAYLENK

SEQ ID NO: 52533 - DNA, 22 bp, Artificial sequence
  Primer sequence
atgtcttcccgcaataatccgg

SEQ ID NO: 52534 - DNA, 22 bp, Artificial sequence
  Primer sequence
ttatgccgcacctcgcgggtcc

SEQ ID NO: 52535 - protein, 171 aa, Artificial sequence
  Consensus
  Variant (2)..(2): Xaa in position 2 is any amino acid
  Variant (8)..(8): Xaa in position 8 is any amino acid
  Variant (11)..(13): Xaa in position 11 to 13 is any amino acid
  Variant (15)..(20): Xaa in position 15 to 20 is any amino acid
  Variant (22)..(25): Xaa in position 22 to 25 is any amino acid
  Variant (26)..(47): Xaa in position 26 to 47 is any or no amino acid
  Variant (49)..(50): Xaa in position 49 to 50 is any amino acid
  Variant (52)..(53): Xaa in position 52 to 53 is any amino acid
  Variant (62)..(63): Xaa in position 62 to 63 is any amino acid
  Variant (65)..(66): Xaa in position 65 to 66 is any amino acid
  Variant (69)..(70): Xaa in position 69 to 70 is any amino acid
  Variant (72)..(73): Xaa in position 72 to 73 is any amino acid
  Variant (74)..(74): Xaa in position 74 is any or no amino acid
  Variant (76)..(76): Xaa in position 76 is any amino acid
  Variant (77)..(78): Xaa in position 77 to 78 is any or no amino acid
  Variant (86)..(86): Xaa in position 86 is any or no amino acid
  Variant (92)..(92): Xaa in position 92 is any or no amino acid
  Variant (98)..(98): Xaa in position 98 is any amino acid
  Variant (100)..(100): Xaa in position 100 is any amino acid
  Variant (109)..(111): Xaa in position 109 to 111 is any amino acid
  Variant (112)..(112): Xaa in position 112 is any or no amino acid
  Variant (114)..(114): Xaa in position 114 is any or no amino acid
  Variant (120)..(120): Xaa in position 120 is any amino acid
  Variant (127)..(127): Xaa in position 127 is any amino acid
  Variant (137)..(137): Xaa in position 137 is any amino acid
  Variant (138)..(140): Xaa in position 138 to 140 is any or no amino acid
  Variant (142)..(142): Xaa in position 142 is any or no amino acid
  Variant (147)..(147): Xaa in position 147 is any amino acid
  Variant (149)..(150): Xaa in position 149 to 150 is any amino acid
  Variant (153)..(158): Xaa in position 153 to 158 is any amino acid
  Variant (159)..(163): Xaa in position 159 to 163 is any or no amino acid
  Variant (165)..(167): Xaa in position 165 to 167 is any amino acid
  Variant (169)..(170): Xaa in position 169 to 170 is any amino acid
VXIIMGSXSDXXXMXXXXXXLXXXXXXXXXXXXXXXXXXXXXXXXXXVXXEXXVVSAHRTPXXMXXYAXXAXXXGXXXIIAGAGGXAAHLPXGMVAAXTXLPVIGVPVXXXXLXGLDSLXSIVQMPXGIPVATVAIXXXXAXNAALXAXXILXXXXXXXXXXXLXXXLXXF

SEQ ID NO: 52536 - protein, 17 aa, Artificial sequence
  Consensus
  Variant (4)..(4): Xaa in position 4 is any amino acid
  Variant (7)..(9): Xaa in position 7 to 9 is any amino acid
  Variant (10)..(10): Xaa in position 10 is Ile, Leu, Met or Val
  Variant (11)..(12): Xaa in position 11 to 12 is any amino acid
  Variant (13)..(13): Xaa in position 13 is Ala, Cys, Gly, Ser or Thr
  Variant (14)..(16): Xaa in position 14 to 16 is any amino acid
MGSXSDXXXXXXXXXXL

SEQ ID NO: 52537 - protein, 6 aa, Artificial sequence
  Consensus
  Artificial sequence
SAHRTP

SEQ ID NO: 52538 - protein, 16 aa, Artificial sequence
  Consensus
  Variant (2)..(2): Xaa in position 2 is Ile or Val
  Variant (4)..(4): Xaa in position 4 is Ala, Cys or Gly
  Variant (7)..(7): Xaa in position 7 is any amino acid
  Variant (14)..(14): Xaa in position 14 is Ile, Leu, Met or Val
  Variant (15)..(15): Xaa in position 15 is any amino acid
  Variant (16)..(16): Xaa in position 16 is Ala or Ser
IXAXAGXAAHLPGXXX

SEQ ID NO: 52539 - protein, 6 aa, Artificial sequence
  Consensus
  Variant (3)..(3): Xaa in position 3 is Ile or Leu
PVXGVP

SEQ ID NO: 52540 - protein, 34 aa, Artificial sequence
  Consensus
  Variant (2)..(2): Xaa in position 2 is any amino acid
  Variant (4)..(4): Xaa in position 4 is any amino acid
  Variant (8)..(8): Xaa in position 8 is any amino acid
  Variant (11)..(11): Xaa in position 11 is Ala, Cys or Val
  Variant (15)..(15): Xaa in position 15 is any amino acid
  Variant (17)..(17): Xaa in position 17 is any amino acid
  Variant (18)..(18): Xaa in position 18 is Ala or Pro
  Variant (19)..(19): Xaa in position 19 is Cys, Thr or Val
  Variant (20)..(20): Xaa in position 20 is Ala or Gly
  Variant (22)..(22): Xaa in position 22 is any amino acid
  Variant (23)..(23): Xaa in position 23 is Ala, Gly or Ser
  Variant (24)..(24): Xaa in position 24 is Ile or Val
  Variant (25)..(25): Xaa in position 25 is Asp, Gly or Asn
  Variant (26)..(26): Xaa in position 26 is any amino acid
  Variant (27)..(27): Xaa in position 27 is Ala, Asp, Gly, Asn, Pro or Ser
  Variant (28)..(28): Xaa in position 28 is any amino acid
  Variant (29)..(29): Xaa in position 29 is Ala, Gly, Asn or Ser
  Variant (30)..(32): Xaa in position 30 to 32 is any amino acid
  Variant (33)..(33): Xaa in position 33 is Ala, Gly or Leu
  Variant (34)..(34): Xaa in position 34 is Ala, Ile, Leu or Val
LXGXDSLXSIXQMPXGXXXXTXXXXXXXXXXXXX

SEQ ID NO: 52541 - DNA, 2106 bp, Escherichia coli; identical to SEQ ID NO: 36422
  CDS (1)..(2106)

SEQ ID NO: 52542 - protein, 701 aa, Escherichia coli; identical to SEQ ID NO: 36423

SEQ ID NO: 52543 - DNA, 1779 bp, Pyrococcus abyssi GE5; identical to SEQ ID NO: 36424
  CDS (1)..(1779): transl_table=11

SEQ ID NO: 52544 - protein, 592 aa, Pyrococcus abyssi GE5; identical to SEQ ID NO: 36425

SEQ ID NO: 52545 - DNA, 1815 bp, Aeropyrum pernix K1; identical to SEQ ID NO: 36426
  CDS (1)..(1815): transl_table=11

SEQ ID NO: 52546 - protein, 604 aa, Aeropyrum pernix K1; identical to SEQ ID NO: 36427

SEQ ID NO: 52547 - DNA, 1485 bp, Vibrio cholerae O1 biovar eltor str. N16961; identical to SEQ ID NO: 36428
  CDS (1)..(1485): transl_table=11

SEQ ID NO: 52548 - protein, 494 aa, Vibrio cholerae O1 biovar eltor str. N16961; identical to SEQ ID NO: 36429

SEQ ID NO: 52549 - DNA, 1743 bp, Bacillus halodurans C-125; identical to SEQ ID NO: 36430
  CDS (1)..(1743): transl_table=11

SEQ ID NO: 52550 - protein, 580 aa, Bacillus halodurans C-125; identical to SEQ ID NO: 36431

SEQ ID NO: 52551 - DNA, 1545 bp, Pasteurella multocida subsp. multocida str. Pm70; identical to SEQ ID NO: 36432
  CDS (1)..(1545): transl_table=11

SEQ ID NO: 52552 - protein, 514 aa, Pasteurella multocida subsp. multocida str. Pm70; identical to SEQ ID NO: 36433

SEQ ID NO: 52553 - DNA, 2067 bp, Pseudomonas aeruginosa PAO1; identical to SEQ ID NO: 36434
  CDS (1)..(2067): transl_table=11

SEQ ID NO: 52554 - protein, 688 aa, Pseudomonas aeruginosa PAO1; identical to SEQ ID NO: 36435

SEQ ID NO: 52555 - DNA, 2355 bp, Lactococcus lactis subsp. lactis Il1403; identical to SEQ ID NO: 36436
  CDS (1)..(2355): transl_table=11

SEQ ID NO: 52556 - protein, 784 aa, Lactococcus lactis subsp. lactis Il1403; identical to SEQ ID NO: 36437

SEQ ID NO: 52557 - DNA, 2082 bp, Neisseria meningitidis MC58; identical to SEQ ID NO: 36438
  CDS (1)..(2082): transl_table=11

SEQ ID NO: 52558 - protein, 693 aa, Neisseria meningitidis MC58; identical to SEQ ID NO: 36439

SEQ ID NO: 52559 - DNA, 2112 bp, Campylobacter jejuni subsp. jejuni NCTC 11168; identical to SEQ ID NO: 36440
  CDS (1)..(2112): transl_table=11

SEQ ID NO: 52560 - protein, 703 aa, Campylobacter jejuni subsp. jejuni NCTC 11168; identical to SEQ ID NO: 36441

SEQ ID NO: 52561 - DNA, 2082 bp, Neisseria meningitidis Z2491; identical to SEQ ID NO: 36442
  CDS (1)..(2082): transl_table=11

SEQ ID NO: 52562 - protein, 693 aa, Neisseria meningitidis Z2491; identical to SEQ ID NO: 36443

SEQ ID NO: 52563 - DNA, 2166 bp, Escherichia coli O157:H7; identical to SEQ ID NO: 36444
  CDS (1)..(2166): transl_table=11

SEQ ID NO: 52564 - protein, 721 aa, Escherichia coli O157:H7; identical to SEQ ID NO: 36445

SEQ ID NO: 52565 - DNA, 2277 bp, Mycobacterium tuberculosis CDC1551; identical to SEQ ID NO: 36446
  CDS (1)..(2277): transl_table=11

SEQ ID NO: 52566 - protein, 758 aa, Mycobacterium tuberculosis CDC1551; identical to SEQ ID NO: 36447

SEQ ID NO: 52567 - DNA, 1779 bp, Clostridium acetobutylicum ATCC 824; identical to SEQ ID NO: 36448
  CDS (1)..(1779): transl_table=11

SEQ ID NO: 52568 - protein, 592 aa, Clostridium acetobutylicum ATCC 824; identical to SEQ ID NO: 36449

SEQ ID NO: 52569 - DNA, 2067 bp, Yersinia pestis CO92; identical to SEQ ID NO: 36450
  CDS (1)..(2067): transl_table=11

SEQ ID NO: 52570 - protein, 688 aa, Yersinia pestis CO92; identical to SEQ ID NO: 36451

SEQ ID NO: 52571 - DNA, 2151 bp, Salmonella typhimurium LT2; identical to SEQ ID NO: 36452
  CDS (1)..(2151): transl_table=11

SEQ ID NO: 52572 - protein, 716 aa, Salmonella typhimurium LT2; identical to SEQ ID NO: 36453

SEQ ID NO: 52573 - DNA, 2061 bp, Ralstonia solanacearum GMI1000; identical to SEQ ID NO: 36454
  CDS (1)..(2061): transl_table=11

SEQ ID NO: 52574 - protein, 686 aa, Ralstonia solanacearum GMI1000; identical to SEQ ID NO: 36455

SEQ ID NO: 52575 - DNA, 1857 bp, Pyrobaculum aerophilum str. IM2; identical to SEQ ID NO: 36456
  CDS (1)..(1857): transl_table=11

SEQ ID NO: 52576 - protein, 618 aa, Pyrobaculum aerophilum str. IM2; identical to SEQ ID NO: 36457

SEQ ID NO: 52577 - DNA, 1452 bp, Clostridium perfringens str. 13; identical to SEQ ID NO: 36458
  CDS (1)..(1452): transl_table=11

SEQ ID NO: 52578 - protein, 483 aa, Clostridium perfringens str. 13; identical to SEQ ID NO: 36459

SEQ ID NO: 52579 - DNA, 2280 bp, Corynebacterium glutamicum ATCC 13032; identical to SEQ ID NO: 36460
  CDS (1)..(2280): transl_table=11

SEQ ID NO: 52580 - protein, 759 aa, Corynebacterium glutamicum ATCC 13032; identical to SEQ ID NO: 36461

SEQ ID NO: 52581 - DNA, 1425 bp, Fusobacterium nucleatum subsp. nucleatum ATCC 25586; identical to SEQ ID NO: 36462
  CDS (1)..(1425): transl_table=11

SEQ ID NO: 52582 - protein, 474 aa, Fusobacterium nucleatum subsp. nucleatum ATCC 25586; identical to SEQ ID NO: 36463

SEQ ID NO: 52583 - DNA, 1440 bp, Methanosarcina acetivorans C2A; identical to SEQ ID NO: 36464
  CDS (1)..(1440): transl_table=11

SEQ ID NO: 52584 - protein, 479 aa, Methanosarcina acetivorans C2A; identical to SEQ ID NO: 36465

SEQ ID NO: 52585 - DNA, 1797 bp, Thermoanaerobacter tengcongensis MB4; identical to SEQ ID NO: 36466
  CDS (1)..(1797): transl_table=11

SEQ ID NO: 52586 - protein, 598 aa, Thermoanaerobacter tengcongensis MB4; identical to SEQ ID NO: 36467

SEQ ID NO: 52587 - DNA, 2073 bp, Xanthomonas axonopodis pv. citri str. 306; identical to SEQ ID NO: 36468
  CDS (1)..(2073): transl_table=11

SEQ ID NO: 52588 - protein, 690 aa, Xanthomonas axonopodis pv. citri str. 306; identical to SEQ ID NO: 36469

SEQ ID NO: 52589 - DNA, 1485 bp, Streptococcus agalactiae 2603V/R; identical to SEQ ID NO: 36470
  CDS (1)..(1485): transl_table=11

SEQ ID NO: 52590 - protein, 494 aa, Streptococcus agalactiae 2603V/R; identical to SEQ ID NO: 36471

SEQ ID NO: 52591 - DNA, 1734 bp, Oceanobacillus iheyensis HTE831; identical to SEQ ID NO: 36472
  CDS (1)..(1734): transl_table=11

SEQ ID NO: 52592 - protein, 577 aa, Oceanobacillus iheyensis HTE831; identical to SEQ ID NO: 36473

SEQ ID NO: 52593 - DNA, 1425 bp, Oceanobacillus iheyensis HTE831; identical to SEQ ID NO: 36474
  CDS (1)..(1425): transl_table=11

SEQ ID NO: 52594 - protein, 474 aa, Oceanobacillus iheyensis HTE831; identical to SEQ ID NO: 36475

SEQ ID NO: 52595 - DNA, 2400 bp, Bifidobacterium longum NCC2705; identical to SEQ ID NO: 36476
  CDS (1)..(2400): transl_table=11

SEQ ID NO: 52596 - protein, 799 aa, Bifidobacterium longum NCC2705; identical to SEQ ID NO: 36477

SEQ ID NO: 52597 - DNA, 2106 bp, Leptospira interrogans serovar Lai str. 56601; identical to SEQ ID NO: 36478
  CDS (1)..(2106): transl_table=11

SEQ ID NO: 52598 - protein, 701 aa, Leptospira interrogans serovar Lai str. 56601; identical to SEQ ID NO: 36479

SEQ ID NO: 52599 - DNA, 2067 bp, Pseudomonas putida KT2440; identical to SEQ ID NO: 36480
  CDS (1)..(2067): transl_table=11

SEQ ID NO: 52600 - protein, 688 aa, Pseudomonas putida KT2440; identical to SEQ ID NO: 36481

SEQ ID NO: 52601 - DNA, 2166 bp, Escherichia coli CFT073; identical to SEQ ID NO: 36482
  CDS (1)..(2166): transl_table=11

SEQ ID NO: 52602 - protein, 721 aa, Escherichia coli CFT073; identical to SEQ ID NO: 36483

SEQ ID NO: 52603 - DNA, 1485 bp, Vibrio vulnificus CMCP6; identical to SEQ ID NO: 36484
  CDS (1)..(1485): transl_table=11

SEQ ID NO: 52604 - protein, 494 aa, Vibrio vulnificus CMCP6; identical to SEQ ID NO: 36485

SEQ ID NO: 52605 - DNA, 1467 bp, Clostridium tetani E88; identical to SEQ ID NO: 36486
  CDS (1)..(1467): transl_table=11

SEQ ID NO: 52606 - protein, 488 aa, Clostridium tetani E88; identical to SEQ ID NO: 36487

SEQ ID NO: 52607 - DNA, 1179 bp, Shewanella oneidensis MR-1; identical to SEQ ID NO: 36488
  CDS (1)..(1179): transl_table=11

SEQ ID NO: 52608 - protein, 392 aa, Shewanella oneidensis MR-1; identical to SEQ ID NO: 36489

SEQ ID NO: 52609 - DNA, 2076 bp, Pseudomonas syringae pv. tomato str. DC3000; identical to SEQ ID NO: 36490
  CDS (1)..(2076): transl_table=11

SEQ ID NO: 52610 - protein, 691 aa, Pseudomonas syringae pv. tomato str. DC3000; identical to SEQ ID NO: 36491

SEQ ID NO: 52611 - DNA, 1485 bp, Vibrio parahaemolyticus RIMD 2210633; identical to SEQ ID NO: 36492
  CDS (1)..(1485): transl_table=11

SEQ ID NO: 52612 - protein, 494 aa, Vibrio parahaemolyticus RIMD 2210633; identical to SEQ ID NO: 36493

SEQ ID NO: 52613 - DNA, 1431 bp, Bacteroides thetaiotaomicron VPI-5482; identical to SEQ ID NO: 36494
  CDS (1)..(1431): transl_table=11

SEQ ID NO: 52614 - protein, 476 aa, Bacteroides thetaiotaomicron VPI-5482; identical to SEQ ID NO: 36495

SEQ ID NO: 52615 - DNA, 2067 bp, Bacillus cereus ATCC 14579; identical to SEQ ID NO: 36496
  CDS (1)..(2067): transl_table=11

SEQ ID NO: 52616 - protein, 688 aa, Bacillus cereus ATCC 14579; identical to SEQ ID NO: 36497

SEQ ID NO: 52617 - DNA, 2073 bp, Nitrosomonas europaea ATCC 19718; identical to SEQ ID NO: 36498
  CDS (1)..(2073): transl_table=11

SEQ ID NO: 52618 - protein, 690 aa, Nitrosomonas europaea ATCC 19718; identical to SEQ ID NO: 36499

SEQ ID NO: 52619 - DNA, 2277 bp, Mycobacterium bovis AF2122/97; identical to SEQ ID NO: 36500
  CDS (1)..(2277): transl_table=11

SEQ ID NO: 52620 - protein, 758 aa, Mycobacterium bovis AF2122/97; identical to SEQ ID NO: 36501

SEQ ID NO: 52621 - DNA, 2172 bp, Helicobacter hepaticus ATCC 51449; identical to SEQ ID NO: 36502
  CDS (1)..(2172): transl_table=11

SEQ ID NO: 52622 - protein, 723 aa, Helicobacter hepaticus ATCC 51449; identical to SEQ ID NO: 36503

SEQ ID NO: 52623 - DNA, 1905 bp, Rhodopirellula baltica SH 1; identical to SEQ ID NO: 36504
  CDS (1)..(1905): transl_table=11

SEQ ID NO: 52624 - protein, 634 aa, Rhodopirellula baltica SH 1; identical to SEQ ID NO: 36505

SEQ ID NO: 52625 - DNA, 1587 bp, Haemophilus ducreyi 35000HP; identical to SEQ ID NO: 36506
  CDS (1)..(1587): transl_table=11

SEQ ID NO: 52626 - protein, 528 aa, Haemophilus ducreyi 35000HP; identical to SEQ ID NO: 36507

SEQ ID NO: 52627 - DNA, 2067 bp, Chromobacterium violaceum ATCC 12472; identical to SEQ ID NO: 36508
  CDS (1)..(2067): transl_table=11

SEQ ID NO: 52628 - protein, 688 aa, Chromobacterium violaceum ATCC 12472; identical to SEQ ID NO: 36509

SEQ ID NO: 52629 - DNA, 1809 bp, Chromobacterium violaceum ATCC 12472; identical to SEQ ID NO: 36510
  CDS (1)..(1809): transl_table=11

SEQ ID NO: 52630 - protein, 602 aa, Chromobacterium violaceum ATCC 12472; identical to SEQ ID NO: 36511

SEQ ID NO: 52631 - DNA, 1704 bp, Wolinella succinogenes DSM 1740; identical to SEQ ID NO: 36512
  CDS (1)..(1704): transl_table=11

SEQ ID NO: 52632 - protein, 567 aa, Wolinella succinogenes DSM 1740; identical to SEQ ID NO: 36513

SEQ ID NO: 52633 - DNA, 1455 bp, Photorhabdus luminescens subsp. laumondii TTO1; identical to SEQ ID NO: 36514
  CDS (1)..(1455): transl_table=11

SEQ ID NO: 52634 - protein, 484 aa, Photorhabdus luminescens subsp. laumondii TTO1; identical to SEQ ID NO: 36515

SEQ ID NO: 52635 - DNA, 1803 bp, Photorhabdus luminescens subsp. laumondii TTO1; identical to SEQ ID NO: 36516
  CDS (1)..(1803): transl_table=11

SEQ ID NO: 52636 - protein, 600 aa, Photorhabdus luminescens subsp. laumondii TTO1; identical to SEQ ID NO: 36517

SEQ ID NO: 52637 - DNA, 1485 bp, Vibrio vulnificus YJ016; identical to SEQ ID NO: 36518
  CDS (1)..(1485): transl_table=11

SEQ ID NO: 52638 - protein, 494 aa, Vibrio vulnificus YJ016; identical to SEQ ID NO: 36519

SEQ ID NO: 52639 - DNA, 2286 bp, Corynebacterium diphtheriae NCTC 13129; identical to SEQ ID NO: 36520
  CDS (1)..(2286): transl_table=11

SEQ ID NO: 52640 - protein, 761 aa, Corynebacterium diphtheriae NCTC 13129; identical to SEQ ID NO: 36521

SEQ ID NO: 52641 - DNA, 1929 bp, Geobacter sulfurreducens PCA; identical to SEQ ID NO: 36522
  CDS (1)..(1929): transl_table=11

SEQ ID NO: 52642 - protein, 642 aa, Geobacter sulfurreducens PCA; identical to SEQ ID NO: 36523

SEQ ID NO: 52643 - DNA, 2244 bp, Mycobacterium avium subsp. paratuberculosis K-10; identical to SEQ ID NO: 36524
  CDS (1)..(2244): transl_table=11

SEQ ID NO: 52644 - protein, 747 aa, Mycobacterium avium subsp. paratuberculosis K-10; identical to SEQ ID NO: 36525

SEQ ID NO: 52645 - DNA, 1455 bp, Treponema denticola ATCC 35405; identical to SEQ ID NO: 36526
  CDS (1)..(1455): transl_table=11

SEQ ID NO: 52646 - protein, 484 aa, Treponema denticola ATCC 35405; identical to SEQ ID NO: 36527

SEQ ID NO: 52647 - DNA, 2106 bp, Leptospira interrogans serovar Copenhageni str. Fiocruz L1-130; identical to SEQ ID NO: 36528
  CDS (1)..(2106): transl_table=11

SEQ ID NO: 52648 - protein, 701 aa, Leptospira interrogans serovar Copenhageni str. Fiocruz L1-130; identical to SEQ ID NO: 36529

SEQ ID NO: 52649 - DNA, 1422 bp, Desulfovibrio vulgaris subsp. vulgaris str. Hildenborough; identical to SEQ ID NO: 36530
  CDS (1)..(1422): transl_table=11

SEQ ID NO: 52650 - protein, 473 aa, Desulfovibrio vulgaris subsp. vulgaris str. Hildenborough; identical to SEQ ID NO: 36531

SEQ ID NO: 52651 - DNA, 1422 bp, Desulfovibrio vulgaris subsp. vulgaris str. Hildenborough; identical to SEQ ID NO: 36532
  CDS (1)..(1422): transl_table=11

SEQ ID NO: 52652 - protein, 473 aa, Desulfovibrio vulgaris subsp. vulgaris str. Hildenborough; identical to SEQ ID NO: 36533

SEQ ID NO: 52653 - DNA, 1443 bp, Bacillus anthracis str. Sterne; identical to SEQ ID NO: 36534
  CDS (1)..(1443): transl_table=11

SEQ ID NO: 52654 - protein, 480 aa, Bacillus anthracis str. Sterne; identical to SEQ ID NO: 36535

SEQ ID NO: 52655 - DNA, 1443 bp, Bacillus thuringiensis serovar konkukian str. 97-27; identical to SEQ ID NO: 36536
  CDS (1)..(1443): transl_table=11

SEQ ID NO: 52656 - protein, 480 aa, Bacillus thuringiensis serovar konkukian str. 97-27; identical to SEQ ID NO: 36537

SEQ ID NO: 52657 - DNA, 2106 bp, Acinetobacter sp. ADP1; identical to SEQ ID NO: 36538
  CDS (1)..(2106): transl_table=11

SEQ ID NO: 52658 - protein, 701 aa, Acinetobacter sp. ADP1; identical to SEQ ID NO: 36539

SEQ ID NO: 52659 - DNA, 2154 bp, Erwinia carotovora subsp. atroseptica SCRI1043; identical to SEQ ID NO: 36540
  CDS (1)..(2154): transl_table=11

SEQ ID NO: 52660 - protein, 717 aa, Erwinia carotovora subsp. atroseptica SCRI1043; identical to SEQ ID NO: 36541

SEQ ID NO: 52661 - DNA, 2064 bp, Erwinia carotovora subsp. atroseptica SCRI1043; identical to SEQ ID NO: 36542
  CDS (1)..(2064): transl_table=11

SEQ ID NO: 52662 - protein, 687 aa, Erwinia carotovora subsp. atroseptica SCRI1043; identical to SEQ ID NO: 36543

SEQ ID NO: 52663 - DNA, 2286 bp, Propionibacterium acnes KPA171202; identical to SEQ ID NO: 36544
  CDS (1)..(2286): transl_table=11

SEQ ID NO: 52664 - protein, 761 aa, Propionibacterium acnes KPA171202; identical to SEQ ID NO: 36545

SEQ ID NO: 52665 - DNA, 1431 bp, Desulfotalea psychrophila LSv54; identical to SEQ ID NO: 36546
  CDS (1)..(1431): transl_table=11

SEQ ID NO: 52666 - protein, 476 aa, Desulfotalea psychrophila LSv54; identical to SEQ ID NO: 36547

SEQ ID NO: 52667 - DNA, 1818 bp, Yersinia pseudotuberculosis IP 32953; identical to SEQ ID NO: 36548
  CDS (1)..(1818): transl_table=11

SEQ ID NO: 52668 - protein, 605 aa, Yersinia pseudotuberculosis IP 32953; identical to SEQ ID NO: 36549

SEQ ID NO: 52669 - DNA, 2067 bp, Yersinia pseudotuberculosis IP 32953; identical to SEQ ID NO: 36550
  CDS (1)..(2067): transl_table=11

SEQ ID NO: 52670 - protein, 688 aa, Yersinia pseudotuberculosis IP 32953; identical to SEQ ID NO: 36551

SEQ ID NO: 52671 - DNA, 1776 bp, Symbiobacterium thermophilum IAM 14863; identical to SEQ ID NO: 36552
  CDS (1)..(1776): transl_table=11

SEQ ID NO: 52672 - protein, 591 aa, Symbiobacterium thermophilum IAM 14863; identical to SEQ ID NO: 36553

SEQ ID NO: 52673 - DNA, 1797 bp, Bacillus licheniformis ATCC 14580; identical to SEQ ID NO: 36554
  CDS (1)..(1797): transl_table=11

SEQ ID NO: 52674 - protein, 598 aa, Bacillus licheniformis ATCC 14580; identical to SEQ ID NO: 36555

SEQ ID NO: 52675 - DNA, 1503 bp, Mannheimia succiniciproducens MBEL55E; identical to SEQ ID NO: 36556
  CDS (1)..(1503): transl_table=11

SEQ ID NO: 52676 - protein, 500 aa, Mannheimia succiniciproducens MBEL55E; identical to SEQ ID NO: 36557

SEQ ID NO: 52677 - DNA, 1428 bp, Bacteroides fragilis YCH46; identical to SEQ ID NO: 36558
  CDS (1)..(1428): transl_table=11

SEQ ID NO: 52678 - protein, 475 aa, Bacteroides fragilis YCH46; identical to SEQ ID NO: 36559

SEQ ID NO: 52679 - DNA, 2079 bp, Burkholderia pseudomallei K96243; identical to SEQ ID NO: 36560
  CDS (1)..(2079): transl_table=11

SEQ ID NO: 52680 - protein, 692 aa, Burkholderia pseudomallei K96243; identical to SEQ ID NO: 36561

SEQ ID NO: 52681 - DNA, 2076 bp, Methylococcus capsulatus str. Bath; identical to SEQ ID NO: 36562
  CDS (1)..(2076): transl_table=11

SEQ ID NO: 52682 - protein, 691 aa, Methylococcus capsulatus str. Bath; identical to SEQ ID NO: 36563

SEQ ID NO: 52683 - DNA, 2277 bp, Nocardia farcinica IFM 10152; identical to SEQ ID NO: 36564
  CDS (1)..(2277): transl_table=11

SEQ ID NO: 52684 - protein, 758 aa, Nocardia farcinica IFM 10152; identical to SEQ ID NO: 36565

SEQ ID NO: 52685 - DNA, 1527 bp, Photobacterium profundum SS9; identical to SEQ ID NO: 36566
  CDS (1)..(1527): transl_table=11

SEQ ID NO: 52686 - protein, 508 aa, Photobacterium profundum SS9; identical to SEQ ID NO: 36567

SEQ ID NO: 52687 - DNA, 1896 bp, Haloarcula marismortui ATCC 43049; identical to SEQ ID NO: 36568
  CDS (1)..(1896): transl_table=11

SEQ ID NO: 52688 - protein, 631 aa, Haloarcula marismortui ATCC 43049; identical to SEQ ID NO: 36569

SEQ ID NO: 52689 - DNA, 2076 bp, Geobacillus kaustophilus HTA426; identical to SEQ ID NO: 36570
  CDS (1)..(2076): transl_table=11

SEQ ID NO: 52690 - protein, 691 aa, Geobacillus kaustophilus HTA426; identical to SEQ ID NO: 36571

SEQ ID NO: 52691 - DNA, 2151 bp, Salmonella enterica subsp. enterica serovar Paratyphi A str. ATCC; identical to SEQ ID NO: 36572
  CDS (1)..(2151): transl_table=11

SEQ ID NO: 52692 - protein, 716 aa, Salmonella enterica subsp. enterica serovar Paratyphi A str. ATCC; identical to SEQ ID NO: 36573

SEQ ID NO: 52693 - DNA, 1680 bp, Idiomarina loihiensis L2TR; identical to SEQ ID NO: 36574
  CDS (1)..(1680): transl_table=11

SEQ ID NO: 52694 - protein, 559 aa, Idiomarina loihiensis L2TR; identical to SEQ ID NO: 36575

SEQ ID NO: 52695 - DNA, 1626 bp, Bacillus clausii KSM-K16; identical to SEQ ID NO: 36576
  CDS (1)..(1626): transl_table=11

SEQ ID NO: 52696 - protein, 541 aa, Bacillus clausii KSM-K16; identical to SEQ ID NO: 36577

SEQ ID NO: 52697 - DNA, 1458 bp, Bacillus clausii KSM-K16; identical to SEQ ID NO: 36578
  CDS (1)..(1458): transl_table=11

SEQ ID NO: 52698 - protein, 485 aa, Bacillus clausii KSM-K16; identical to SEQ ID NO: 36579

SEQ ID NO: 52699 - DNA, 2112 bp, Campylobacter jejuni RM1221; identical to SEQ ID NO: 36580
  CDS (1)..(2112): transl_table=11

SEQ ID NO: 52700 - protein, 703 aa, Campylobacter jejuni RM1221; identical to SEQ ID NO: 36581

SEQ ID NO: 52701 - DNA, 1740 bp, Thermococcus kodakarensis KOD1; identical to SEQ ID NO: 36582
  CDS (1)..(1740): transl_table=11

SEQ ID NO: 52702 - protein, 579 aa, Thermococcus kodakarensis KOD1; identical to SEQ ID NO: 36583

SEQ ID NO: 52703 - DNA, 1467 bp, Vibrio fischeri ES114; identical to SEQ ID NO: 36584
  CDS (1)..(1467): transl_table=11

SEQ ID NO: 52704 - protein, 488 aa, Vibrio fischeri ES114; identical to SEQ ID NO: 36585

SEQ ID NO: 52705 - DNA, 2082 bp, Neisseria gonorrhoeae FA 1090; identical to SEQ ID NO: 36586
  CDS (1)..(2082): transl_table=11

SEQ ID NO: 52706 - protein, 693 aa, Neisseria gonorrhoeae FA 1090; identical to SEQ ID NO: 36587

SEQ ID NO: 52707 - DNA, 2151 bp, Salmonella enterica subsp. enterica serovar Choleraesuis str; identical to SEQ ID NO: 36588
  CDS (1)..(2151): transl_table=11

SEQ ID NO: 52708 - protein, 716 aa, Salmonella enterica subsp. enterica serovar Choleraesuis str; identical to SEQ ID NO: 36589

SEQ ID NO: 52709 - DNA, 2076 bp, Pseudomonas syringae pv. syringae B728a; identical to SEQ ID NO: 36590
  CDS (1)..(2076): transl_table=11

SEQ ID NO: 52710 - protein, 691 aa, Pseudomonas syringae pv. syringae B728a; identical to SEQ ID NO: 36591

SEQ ID NO: 52711 - DNA, 2073 bp, Xanthomonas campestris pv. campestris str. 8004; identical to SEQ ID NO: 36592
  CDS (1)..(2073): transl_table=11

SEQ ID NO: 52712 - protein, 690 aa, Xanthomonas campestris pv. campestris str. 8004; identical to SEQ ID NO: 36593

SEQ ID NO: 52713 - DNA, 1602 bp, Haemophilus influenzae 86-028NP; identical to SEQ ID NO: 36594
  CDS (1)..(1602): transl_table=11

SEQ ID NO: 52714 - protein, 533 aa, Haemophilus influenzae 86-028NP; identical to SEQ ID NO: 36595

SEQ ID NO: 52715 - DNA, 2067 bp, Pseudomonas fluorescens Pf-5; identical to SEQ ID NO: 36596
  CDS (1)..(2067): transl_table=11

SEQ ID NO: 52716 - protein, 688 aa, Pseudomonas fluorescens Pf-5; identical to SEQ ID NO: 36597

SEQ ID NO: 52717 - DNA, 1680 bp, Psychrobacter arcticum 273-4; identical to SEQ ID NO: 36598
  CDS (1)..(1680): transl_table=11

SEQ ID NO: 52718 - protein, 559 aa, Psychrobacter arcticum 273-4; identical to SEQ ID NO: 36599

SEQ ID NO: 52719 - DNA, 2076 bp, Pseudomonas syringae pv. phaseolicola 1448A; identical to SEQ ID NO: 36600
  CDS (1)..(2076): transl_table=11

SEQ ID NO: 52720 - protein, 691 aa, Pseudomonas syringae pv. phaseolicola 1448A; identical to SEQ ID NO: 36601

SEQ ID NO: 52721 - DNA, 1815 bp, Dechloromonas aromatica RCB; identical to SEQ ID NO: 36602
  CDS (1)..(1815): transl_table=11

SEQ ID NO: 52722 - protein, 604 aa, Dechloromonas aromatica RCB; identical to SEQ ID NO: 36603

SEQ ID NO: 52723 - DNA, 1800 bp, Thermobifida fusca YX; identical to SEQ ID NO: 36604
  CDS (1)..(1800): transl_table=11

SEQ ID NO: 52724 - protein, 599 aa, Thermobifida fusca YX; identical to SEQ ID NO: 36605

SEQ ID NO: 52725 - DNA, 2073 bp, Ralstonia eutropha JMP134; identical to SEQ ID NO: 36606
  CDS (1)..(2073): transl_table=11

SEQ ID NO: 52726 - protein, 690 aa, Ralstonia eutropha JMP134; identical to SEQ ID NO: 36607

SEQ ID NO: 52727 - DNA, 1458 bp, Staphylococcus saprophyticus subsp. saprophyticus ATCC 15305; identical to SEQ ID NO: 36608
  CDS (1)..(1458): transl_table=11

SEQ ID NO: 52728 - protein, 485 aa, Staphylococcus saprophyticus subsp. saprophyticus ATCC 15305; identical to SEQ ID NO: 36609

SEQ ID NO: 52729 - DNA, 2166 bp, Shigella sonnei Ss046; identical to SEQ ID NO: 36610
  CDS (1)..(2166): transl_table=11

SEQ ID NO: 52730 - protein, 721 aa, Shigella sonnei Ss046; identical to SEQ ID NO: 36611

SEQ ID NO: 52731 - DNA, 2400 bp, Bifidobacterium longum DJO10A; identical to SEQ ID NO: 36612
  CDS (1)..(2400)

SEQ ID NO: 52732 - protein, 799 aa, Bifidobacterium longum DJO10A; identical to SEQ ID NO: 36613

SEQ ID NO: 52733 - DNA, 2055 bp, Pseudomonas syringae pv. syringae B728a; identical to SEQ ID NO: 36614
  CDS (1)..(2055)

SEQ ID NO: 52734 - protein, 684 aa, Pseudomonas syringae pv. syringae B728a; identical to SEQ ID NO: 36615

SEQ ID NO: 52735 - DNA, 1470 bp, Desulfovibrio desulfuricans G20; identical to SEQ ID NO: 36616
  CDS (1)..(1470)

SEQ ID NO: 52736 - protein, 489 aa, Desulfovibrio desulfuricans G20; identical to SEQ ID NO: 36617

SEQ ID NO: 52737 - DNA, 1584 bp, Haemophilus somnus 2336; identical to SEQ ID NO: 36618
  CDS (1)..(1584)

SEQ ID NO: 52738 - protein, 527 aa, Haemophilus somnus 2336; identical to SEQ ID NO: 36619

SEQ ID NO: 52739 - DNA, 1587 bp, Actinobacillus pleuropneumoniae serovar 1 str. 4074; identical to SEQ ID NO: 36620
  CDS (1)..(1587)

SEQ ID NO: 52740 - protein, 528 aa, Actinobacillus pleuropneumoniae serovar 1 str. 4074; identical to SEQ ID NO: 36621

SEQ ID NO: 52741 - DNA, 2067 bp, Pseudomonas aeruginosa UCBPP-PA14; identical to SEQ ID NO: 36622
  CDS (1)..(2067)

SEQ ID NO: 52742 - protein, 688 aa, Pseudomonas aeruginosa UCBPP-PA14; identical to SEQ ID NO: 36623

SEQ ID NO: 52743 - DNA, 1425 bp, Fusobacterium nucleatum subsp. vincentii ATCC 49256; identical to SEQ ID NO: 36624
  CDS (1)..(1425): transl_table=11

SEQ ID NO: 52744 - protein, 474 aa, Fusobacterium nucleatum subsp. vincentii ATCC 49256; identical to SEQ ID NO: 36625

SEQ ID NO: 52745 - DNA, 1587 bp, Haemophilus influenzae R2846; identical to SEQ ID NO: 36626
  CDS (1)..(1587)

SEQ ID NO: 52746 - protein, 528 aa, Haemophilus influenzae R2846; identical to SEQ ID NO: 36627

SEQ ID NO: 52747 - DNA, 1587 bp, Haemophilus influenzae R2866; identical to SEQ ID NO: 36628
  CDS (1)..(1587)

SEQ ID NO: 52748 - protein, 528 aa, Haemophilus influenzae R2866; identical to SEQ ID NO: 36629

SEQ ID NO: 52749 - DNA, 2079 bp, Burkholderia cepacia R18194; identical to SEQ ID NO: 36630
  CDS (1)..(2079)

SEQ ID NO: 52750 - protein, 692 aa, Burkholderia cepacia R18194; identical to SEQ ID NO: 36631

SEQ ID NO: 52751 - DNA, 2091 bp, Bacillus cereus G9241; identical to SEQ ID NO: 36632
  CDS (1)..(2091): transl_table=11

SEQ ID NO: 52752 - protein, 696 aa, Bacillus cereus G9241; identical to SEQ ID NO: 36633

SEQ ID NO: 52753 - DNA, 2067 bp, Rubrivivax gelatinosus PM1; identical to SEQ ID NO: 36634
  CDS (1)..(2067)

SEQ ID NO: 52754 - protein, 688 aa, Rubrivivax gelatinosus PM1; identical to SEQ ID NO: 36635

SEQ ID NO: 52755 - DNA, 1989 bp, Pseudomonas fluorescens PfO-1; identical to SEQ ID NO: 36636
  CDS (1)..(1989)

SEQ ID NO: 52756 - protein, 662 aa, Pseudomonas fluorescens PfO-1; identical to SEQ ID NO: 36637

SEQ ID NO: 52757 - DNA, 2046 bp, Rhodospirillum rubrum; identical to SEQ ID NO: 36638
  CDS (1)..(2046)

SEQ ID NO: 52758 - protein, 681 aa, Rhodospirillum rubrum; identical to SEQ ID NO: 36639

SEQ ID NO: 52759 - DNA, 1812 bp, Rhodospirillum rubrum; identical to SEQ ID NO: 36640
  CDS (1)..(1812)

SEQ ID NO: 52760 - protein, 603 aa, Rhodospirillum rubrum; identical to SEQ ID NO: 36641

SEQ ID NO: 52761 - DNA, 2106 bp, Campylobacter lari RM2100; identical to SEQ ID NO: 36642
  CDS (1)..(2106): transl_table=11

SEQ ID NO: 52762 - protein, 701 aa, Campylobacter lari RM2100; identical to SEQ ID NO: 36643

SEQ ID NO: 52763 - DNA, 2112 bp, Campylobacter upsaliensis RM3195; identical to SEQ ID NO: 36644
  CDS (1)..(2112): transl_table=11

SEQ ID NO: 52764 - protein, 703 aa, Campylobacter upsaliensis RM3195; identical to SEQ ID NO: 36645

SEQ ID NO: 52765 - DNA, 2112 bp, Campylobacter coli RM2228; identical to SEQ ID NO: 36646
  CDS (1)..(2112): transl_table=11

SEQ ID NO: 52766 - protein, 703 aa, Campylobacter coli RM2228; identical to SEQ ID NO: 36647

SEQ ID NO: 52767 - DNA, 1728 bp, Brevibacterium linens BL2; identical to SEQ ID NO: 36648
  CDS (1)..(1728)

SEQ ID NO: 52768 - protein, 575 aa, Brevibacterium linens BL2; identical to SEQ ID NO: 36649

SEQ ID NO: 52769 - DNA, 2355 bp, Lactococcus lactis subsp. cremoris SK11; identical to SEQ ID NO: 36650
  misc_feature (2002)..(2002): n is a, c, g, or t
  CDS (1)..(2355)

SEQ ID NO: 52770 - protein, 784 aa, Lactococcus lactis subsp. cremoris SK11; identical to SEQ ID NO: 36651
  misc_feature (668)..(668): Xaa can be any naturally occuring amino acid

SEQ ID NO: 52771 - DNA, 2355 bp, Lactococcus lactis subsp. cremoris SK11; identical to SEQ ID NO: 36652
  CDS (1)..(2355)

SEQ ID NO: 52772 - protein, 784 aa, Lactococcus lactis subsp. cremoris SK11; identical to SEQ ID NO: 36653

SEQ ID NO: 52773 - DNA, 2301 bp, Arthrobacter sp. FB24; identical to SEQ ID NO: 36654
  CDS (1)..(2301): transl_table=11

SEQ ID NO: 52774 - protein, 766 aa, Arthrobacter sp. FB24; identical to SEQ ID NO: 36655

SEQ ID NO: 52775 - DNA, 2058 bp, Azotobacter vinelandii AvOP; identical to SEQ ID NO: 36656
  CDS (1)..(2058): transl_table=11

SEQ ID NO: 52776 - protein, 685 aa, Azotobacter vinelandii AvOP; identical to SEQ ID NO: 36657

SEQ ID NO: 52777 - DNA, 2079 bp, Burkholderia vietnamiensis G4; identical to SEQ ID NO: 36658
  CDS (1)..(2079): transl_table=11

SEQ ID NO: 52778 - protein, 692 aa, Burkholderia vietnamiensis G4; identical to SEQ ID NO: 36659

SEQ ID NO: 52779 - DNA, 2079 bp, Burkholderia cenocepacia AU 1054; identical to SEQ ID NO: 36660
  CDS (1)..(2079): transl_table=11

SEQ ID NO: 52780 - protein, 692 aa, Burkholderia cenocepacia AU 1054; identical to SEQ ID NO: 36661

SEQ ID NO: 52781 - DNA, 2058 bp, Burkholderia pseudomallei 1655; identical to SEQ ID NO: 36662
  CDS (1)..(2058)

SEQ ID NO: 52782 - protein, 685 aa, Burkholderia pseudomallei 1655; identical to SEQ ID NO: 36663

SEQ ID NO: 52783 - DNA, 1758 bp, Chromohalobacter salexigens DSM 3043; identical to SEQ ID NO: 36664
  CDS (1)..(1758): transl_table=11

SEQ ID NO: 52784 - protein, 585 aa, Chromohalobacter salexigens DSM 3043; identical to SEQ ID NO: 36665

SEQ ID NO: 52785 - DNA, 2058 bp, Burkholderia pseudomallei 1710a; identical to SEQ ID NO: 36666
  CDS (1)..(2058)

SEQ ID NO: 52786 - protein, 685 aa, Burkholderia pseudomallei 1710a; identical to SEQ ID NO: 36667

SEQ ID NO: 52787 - DNA, 2049 bp, Solibacter usitatus Ellin6076; identical to SEQ ID NO: 36668
  CDS (1)..(2049): transl_table=11

SEQ ID NO: 52788 - protein, 682 aa, Solibacter usitatus Ellin6076; identical to SEQ ID NO: 36669

SEQ ID NO: 52789 - DNA, 1929 bp, Geobacter metallireducens GS-15; identical to SEQ ID NO: 36670
  CDS (1)..(1929): transl_table=11

SEQ ID NO: 52790 - protein, 642 aa, Geobacter metallireducens GS-15; identical to SEQ ID NO: 36671

SEQ ID NO: 52791 - DNA, 1848 bp, Geobacter metallireducens GS-15; identical to SEQ ID NO: 36672
  CDS (1)..(1848): transl_table=11

SEQ ID NO: 52792 - protein, 615 aa, Geobacter metallireducens GS-15; identical to SEQ ID NO: 36673

SEQ ID NO: 52793 - DNA, 1794 bp, Exiguobacterium sp. 255-15; identical to SEQ ID NO: 36674
  CDS (1)..(1794): transl_table=11

SEQ ID NO: 52794 - protein, 597 aa, Exiguobacterium sp. 255-15; identical to SEQ ID NO: 36675

SEQ ID NO: 52795 - DNA, 2271 bp, Frankia sp. CcI3; identical to SEQ ID NO: 36676
  CDS (1)..(2271): transl_table=11

SEQ ID NO: 52796 - protein, 756 aa, Frankia sp. CcI3; identical to SEQ ID NO: 36677

SEQ ID NO: 52797 - DNA, 2070 bp, Methylobacillus flagellatus KT; identical to SEQ ID NO: 36678
  CDS (1)..(2070): transl_table=11

SEQ ID NO: 52798 - protein, 689 aa, Methylobacillus flagellatus KT; identical to SEQ ID NO: 36679

SEQ ID NO: 52799 - DNA, 1821 bp, Moorella thermoacetica ATCC 39073; identical to SEQ ID NO: 36680
  CDS (1)..(1821): transl_table=11

SEQ ID NO: 52800 - protein, 606 aa, Moorella thermoacetica ATCC 39073; identical to SEQ ID NO: 36681

SEQ ID NO: 52801 - DNA, 1473 bp, Shewanella baltica OS155; identical to SEQ ID NO: 36682
  CDS (1)..(1473): transl_table=11

SEQ ID NO: 52802 - protein, 490 aa, Shewanella baltica OS155; identical to SEQ ID NO: 36683

SEQ ID NO: 52803 - DNA, 1434 bp, Shewanella amazonensis SB2B; identical to SEQ ID NO: 36684
  CDS (1)..(1434): transl_table=11

SEQ ID NO: 52804 - protein, 477 aa, Shewanella amazonensis SB2B; identical to SEQ ID NO: 36685

SEQ ID NO: 52805 - DNA, 2076 bp, Ralstonia metallidurans CH34; identical to SEQ ID NO: 36686
  CDS (1)..(2076): transl_table=11

SEQ ID NO: 52806 - protein, 691 aa, Ralstonia metallidurans CH34; identical to SEQ ID NO: 36687

SEQ ID NO: 52807 - DNA, 2124 bp, Rubrobacter xylanophilus DSM 9941; identical to SEQ ID NO: 36688
  CDS (1)..(2124): transl_table=11

SEQ ID NO: 52808 - protein, 707 aa, Rubrobacter xylanophilus DSM 9941; identical to SEQ ID NO: 36689

SEQ ID NO: 52809 - DNA, 2229 bp, Kineococcus radiotolerans SRS30216; identical to SEQ ID NO: 36690
  CDS (1)..(2229): transl_table=11

SEQ ID NO: 52810 - protein, 742 aa, Kineococcus radiotolerans SRS30216; identical to SEQ ID NO: 36691

SEQ ID NO: 52811 - DNA, 1473 bp, Shewanella denitrificans OS-217; identical to SEQ ID NO: 36692
  CDS (1)..(1473): transl_table=11

SEQ ID NO: 52812 - protein, 490 aa, Shewanella denitrificans OS-217; identical to SEQ ID NO: 36693

SEQ ID NO: 52813 - DNA, 1470 bp, Shewanella frigidimarina NCIMB 400; identical to SEQ ID NO: 36694
  CDS (1)..(1470): transl_table=11

SEQ ID NO: 52814 - protein, 489 aa, Shewanella frigidimarina NCIMB 400; identical to SEQ ID NO: 36695

SEQ ID NO: 52815 - DNA, 1461 bp, Shewanella frigidimarina NCIMB 400; identical to SEQ ID NO: 36696
  CDS (1)..(1461): transl_table=11

SEQ ID NO: 52816 - protein, 486 aa, Shewanella frigidimarina NCIMB 400; identical to SEQ ID NO: 36697

SEQ ID NO: 52817 - DNA, 1680 bp, Psychrobacter cryohalolentis K5; identical to SEQ ID NO: 36698
  CDS (1)..(1680): transl_table=11

SEQ ID NO: 52818 - protein, 559 aa, Psychrobacter cryohalolentis K5; identical to SEQ ID NO: 36699

SEQ ID NO: 52819 - DNA, 1644 bp, Prosthecochloris vibrioformis DSM 265; identical to SEQ ID NO: 36700
  CDS (1)..(1644): transl_table=11

SEQ ID NO: 52820 - protein, 547 aa, Prosthecochloris vibrioformis DSM 265; identical to SEQ ID NO: 36701

SEQ ID NO: 52821 - DNA, 1758 bp, Syntrophobacter fumaroxidans MPOB; identical to SEQ ID NO: 36702
  CDS (1)..(1758): transl_table=11

SEQ ID NO: 52822 - protein, 585 aa, Syntrophobacter fumaroxidans MPOB; identical to SEQ ID NO: 36703

SEQ ID NO: 52823 - DNA, 1845 bp, Pelobacter propionicus DSM 2379; identical to SEQ ID NO: 36704
  CDS (1)..(1845): transl_table=11

SEQ ID NO: 52824 - protein, 614 aa, Pelobacter propionicus DSM 2379; identical to SEQ ID NO: 36705

SEQ ID NO: 52825 - DNA, 2079 bp, Burkholderia ambifaria AMMD; identical to SEQ ID NO: 36706
  CDS (1)..(2079): transl_table=11

SEQ ID NO: 52826 - protein, 692 aa, Burkholderia ambifaria AMMD; identical to SEQ ID NO: 36707

SEQ ID NO: 52827 - DNA, 2061 bp, Rhodoferax ferrireducens DSM 15236; identical to SEQ ID NO: 36708
  CDS (1)..(2061): transl_table=11

SEQ ID NO: 52828 - protein, 686 aa, Rhodoferax ferrireducens DSM 15236; identical to SEQ ID NO: 36709

SEQ ID NO: 52829 - DNA, 1521 bp, Actinobacillus succinogenes 130Z; identical to SEQ ID NO: 36710
  CDS (1)..(1521)

SEQ ID NO: 52830 - protein, 506 aa, Actinobacillus succinogenes 130Z; identical to SEQ ID NO: 36711

SEQ ID NO: 52831 - DNA, 1749 bp, Escherichia coli; identical to SEQ ID NO: 36712
  CDS (1)..(1749): transl_table=11

SEQ ID NO: 52832 - protein, 582 aa, Escherichia coli; identical to SEQ ID NO: 36713

SEQ ID NO: 52833 - DNA, 2214 bp, Erwinia amylovora; identical to SEQ ID NO: 36714
  CDS (1)..(2214): transl_table=11

SEQ ID NO: 52834 - protein, 737 aa, Erwinia amylovora; identical to SEQ ID NO: 36715

SEQ ID NO: 52835 - DNA, 2166 bp, Escherichia coli; identical to SEQ ID NO: 36716
  CDS (1)..(2166): transl_table=11

SEQ ID NO: 52836 - protein, 721 aa, Escherichia coli; identical to SEQ ID NO: 36717

SEQ ID NO: 52837 - DNA, 2205 bp, Corynebacterium glutamicum; identical to SEQ ID NO: 36718
  CDS (1)..(2205): transl_table=11

SEQ ID NO: 52838 - protein, 734 aa, Corynebacterium glutamicum; identical to SEQ ID NO: 36719

SEQ ID NO: 52839 - DNA, 2304 bp, Pseudomonas putida; identical to SEQ ID NO: 36720
  CDS (1)..(2304): transl_table=11

SEQ ID NO: 52840 - protein, 767 aa, Pseudomonas putida; identical to SEQ ID NO: 36721
  misc_feature (61)..(61): Xaa can be any naturally occuring amino acid
  misc_feature (65)..(65): Xaa can be any naturally occuring amino acid
  misc_feature (78)..(78): Xaa can be any naturally occuring amino acid

SEQ ID NO: 52841 - DNA, 1668 bp, Aquifex aeolicus; identical to SEQ ID NO: 36722
  CDS (1)..(1668): transl_table=11

SEQ ID NO: 52842 - protein, 555 aa, Aquifex aeolicus; identical to SEQ ID NO: 36723

SEQ ID NO: 52843 - DNA, 1797 bp, Bacillus subtilis; identical to SEQ ID NO: 36724
  CDS (1)..(1797): transl_table=11

SEQ ID NO: 52844 - protein, 598 aa, Bacillus subtilis; identical to SEQ ID NO: 36725

SEQ ID NO: 52845 - DNA, 2064 bp, Helicobacter pylori J99; identical to SEQ ID NO: 36726
  CDS (1)..(2064): transl_table=11

SEQ ID NO: 52846 - protein, 687 aa, Helicobacter pylori J99; identical to SEQ ID NO: 36727

SEQ ID NO: 52847 - DNA, 2064 bp, Helicobacter pylori; identical to SEQ ID NO: 36728
  CDS (1)..(2064): transl_table=11

SEQ ID NO: 52848 - protein, 687 aa, Helicobacter pylori; identical to SEQ ID NO: 36729

SEQ ID NO: 52849 - DNA, 2277 bp, Mycobacterium tuberculosis; identical to SEQ ID NO: 36730
  CDS (1)..(2277): transl_table=11

SEQ ID NO: 52850 - protein, 758 aa, Mycobacterium tuberculosis; identical to SEQ ID NO: 36731

SEQ ID NO: 52851 - DNA, 2166 bp, Escherichia coli; identical to SEQ ID NO: 36732
  CDS (1)..(2166): transl_table=11

SEQ ID NO: 52852 - protein, 721 aa, Escherichia coli; identical to SEQ ID NO: 36733

SEQ ID NO: 52853 - DNA, 25 bp, Artificial sequence
  Primer sequence
atgaacaaatcagggaaatacctcg

SEQ ID NO: 52854 - DNA, 22 bp, Artificial sequence
  Primer sequence
ttagtgtgcgccttttgcctgc

SEQ ID NO: 52855 - protein, 846 aa, Artificial sequence; identical to SEQ ID NO: 36736
  Consensus
  Variant (2)..(7): Xaa in position 2 to 7 is any amino acid
  Variant (9)..(12): Xaa in position 9 to 12 is any amino acid
  Variant (16)..(17): Xaa in position 16 to 17 is any amino acid
  Variant (19)..(20): Xaa in position 19 to 20 is any amino acid
  Variant (23)..(32): Xaa in position 23 to 32 is any amino acid
  Variant (33)..(35): Xaa in position 33 to 35 is any or no amino acid
  Variant (39)..(42): Xaa in position 39 to 42 is any amino acid
  Variant (45)..(45): Xaa in position 45 is any amino acid
  Variant (50)..(54): Xaa in position 50 to 54 is any amino acid
  Variant (55)..(55): Xaa in position 55 is any or no amino acid
  Variant (58)..(60): Xaa in position 58 to 60 is any amino acid
  Variant (62)..(63): Xaa in position 62 to 63 is any amino acid
  Variant (67)..(67): Xaa in position 67 is any amino acid
  Variant (71)..(71): Xaa in position 71 is any amino acid
  Variant (77)..(82): Xaa in position 77 to 82 is any amino acid
  Variant (83)..(84): Xaa in position 83 to 84 is any or no amino acid
  Variant (86)..(86): Xaa in position 86 is any amino acid
  Variant (91)..(91): Xaa in position 91 is any amino acid
  Variant (93)..(93): Xaa in position 93 is any amino acid
  Variant (95)..(95): Xaa in position 95 is any amino acid
  Variant (100)..(100): Xaa in position 100 is any amino acid
  Variant (102)..(107): Xaa in position 102 to 107 is any amino acid
  Variant (109)..(109): Xaa in position 109 is any amino acid
  Variant (111)..(112): Xaa in position 111 to 112 is any amino acid
  Variant (114)..(114): Xaa in position 114 is any amino acid
  Variant (117)..(118): Xaa in position 117 to 118 is any amino acid
  Variant (120)..(123): Xaa in position 120 to 123 is any amino acid
  Variant (126)..(133): Xaa in position 126 to 133 is any amino acid
  Variant (134)..(142): Xaa in position 134 to 142 is any or no amino acid
  Variant (144)..(146): Xaa in position 144 to 146 is any amino acid
  Variant (149)..(149): Xaa in position 149 is any amino acid
  Variant (153)..(159): Xaa in position 153 to 159 is any amino acid
  Variant (161)..(171): Xaa in position 161 to 171 is any amino acid
  Variant (175)..(175): Xaa in position 175 is any amino acid
  Variant (177)..(181): Xaa in position 177 to 181 is any amino acid
  Variant (182)..(360): Xaa in position 182 to 360 is any or no amino acid
  Variant (362)..(363): Xaa in position 362 to 363 is any or no amino acid
  Variant (365)..(366): Xaa in position 365 to 366 is any or no amino acid
  Variant (369)..(369): Xaa in position 369 is any amino acid
  Variant (374)..(375): Xaa in position 374 to 375 is any amino acid
  Variant (378)..(382): Xaa in position 378 to 382 is any amino acid
  Variant (384)..(384): Xaa in position 384 is any amino acid
  Variant (385)..(389): Xaa in position 385 to 389 is any or no amino acid
  Variant (391)..(391): Xaa in position 391 is any amino acid
  Variant (393)..(397): Xaa in position 393 to 397 is any amino acid
  Variant (399)..(400): Xaa in position 399 to 400 is any amino acid
  Variant (403)..(411): Xaa in position 403 to 411 is any amino acid
  Variant (413)..(421): Xaa in position 413 to 421 is any amino acid
  Variant (422)..(442): Xaa in position 422 to 442 is any or no amino acid
  Variant (446)..(446): Xaa in position 446 is any amino acid
  Variant (462)..(463): Xaa in position 462 to 463 is any amino acid
  Variant (464)..(464): Xaa in position 464 is any or no amino acid
  Variant (466)..(469): Xaa in position 466 to 469 is any amino acid
  Variant (471)..(471): Xaa in position 471 is any amino acid
  Variant (473)..(474): Xaa in position 473 to 474 is any amino acid
  Variant (476)..(478): Xaa in position 476 to 478 is any amino acid
  Variant (480)..(480): Xaa in position 480 is any amino acid
  Variant (482)..(482): Xaa in position 482 is any amino acid
  Variant (488)..(488): Xaa in position 488 is any amino acid
  Variant (490)..(491): Xaa in position 490 to 491 is any amino acid
  Variant (496)..(499): Xaa in position 496 to 499 is any amino acid
  Variant (501)..(508): Xaa in position 501 to 508 is any amino acid
  Variant (509)..(594): Xaa in position 509 to 594 is any or no amino acid
  Variant (596)..(601): Xaa in position 596 to 601 is any amino acid
  Variant (602)..(604): Xaa in position 602 to 604 is any or no amino acid
  Variant (606)..(616): Xaa in position 606 to 616 is any amino acid
  Variant (617)..(632): Xaa in position 617 to 632 is any or no amino acid
  Variant (636)..(638): Xaa in position 636 to 638 is any amino acid
  Variant (640)..(641): Xaa in position 640 to 641 is any amino acid
  Variant (644)..(645): Xaa in position 644 to 645 is any amino acid
  Variant (647)..(647): Xaa in position 647 is any amino acid
  Variant (649)..(649): Xaa in position 649 is any amino acid
  Variant (651)..(652): Xaa in position 651 to 652 is any amino acid
  Variant (654)..(654): Xaa in position 654 is any amino acid
  Variant (657)..(657): Xaa in position 657 is any amino acid
  Variant (659)..(687): Xaa in position 659 to 687 is any amino acid
  Variant (688)..(710): Xaa in position 688 to 710 is any or no amino acid
  Variant (713)..(714): Xaa in position 713 to 714 is any amino acid
  Variant (717)..(717): Xaa in position 717 is any amino acid
  Variant (721)..(721): Xaa in position 721 is any amino acid
  Variant (724)..(724): Xaa in position 724 is any amino acid
  Variant (726)..(726): Xaa in position 726 is any amino acid
  Variant (728)..(733): Xaa in position 728 to 733 is any amino acid
  Variant (735)..(735): Xaa in position 735 is any amino acid
  Variant (737)..(742): Xaa in position 737 to 742 is any amino acid
  Variant (743)..(746): Xaa in position 743 to 746 is any or no amino acid
  Variant (748)..(749): Xaa in position 748 to 749 is any amino acid
  Variant (752)..(753): Xaa in position 752 to 753 is any amino acid
  Variant (756)..(774): Xaa in position 756 to 774 is any amino acid
  Variant (775)..(834): Xaa in position 775 to 834 is any or no amino acid
  Variant (836)..(845): Xaa in position 836 to 845 is any amino acid

SEQ ID NO: 52856 - protein, 88 aa, Artificial sequence; identical to SEQ ID NO: 36737
  Consensus
  Variant (3)..(3): Xaa in position 3 is Ala or Ser
  Variant (4)..(7): Xaa in position 4 to 7 is any amino acid
  Variant (8)..(8): Xaa in position 8 is Asp or Asn
  Variant (9)..(9): Xaa in position 9 is Asp or Gly
  Variant (10)..(10): Xaa in position 10 is any amino acid
  Variant (11)..(11): Xaa in position 11 is Asp, Glu or Asn
  Variant (12)..(12): Xaa in position 12 is Phe, His or Tyr
  Variant (13)..(24): Xaa in position 13 to 24 is any amino acid
  Variant (25)..(25): Xaa in position 25 is Phe or Leu
  Variant (26)..(26): Xaa in position 26 is Ala, Ile or Leu
  Variant (27)..(27): Xaa in position 27 is Ala, Gly, Asn, Ser or Thr
  Variant (28)..(28): Xaa in position 28 is Ile or Val
  Variant (29)..(29): Xaa in position 29 is Ala or Ser
  Variant (30)..(30): Xaa in position 30 is Ala or Gly
  Variant (31)..(31): Xaa in position 31 is any amino acid
  Variant (34)..(34): Xaa in position 34 is Ile, Leu, Met or Val
  Variant (35)..(35): Xaa in position 35 is any amino acid
  Variant (37)..(40): Xaa in position 37 to 40 is any or no amino acid
  Variant (42)..(43): Xaa in position 42 to 43 is any amino acid
  Variant (45)..(49): Xaa in position 45 to 49 is any amino acid
  Variant (50)..(50): Xaa in position 50 is any or no amino acid
  Variant (52)..(52): Xaa in position 52 is Ile or Leu
  Variant (53)..(53): Xaa in position 53 is Gly, Ile, Leu or Val
  Variant (54)..(54): Xaa in position 54 is any amino acid
  Variant (56)..(56): Xaa in position 56 is Ala, Cys, Gly, Ser, Thr or Val
  Variant (57)..(57): Xaa in position 57 is any amino acid
  Variant (58)..(58): Xaa in position 58 is Phe, Ile, Leu, Met or Val
  Variant (59)..(59): Xaa in position 59 is Ala, Gly, Ile or Val
  Variant (61)..(61): Xaa in position 61 is Ala, Cys, Gly or Ser
  Variant (63)..(63): Xaa in position 63 is any amino acid
  Variant (65)..(67): Xaa in position 65 to 67 is any amino acid
  Variant (68)..(68): Xaa in position 68 is Gly or Leu
  Variant (69)..(70): Xaa in position 69 to 70 is any amino acid
  Variant (72)..(72): Xaa in position 72 is any amino acid
  Variant (73)..(73): Xaa in position 73 is Lys or Arg
  Variant (74)..(75): Xaa in position 74 to 75 is any amino acid
  Variant (76)..(76): Xaa in position 76 is Ala or Gly
  Variant (77)..(78): Xaa in position 77 to 78 is any amino acid
  Variant (79)..(79): Xaa in position 79 is Ile, Leu, Met or Val
  Variant (80)..(86): Xaa in position 80 to 86 is any amino acid
  Variant (87)..(87): Xaa in position 87 is Ile, Leu, Met or Val
  Variant (88)..(88): Xaa in position 88 is Gly or Ser

SEQ ID NO: 52857 - protein, 23 aa, Artificial sequence
  Consensus
  Variant (2)..(4): Xaa in position 2 to 4 is any amino acid
  Variant (5)..(5): Xaa in position 5 is any or no amino acid
  Variant (7)..(7): Xaa in position 7 is any amino acid
  Variant (8)..(8): Xaa in position 8 is any or no amino acid
  Variant (11)..(11): Xaa in position 11 is Ile or Val
  Variant (12)..(13): Xaa in position 12 to 13 is any amino acid
  Variant (14)..(15): Xaa in position 14 to 15 is Ile or Leu
  Variant (16)..(22): Xaa in position 16 to 22 is any amino acid
  Variant (23)..(23): Xaa in position 23 is Ala, Gly, Gln, Ser or Thr
YXXXXAXXLPXXXXXXXXXXXXX

SEQ ID NO: 52858 - protein, 44 aa, Artificial sequence; identical to SEQ ID NO: 36739
  Consensus
  Variant (3)..(3): Xaa in position 3 is Ala, Ser or Thr
  Variant (7)..(7): Xaa in position 7 is Ile, Leu or Val
  Variant (12)..(14): Xaa in position 12 to 14 is any amino acid
  Variant (15)..(15): Xaa in position 15 is any or no amino acid
  Variant (17)..(17): Xaa in position 17 is Gly or Pro
  Variant (18)..(19): Xaa in position 18 to 19 is any amino acid
  Variant (20)..(20): Xaa in position 20 is Ala, Pro or Ser
  Variant (21)..(21): Xaa in position 21 is His, Lys or Arg
  Variant (22)..(31): Xaa in position 22 to 31 is any amino acid
  Variant (32)..(32): Xaa in position 32 is Ile, Leu or Val
  Variant (33)..(33): Xaa in position 33 is any amino acid
  Variant (34)..(34): Xaa in position 34 is Phe or Tyr
  Variant (35)..(37): Xaa in position 35 to 37 is any amino acid
  Variant (38)..(38): Xaa in position 38 is Ile, Leu, Met or Val
  Variant (39)..(39): Xaa in position 39 is any amino acid
  Variant (41)..(41): Xaa in position 41 is Ala, Cys, Gly or Ser
  Variant (42)..(43): Xaa in position 42 to 43 is any amino acid
  Variant (44)..(44): Xaa in position 44 is Ala, Gly or Ser

SEQ ID NO: 52859 - protein, 20 aa, Artificial sequence
  Consensus
  Variant (2)..(4): Xaa in position 2 to 4 is any or no amino acid
  Variant (6)..(6): Xaa in position 6 is Ala, Ser or Thr
  Variant (7)..(7): Xaa in position 7 is any amino acid
  Variant (9)..(9): Xaa in position 9 is Ala, Ser or Thr
  Variant (10)..(10): Xaa in position 10 is Ala or Gly
  Variant (11)..(11): Xaa in position 11 is any amino acid
  Variant (13)..(14): Xaa in position 13 to 14 is any amino acid
  Variant (16)..(18): Xaa in position 16 to 18 is any amino acid
  Variant (19)..(19): Xaa in position 19 is Ala, Glu, Gln, Ser or Thr
  Variant (20)..(20): Xaa in position 20 is Asp or Glu
LXXXTXXDXXXRXXRXXXXX

SEQ ID NO: 52860 - protein, 39 aa, Artificial sequence; identical to SEQ ID NO: 36741
  Consensus
  Variant (2)..(3): Xaa in position 2 to 3 is any amino acid
  Variant (5)..(5): Xaa in position 5 is Ala, Gly, Ser or Thr
  Variant (6)..(6): Xaa in position 6 is any amino acid
  Variant (7)..(7): Xaa in position 7 is Ala, Gly, Asn, Ser or Thr
  Variant (9)..(11): Xaa in position 9 to 11 is any amino acid
  Variant (12)..(12): Xaa in position 12 is Ala, Gly or Ser
  Variant (13)..(15): Xaa in position 13 to 15 is any amino acid
  Variant (17)..(22): Xaa in position 17 to 22 is any amino acid
  Variant (23)..(23): Xaa in position 23 is any or no amino acid
  Variant (25)..(36): Xaa in position 25 to 36 is any amino acid
  Variant (37)..(38): Xaa in position 37 to 38 is any or no amino acid

SEQ ID NO: 52861 - DNA, 984 bp, Escherichia coli
  CDS (1)..(984)
atgataatgattttcacgtcaagttgctgcgataatttatcaatagatgagattatcgaacgtgctgaaaaaggcgattgcgaggctcaatatattgttgggttttattataatcgcgatagcgcaattgattctccggacgacgaaaaagccttttactggctgaagctggccgctgagcaaggtcattgtgaagcacagtattccttagggcaaaagtataccgaggataaaagccgtcataaagataatgagcaagccatcttctggctgaaaaaagctgccctacaaggccatactttcgcttccaacgcccttggctggacactggatcgtggagaagcccccaattataaagaagcggttgtctggtatcagatagccgcggagagcggaatgtcttatgcgcaaaataatcttgggtggatgtacagaaatggcaacggagtcgcaaaagactatgcgctggcatttttctggtacaaacaagctgcattacaaggccatagtgacgcgcaaaacaatctggccgatctttatgaagacggaaaaggcgttgctcaaaacaagacactcgccgcattctggtatttgaaaagcgcacagcagggtaatcggcacgcccagtttcaaattgcatgggattataacgctggcgaaggggtggaccaggactataagcaagcgatgtactggtatctgaaggctgccgctcaggggagcgtcggcgcttacgtcaacatcggttatatgtataaacacggacaaggcgttgagaaagattatcaggctgcctttgaatggtttacgaaagccgctgaatgcaatgacgccactgcctggtataacctggccattatgtatcactacggagaaggaagacctgtcgatctccgacaggctctcgacctgtatcgtaaagttcagtcatccggaaccagagatgtcagtcaggaaattcgtgagactgaagatttactgtag

SEQ ID NO: 52862 - protein, 327 aa, Escherichia coli
MIMIFTSSCCDNLSIDEIIERAEKGDCEAQYIVGFYYNRDSAIDSPDDEKAFYWLKLAAEQGHCEAQYSLGQKYTEDKSRHKDNEQAIFWLKKAALQGHTFASNALGWTLDRGEAPNYKEAVVWYQIAAESGMSYAQNNLGWMYRNGNGVAKDYALAFFWYKQAALQGHSDAQNNLADLYEDGKGVAQNKTLAAFWYLKSAQQGNRHAQFQIAWDYNAGEGVDQDYKQAMYWYLKAAAQGSVGAYVNIGYMYKHGQGVEKDYQAAFEWFTKAAECNDATAWYNLAIMYHYGEGRPVDLRQALDLYRKVQSSGTRDVSQEIRETEDLL

SEQ ID NO: 52863 - DNA, 2067 bp, Rattus norvegicus
  CDS (1)..(2067)
atgaatcccttggctttgttagtagagatattgatcattattgaggtcacaactaaaaacagtgaagcagaaagatataacagaaaacaaaaagaagtgaatgtcaccacacaggtatcagtgagcaaagtcaagcagtttttatcgcatctactggaacaaggaaaagcaaataaaatagccaataaaagagaaaatcccttagaaaaaaagaagcatcaacataagttaaaaataaaaggaattcaaaataagaatctcctgaagagaaatcaaaactacttcaaaaagccagccaagaaaagtatcacagataaaggagatgagttatttaagatgggcaacaagattctccaggagtctaaaagtcaaaaacaaaaaacagaagcctacacattcttcaccagagcagccgacatgggaaatttgaaagctatggaaaaaatggctgacgctttgctatttggaagtttcggcatgcaaaacataacagcagctatccagttatacgagtccttggctaaagaaggatcatacaaagcccaaaatgcattgggatttttatcttcttatggaataggaatggaatatgaccaagccaaggcactgatatattatacctttggaagtgctggagggagcatgatgtcccagatgattctggggtacagatacttgtcaggaattaatgttctgcaaaattgtgaagttgctctaaatcattacaagaaagtggcagattatattgctgacaaattggaaaaaagtgaaggtattcccgtggaaaaagtgaggctaaccgagagacctgagaatctgagttccaacagtgagattttggattgggacatataccaatactataagtttttggcagaaagaggagatgttcagatacaagtatctcttggacaattgcatctaattgggagaaaaggtctagatcaagattacagtaaggcgttatactactttctaaaggcagcaaaagctgggagtgcaaatgccatggcatttataggaaagatgtatttagaggggaacgctgctgcaccacaaaataatgccactgccttcaaatacttctccatggcggccagcaagggcaatgcaattggtcttcatggactcggtctcctttacttccatggaaaaggtgttcctgtgaattatggcgaagcacttaaatacttccagaaagctgcagagaagggatggccaaacgcacagttccacctaggcttcatgtactactctggctctggagtatggaaggattataagcttgccttcaaatatttttacttggcatctcagagtgggcagcctctcgccatttattatctagccgagatgtacgcaactggcaccggagtgctgagatcctgcagaacggccgtggagccttataaaggagtctgtgaactaggccactgggctgagaaattcctgacagcctactttgcctataaggatggggacgtagattcttctctaattcagtacgcgttgcttgccgaaatgggatatgaagtagctcaaagcaattcagcattcattttggaatccaaaaaagctaaaattctggggaaagagaagatgtatccaatggcacttctgctatggaaccgagctgccattcaagggaatgcttttgctagagtgaaaattggagattaccattactatggctacgggactaagaaggactatgaaacagcagccacacactacagcatcgcagcagacaagcatcacagtgcgcaagccatgttcaacctggcatatatgtatgagcacggcttggggattgcacaggacattcacttggccagaagattatacgacatggccgctcagacaagcccagatgctcacatacccgtgttctttgcccttatgaaactggaaactatgcattttctccaagatatcctgttttttaattttaccacgaaatggaaatggctgaaactggacagcaccattggaccatactgggacttattagtgattggcctaattgttgttgtgctgatcttcctgcttagaaaccaccataggtag

SEQ ID NO: 52864 - protein, 688 aa, Rattus norvegicus
MNPLALLVEILIIIEVTTKNSEAERYNRKQKEVNVTTQVSVSKVKQFLSHLLEQGKANKIANKRENPLEKKKHQHKLKIKGIQNKNLLKRNQNYFKKPAKKSITDKGDELFKMGNKILQESKSQKQKTEAYTFFTRAADMGNLKAMEKMADALLFGSFGMQNITAAIQLYESLAKEGSYKAQNALGFLSSYGIGMEYDQAKALIYYTFGSAGGSMMSQMILGYRYLSGINVLQNCEVALNHYKKVADYIADKLEKSEGIPVEKVRLTERPENLSSNSEILDWDIYQYYKFLAERGDVQIQVSLGQLHLIGRKGLDQDYSKALYYFLKAAKAGSANAMAFIGKMYLEGNAAAPQNNATAFKYFSMAASKGNAIGLHGLGLLYFHGKGVPVNYGEALKYFQKAAEKGWPNAQFHLGFMYYSGSGVWKDYKLAFKYFYLASQSGQPLAIYYLAEMYATGTGVLRSCRTAVEPYKGVCELGHWAEKFLTAYFAYKDGDVDSSLIQYALLAEMGYEVAQSNSAFILESKKAKILGKEKMYPMALLLWNRAAIQGNAFARVKIGDYHYYGYGTKKDYETAATHYSIAADKHHSAQAMFNLAYMYEHGLGIAQDIHLARRLYDMAAQTSPDAHIPVFFALMKLETMHFLQDILFFNFTTKWKWLKLDSTIGPYWDLLVIGLIVVVLIFLLRNHHR

SEQ ID NO: 52865 - DNA, 2223 bp, Mus musculus
  CDS (1)..(2223)
atgcaggtccgcgtaaggctgtcgttgctgctgctctgcgcggtgctcctgggctcggcagccgcgacctcggatgacaaaactaaccaggatgactccttagattccaagagttctttgcccacagatgagtcagtgaaggaccacaccaccacgggcaaagtagttgctggccagatatttgttgattctgaagaagcagaagtggaatcccttcttcaggacgaggaagatagctccaagacccaggaggaagagatcagctttttagaatctccgaatccaagcagcaagacctacgaagaactaaagagagtgcggaagccagtcttgactgccattgaagctgaagaagatgctgccaaaagacgacagatgcaggaagcagagatgatctatcaggccgggatgaagatactgaatggaagcaataggaagagccaaaagagagaagcatatcggtaccttcagaaggcagcaggcatgaatcacaccaaagccctggagagagtgtcctatgctctcttgtttggtgattacctcacacagaatatccaggcagccaaagagatgtttgagaaactgactgaggaagggtctcccaaaggacagactggtcttggctttctctacgcttctgggcttggtgttaattcaagtcaggcaaaggctcttgtatattatactttcggagctcttggaggcaacctgatagcccatatgattttgggttaccgctactgggctggcatcggagtcctccagagttgtgagtcggcactgacccattatcgtcttgttgccaatcatgttgctagtgatatctccctaactggaggctctgtagtccagagaatacggctgcccgatgaagtggaaaacccggggatgaacagtgggatgctggaagaagacctgattcagtattaccagttcctagctgagaagggtgacgtccaagcacaggttggcctgggacagctgcatctgcatggagggcgtggagtagaacagaatcaccagagagcgtttgactacttcaacttagcagcaaatgctggcaattcacatgctatggccttcctgggaaagatgtattctgaaggaagtgacatcgtacctcagagtaatgagacggcacttcactactttaagaaagctgctgacatgggcaaccccgtgggacagagcgggcttggaatggcctacctctacggaagaggcgttcaagttaattatgacctggccctcaagtatttccagaaagctgctgagcaaggctgggtggacgggcagctgcagctcggctctatgtactacaatggcattggagtcaagagagattataagcaggccttgaagtattttaatctggcttctcaaggaggccatatcttggctttctataacctcgcacagatgcacgccagcggcacaggggtgatgcggtcctgtcacactgcagtggagttgtttaagaatgtgtgtgagcgaggtcgctggtcagagagactgatgactgcctacaacagctataaggatgaggactacaatgctgcagtggtccagtacctcctgctggctgagcagggctacgaggtggcgcagagcaacgcagccttcatcctcgaccagagagaagcaaccattgtaggtgagaatgaaacttaccccagagctttactgcattggaacagggccgcctcccaaggttacactgtggctagaattaagcttggagactaccacttctatggctttggcactgatgtggattatgagaccgcatttattcattaccgcctggcttctgagcagcagcacagcgcccaagctatgtttaacctgggctacatgcacgagaagggcctaggcattaaacaggacattcaccttgcaaaacgcttttatgacatggcagccgaagctagcccagatgcacaagtacctgtgttcctcgcactctgcaaattaggtgtcgtctatttcttacagtacatacgggaagcaaacattcgagatctattcacacaactggatatggaccagcttttgggacccgagtgggacctttacctcatgaccatcattgcactgctcttgggtacagtcatagcttacaggcagcgacagcaccaggacataccagttcccaggcccccagggccacggccggctcctccccagcaggaaggaccaccagagcagcagccaccacagtag

SEQ ID NO: 52866 - protein, 740 aa, Mus musculus
MQVRVRLSLLLLCAVLLGSAAATSDDKTNQDDSLDSKSSLPTDESVKDHTTTGKVVAGQIFVDSEEAEVESLLQDEEDSSKTQEEEISFLESPNPSSKTYEELKRVRKPVLTAIEAEEDAAKRRQMQEAEMIYQAGMKILNGSNRKSQKREAYRYLQKAAGMNHTKALERVSYALLFGDYLTQNIQAAKEMFEKLTEEGSPKGQTGLGFLYASGLGVNSSQAKALVYYTFGALGGNLIAHMILGYRYWAGIGVLQSCESALTHYRLVANHVASDISLTGGSVVQRIRLPDEVENPGMNSGMLEEDLIQYYQFLAEKGDVQAQVGLGQLHLHGGRGVEQNHQRAFDYFNLAANAGNSHAMAFLGKMYSEGSDIVPQSNETALHYFKKAADMGNPVGQSGLGMAYLYGRGVQVNYDLALKYFQKAAEQGWVDGQLQLGSMYYNGIGVKRDYKQALKYFNLASQGGHILAFYNLAQMHASGTGVMRSCHTAVELFKNVCERGRWSERLMTAYNSYKDEDYNAAVVQYLLLAEQGYEVAQSNAAFILDQREATIVGENETYPRALLHWNRAASQGYTVARIKLGDYHFYGFGTDVDYETAFIHYRLASEQQHSAQAMFNLGYMHEKGLGIKQDIHLAKRFYDMAAEASPDAQVPVFLALCKLGVVYFLQYIREANIRDLFTQLDMDQLLGPEWDLYLMTIIALLLGTVIAYRQRQHQDIPVPRPPGPRPAPPQQEGPPEQQPPQ

SEQ ID NO: 52867 - DNA, 1734 bp, Mesorhizobium loti MAFF303099
  CDS (1)..(1734): transl_table=11
atgacaatcctggatcggctgactggtctggccttcccggcggcggtattgcgtcgagcgatcaagcttgctgacagcggcaaggccgctgaagcctttccgcttatggcgaaagcggcccgcgcggggatcgtcgacgccgagtaccgggtcgcgcgttgctatctggaaggcgccggtgtgccaccgagccgtatggaaggcgcgcgatggctgctgcgggcggccgaccacgggagcgcggatgcgcaagcgctcctcgccgcactctacgtcaccgggctggtgacgtcggaagccgacggcaagggaccctcggagcacttattcaaacctgattccgctggaaaaccagacttcacggccgctttcgactttgccaccaaggcggccgaggcaggctcggccacgggacaggcgatcctcggttatatccttaccagcggccccgcatcgatgcgcgatgccgatgcggcccaccggtggtacgagaagtcggcttctgccggctgcgccgaagggtgccttggctttgccctgtcgctggctcgccgcggcaaacgcgaaaacagagttcggattgcggaagaggtaagacgtgcagccgacgccggcctgccgaccgcgacctatcttcttgcggtccttaccgagcacgggctcggcgtagcacgcgacatggcagcagccgctcaactgtatcaggctgctgcggagaagggcctgccctctgctcaattccggttgggattggcactgatcgacggtgcactcgtcggccaagatgtcgctgctggggaggcgtggatgcggcgtgctgccctggccggcaatatcgaggcagcctatctcctgggcgatcgccatgcgaagacgcagcggccggattttgcggaagccgcgaactggtatcggcgggcagccgaagcgggccaccaagccgccgcccgcgctttggcctcgctctatttgactggaaatggtgtggctgaggatgtcgaggaaggagcacgctggctgcgctcttccgcaagtgccggcaatcagcaggcacagacagacctcgccaatcttatcctcggaggggctggcgagccggacgacggtgcaagcgttgccggatggttcgaggcggccgcatcatcgggcgacctcatcgcggcattcaaccttgggctctgcttcgccaagggcgtcggcgttcgccaggacgaggggcaagcggcacactggctgcggcgcgcggccgaaggcgtcgccgaggcacaatatatgtatgcccgcctcctccaggatggacgcggcgtggcggccgacccaactcaggcccgcgtgtggtttgcgcgggcggccgacgccggcgtgctcgacgcacgcgtggcgctcgccgagatgctactcaatgggcgcggcggcatgcccgagcccgaggctgcaatgcagttgtttgaacaggccgccgccgacggtcacgccggggcgatgtttgcgattggcgcgctgtacggagccggccacggcctgccgctcgaccagacaacggcacagaaatggtacgctgccgctgccggacgtgggcatagccaagcccaattcatgctcggacgttatctcttgaaaggcctcgccggggagcgcgacccggttgccgctcgcctttggctcgaacgtgcggctgcgcacgggatcagtgaagccgccgacgaactgggggctgcgggcgggtccgactag

SEQ ID NO: 52868 - protein, 577 aa, Mesorhizobium loti MAFF303099
MTILDRLTGLAFPAAVLRRAIKLADSGKAAEAFPLMAKAARAGIVDAEYRVARCYLEGAGVPPSRMEGARWLLRAADHGSADAQALLAALYVTGLVTSEADGKGPSEHLFKPDSAGKPDFTAAFDFATKAAEAGSATGQAILGYILTSGPASMRDADAAHRWYEKSASAGCAEGCLGFALSLARRGKRENRVRIAEEVRRAADAGLPTATYLLAVLTEHGLGVARDMAAAAQLYQAAAEKGLPSAQFRLGLALIDGALVGQDVAAGEAWMRRAALAGNIEAAYLLGDRHAKTQRPDFAEAANWYRRAAEAGHQAAARALASLYLTGNGVAEDVEEGARWLRSSASAGNQQAQTDLANLILGGAGEPDDGASVAGWFEAAASSGDLIAAFNLGLCFAKGVGVRQDEGQAAHWLRRAAEGVAEAQYMYARLLQDGRGVAADPTQARVWFARAADAGVLDARVALAEMLLNGRGGMPEPEAAMQLFEQAAADGHAGAMFAIGALYGAGHGLPLDQTTAQKWYAAAAGRGHSQAQFMLGRYLLKGLAGERDPVAARLWLERAAAHGISEAADELGAAGGSD

SEQ ID NO: 52869 - DNA, 2151 bp, Mesorhizobium loti MAFF303099
  CDS (1)..(2151): transl_table=11
atgttgcgaaggagcttttccagctatttgaggcaaggcctcctgctcgcgttcctggcggcgttcagcgcactttggctcgcccaggcccacgccgagcggcgcgctgccattgtcgtcggcaacagcgaatatccgtttgccccgctgaccaatccccgcaacgacgccaagctcatcgccaataccttgaccgagctcaaattcgacgtcctgctcttttacgatgtcaagaaatcggcggagaaagacctgaacgacgcgatacgcgcgcatctcataggcgccgacatggcggtcttctattacgccggccatgccctgcagtataacggccagaacctgctgctccccgtggatacgcggatctcgtcggccaaggaggtcgcggccgacgccatgaggctcaacgacctgatcgatatcgtgaagaacgatccggtcggcgtgaaagtcttcatcctcgatgcctgccgcaacaatccggtggccaaggagaaggggttgcagcaaggcctcgcctacacagaggccggcagcggccaggtgctggtcgcctttgccaccagcgccggtgaggtcgcctatgacgggacgggcatcaacagcccctattcgtcggcgctcgccaacgccctgctcatgccgaatctcgatgtgtacgacacgttccgcacggtgcggggcgacgttcgccaggcgacaggcggctcccaaattccctggatcaccggctcgatcgaaacgaaattcgtcttccggcagggtgacgccggcaagcaggttgcgcaagccgagcacgccgccgaggcggacggcggcctgaccatcgatgaggtgttatggtccttcatcagcgacagccagaatccggaggacttcgagcgcttcgtgaaggtctttccgaacagccgctacgcggccgaggcgacggagaagagccgcttcaaggtggctgcgttgaccaagcgcggactctatgtcaacggcaatttggtctccagctcgatcgcggccacggcgccgatcggggcgagtgacaaggcgttgagcgaggagttcgtgttccagcaggccggcgagcgcgccgtcagcgagacctttcgtatttggccgagcaacttgcccgacacacagcgcggcatgcggacgatggtcacggattgcgatctctacgccgccgatcccaacgatccacagcgcgcggtgcctggtgtcaccaacgggctcgtcaacgttcgggacgcgttgcgcgcttgcgcttttgcactggcggccgacatcaacaacccgcgcctgcagttccagttcggccgtgttctggaaattgccaggcgctatagctgggccgagcatttctacgaattggccggcaatcagcaatacagcgccgcgctcatcaacatgggctacatggcgcgcgtcggcatggggcgcgagatcgactacggccgcgcgttcgacccttacgttcgggccgccgcgcttggcaatctcagagccaggaccgacatcggctccgcctatattgctggccaaggcgtaccaaagctgccggaggaaggcgttctttggtatcgcctggccgcatcaagcggctgggcgaatgcgatcaccgccctcggcgacgcgtaccgcctcggcactggcgtcaagcaagactacgtccaggcagcctccttgtattcagcagcagccgataccggccagatcgatgcgatggcaaatctgggacaggcttacctcgcgggcgaaggcgtgaaaaaggacgtaccccgaggactcgaactgctgcagcgcgcaaacgacatgggcaacaggtatgcaccctattttatggcacagctatatctgaaaggcgaccgcaagctgcctgccgatcctcgccgcgccctggccctccttgagctttccgcgaaccggggaaatgagtacgcctacgtccgtctcgcctgggggcatcgcgacggtgtattcaccggcggcaagcctgacctgcgacgagcttacttcgacgcctcgctcgccgcgaggcttcgggccgatcagggagaacaggcgaaggcagagatagccaagaaaatagaccccgcaacccgaaaagaaatagacggagaagttgaactatacatcaaacaaaatggtccgtaa

SEQ ID NO: 52870 - protein, 716 aa, Mesorhizobium loti MAFF303099
MLRRSFSSYLRQGLLLAFLAAFSALWLAQAHAERRAAIVVGNSEYPFAPLTNPRNDAKLIANTLTELKFDVLLFYDVKKSAEKDLNDAIRAHLIGADMAVFYYAGHALQYNGQNLLLPVDTRISSAKEVAADAMRLNDLIDIVKNDPVGVKVFILDACRNNPVAKEKGLQQGLAYTEAGSGQVLVAFATSAGEVAYDGTGINSPYSSALANALLMPNLDVYDTFRTVRGDVRQATGGSQIPWITGSIETKFVFRQGDAGKQVAQAEHAAEADGGLTIDEVLWSFISDSQNPEDFERFVKVFPNSRYAAEATEKSRFKVAALTKRGLYVNGNLVSSSIAATAPIGASDKALSEEFVFQQAGERAVSETFRIWPSNLPDTQRGMRTMVTDCDLYAADPNDPQRAVPGVTNGLVNVRDALRACAFALAADINNPRLQFQFGRVLEIARRYSWAEHFYELAGNQQYSAALINMGYMARVGMGREIDYGRAFDPYVRAAALGNLRARTDIGSAYIAGQGVPKLPEEGVLWYRLAASSGWANAITALGDAYRLGTGVKQDYVQAASLYSAAADTGQIDAMANLGQAYLAGEGVKKDVPRGLELLQRANDMGNRYAPYFMAQLYLKGDRKLPADPRRALALLELSANRGNEYAYVRLAWGHRDGVFTGGKPDLRRAYFDASLAARLRADQGEQAKAEIAKKIDPATRKEIDGEVELYIKQNGP

SEQ ID NO: 52871 - DNA, 1041 bp, Mesorhizobium loti MAFF303099
  CDS (1)..(1041): transl_table=11
gtggctccggtaaggcttccccttcaggccttgcttgcagcggtcatgatccagaccgccgccgccgaaaccatacccttgccgccgcccatgcctgaaaccggcgcacacaccgacaagccgatcgaaaagcagttgccgcagcccgccaccacggcggagcccgcaccgctgccctcggtcgacagcatcaatcccgaccgcttcggcgccaagccggcggacgccgcctatggcgccttccagcgcgggctctacaaaacggcctataatctggcgctgacccgcgcccagaatggcgacccggcggcgcagacattggtggccgagatcctgtcgcgtgggctcggcgtgccgttgaatgccgcggaagcctcgaaatggtatgcgctcgccgccgaacagggcgtgcctgaggcgcagttccagtatgcgctgatgctgctcgacggccgttacgtcaagaaggacccgaaagaggcctacgccctgatgcaggccgccgccgaagccggcaaccagctggcgcagttcaatttcgcgcagatgctggtccgccaggatcccggcgacacgggcctggccaaggcagtctcctattatgagcgcgccgccgcgaccggcctcgccgacgcgcaatacgccatgtcccagatctatgccaacggcgttggcggcaaaccacgcgacgacgcgcaggcaaggcgcttcctggcgcaggctgcgcggcagaactacgacaccgcgcagatcgatctcgccgcctggatgatcgagggccgcggcggcgcccgcgacctgaaatcggctttcggctggacgaagcaggccgccgagggcggcaacgtcgccgcgcagaaccggctggcaaaactctacatgcaaggcatcggcacagacccggacctggtgctcgccggcgcctggtacatcgtcgcccgccgcgccggtctcatcgatcccgacatggacgatttcctacaagggctgagcgacgaccagaccaaacaggccctgcaaaaggcgaaccgcctgccctaa

SEQ ID NO: 52872 - protein, 346 aa, Mesorhizobium loti MAFF303099
MAPVRLPLQALLAAVMIQTAAAETIPLPPPMPETGAHTDKPIEKQLPQPATTAEPAPLPSVDSINPDRFGAKPADAAYGAFQRGLYKTAYNLALTRAQNGDPAAQTLVAEILSRGLGVPLNAAEASKWYALAAEQGVPEAQFQYALMLLDGRYVKKDPKEAYALMQAAAEAGNQLAQFNFAQMLVRQDPGDTGLAKAVSYYERAAATGLADAQYAMSQIYANGVGGKPRDDAQARRFLAQAARQNYDTAQIDLAAWMIEGRGGARDLKSAFGWTKQAAEGGNVAAQNRLAKLYMQGIGTDPDLVLAGAWYIVARRAGLIDPDMDDFLQGLSDDQTKQALQKANRLP

SEQ ID NO: 52873 - DNA, 1815 bp, Arabidopsis thaliana
  CDS (1)..(1815)
atgagagtctcaggccagagtatcatagccatatctctattcacactctcactctacatccatcgtgttcaagcccgtcccttcgttctcgttctctccaacgaagatctcaacggaggttttaatgataacggcgcctacgaatcctccgatttcgatgagtttggtgaatccgaacccaaatccgaagaggagcttgatcccggttcatggcgtcgaatcttcgagacaaatgagtccaccgtccacgcctctgcgtcgccgcagtattactccggactccacaaaattctctcggctgcgagtgaaggaaacactacattgatggaggaagcggtttcagagatagattcgtctgcctcgtcaggagatccacacgcacaatcagtgatggggttcgtatacgggattgggatgatgcgtgagacgagccgaagcaaatcgattttgcatcatcatttcgcggctgcgggaggaaatatgcagtctaaaatggcacttgcttttagatatctaagacaaaatatgtatgataaagctgttgagttatatgctgaactagcagagacagcagtgaatagctttttgatatccaaggattctccaatggctgagccagttagaatccacattggaacagaggagaataaagatgcactaaggaagtcacgaggggaggaagatgaggattttcagatattggaataccaggcagagaaagggaattctgtagcaatgcacaaaattggactgttttattactttggtttgagaggattaaggcgtgatcacgctaaggcgttgtattggttttcgaaggcggagtttaatggccttggttacttgtatgtcaaaggctatggagtagataagagaaactacactaaggcgagagaatactttgagatggctgctaataatgaagatcctagcgggcattataaccttggagtgttgtatcttaaaggcactggagtcaagaaggatgtgaggcatgcaaccaaatatttctttgttgctgccaatgctggtcaaccaaaggctttttatcaactcgccaagatgttccatacaggcgttggacttacaaagaacttggaaatggcgacaactttttataagctagtagcagaaagaggaccatggagttctctctctagatgggctcttgaagcttacttgaaaggtgatgtgggaaaggcttttatattgtattcgagaatgtcagagctcggttatgaagtagcacaaagtaatgctgcctggatcgtcgataaatacggggaaagaagcatgtgcatgggagtgtatgggttttgcacagataaggagaggcacgatcgggctcattctttgtggtggcgtgcctctgaacagggaaacgaacatgctgcattgcttattggagatgcatattactacggtcggggtacagagagggatttcgtgcgtgcagcagaggcgtacatgtatgctaaatctcaatcaaatgcgcaagcaatgttcaacctcggttacatgcatgagcatggagaaggtcttccttttgatctccatcttgctaaacgttactacgaccaggccctccagagcgatactgctgccaaattgcccgtcacgcttgctcttgcgagtgtatgggtccgcagaaactatgctgatactgccctggtgcaagtactgaattccttaccagaagtgcatcaaaaggtggtggaatgggtagagaatgggatgttggaagaagtggttttggatcccgttggtgctaacgtggcacagcccctcgctgccccagtagcatttccccagtaa

SEQ ID NO: 52874 - protein, 604 aa, Arabidopsis thaliana
MRVSGQSIIAISLFTLSLYIHRVQARPFVLVLSNEDLNGGFNDNGAYESSDFDEFGESEPKSEEELDPGSWRRIFETNESTVHASASPQYYSGLHKILSAASEGNTTLMEEAVSEIDSSASSGDPHAQSVMGFVYGIGMMRETSRSKSILHHHFAAAGGNMQSKMALAFRYLRQNMYDKAVELYAELAETAVNSFLISKDSPMAEPVRIHIGTEENKDALRKSRGEEDEDFQILEYQAEKGNSVAMHKIGLFYYFGLRGLRRDHAKALYWFSKAEFNGLGYLYVKGYGVDKRNYTKAREYFEMAANNEDPSGHYNLGVLYLKGTGVKKDVRHATKYFFVAANAGQPKAFYQLAKMFHTGVGLTKNLEMATTFYKLVAERGPWSSLSRWALEAYLKGDVGKAFILYSRMSELGYEVAQSNAAWIVDKYGERSMCMGVYGFCTDKERHDRAHSLWWRASEQGNEHAALLIGDAYYYGRGTERDFVRAAEAYMYAKSQSNAQAMFNLGYMHEHGEGLPFDLHLAKRYYDQALQSDTAAKLPVTLALASVWVRRNYADTALVQVLNSLPEVHQKVVEWVENGMLEEVVLDPVGANVAQPLAAPVAFPQ

SEQ ID NO: 52875 - DNA, 771 bp, Helicobacter pylori 26695
  CDS (1)..(771): transl_table=11
atgggatacgcaagcaaattagccttgaagatttgtttggcaagtttatgtttatttagcgctcttggtgcagaacaccttgaacaaaaaaggaactatatttataaaggggaggaagcctataataataaggaatatgagcgggcggcttctttttataagagcgcgattaaaaatggcgagccgcttgcttatgttcttttagggatcatgtatgaaaatggtaggggtgtgcctaaagatgaaaagaaagcggctgaatattttcaaaaagcggttgataacgatatacctagagggtataacaatttaggcgtgatgtataaagagggtagaggtgtgcctaaagatgaaaagaaagccgtggagtattttagaatagctaccgagaagggctatactaacgcctatataaacttaggcatcatgtatatggagggtaggggagttccaagcaactatgtgaaagcgacagagtgctttagaaaagcgatgcataagggtaatgtagaagcttatatccttttaggggatatttattatagtgggaatgatcaattgggtattgagccagacaaagataaggcgattgtctattataaaatggcggctgatatgagctcttctagagcttatgaagggttagcagagtcttatcagtatgggttaggcgtggaaaaagataagaaaaaggctgaagaatacatgcaaaaagcatgcgattttgacattgataaaaattgtaagaaaaagaacacttcaagccgataa

SEQ ID NO: 52876 - protein, 256 aa, Helicobacter pylori 26695
MGYASKLALKICLASLCLFSALGAEHLEQKRNYIYKGEEAYNNKEYERAASFYKSAIKNGEPLAYVLLGIMYENGRGVPKDEKKAAEYFQKAVDNDIPRGYNNLGVMYKEGRGVPKDEKKAVEYFRIATEKGYTNAYINLGIMYMEGRGVPSNYVKATECFRKAMHKGNVEAYILLGDIYYSGNDQLGIEPDKDKAIVYYKMAADMSSSRAYEGLAESYQYGLGVEKDKKKAEEYMQKACDFDIDKNCKKKNTSSR

SEQ ID NO: 52877 - DNA, 771 bp, Helicobacter pylori J99
  CDS (1)..(771): transl_table=11
atgggatacgcaagcaaattagctttaaagatttgtttggtaggtttatgtttatttagcacccttggtgcagaacaccttgagcaaaaagggaattatatttataagggagaggaggcttataataataaggaatatgagcgagcggcttctttttataagagcgctattaaaaatggtgagtcgcttgcttatattcttttagggatcatgtatgaaaatggtaggggtgtacctaaagattacaagaaagcggttgaatatttccaaaaagctgttgataacgatatacctagagggtataacaatttgggcgtgatgtataaagagggtaagggagttcctaaagatgaaaagaaagcggtggaatattttagaatagctacagagaaaggttatactaacgcttatatcaacttaggcatcatgtatatggagggcaggggagttccaagtaactatgcgaaagcgacagaatgttttagaaaagcgatgcataagggcaatgtggaagcttatattctcctaggggatatttattatagcgggaatgatcaattgggtattgagccggacaaagataaggctgttgtctattataaaatggcggctgatgtgagttcttctagagcttatgaagggttgtcagagtcttatcggtatgggttaggcgtggaaaaagataaaaaaaaggctgaagaatacatgcaaaaagcatgcgattttgacattgataaaaattgtaagaaaaagaacacttcaagccgataa

SEQ ID NO: 52878 - protein, 256 aa, Helicobacter pylori J99
MGYASKLALKICLVGLCLFSTLGAEHLEQKGNYIYKGEEAYNNKEYERAASFYKSAIKNGESLAYILLGIMYENGRGVPKDYKKAVEYFQKAVDNDIPRGYNNLGVMYKEGKGVPKDEKKAVEYFRIATEKGYTNAYINLGIMYMEGRGVPSNYAKATECFRKAMHKGNVEAYILLGDIYYSGNDQLGIEPDKDKAVVYYKMAADVSSSRAYEGLSESYRYGLGVEKDKKKAEEYMQKACDFDIDKNCKKKNTSSR

SEQ ID NO: 52879 - DNA, 729 bp, Pasteurella multocida subsp. multocida str. Pm70
  CDS (1)..(729): transl_table=11
atgaagaaaacgattctgttcatattcagtgtgtttttatccggtgtggtgcacgcacagtctgcaccggtttctcctgagctgtcagctgtcttgccacagacagcaccaactgcaacgggagcagagcagcacgtttcggcattgaatgcatctgaactgagtgatgaagctcgtcgcgaattaattcgcgaggcagccgataaaaaagagtggacacgggcgtttgagctgattttaccacttgctttaaaaggggattaccaggcacaagccaatcttggtattttgtatgcacgtggtcaaggtgttccacaagatttcgaaaaagcctattggtggtttagcgaagcagccgaaaagggcagcattaaagccatcaataatttggccgttttttacttacaaggtcatggtgtcaagcaagatattcgccacagcattacattatttgaaaaaactgccaattcaggctcattggatgcgatgctggtgctagggcaaatctatgaaaacgaattaaatcaaatgacccaagctttcaaatggtataaaaaagcagcagaagcgggtaatcacgatgcacaatttcgtttagccgtgatgtatgagaatggtgagggaaccaagaaaaataaaaaacaagctgtttattggtatcagaaggtgtccgttcagcaaaatgaattagcagcattagcccaagagcgtttatctcgcctacaataa

SEQ ID NO: 52880 - protein, 242 aa, Pasteurella multocida subsp. multocida str. Pm70
MKKTILFIFSVFLSGVVHAQSAPVSPELSAVLPQTAPTATGAEQHVSALNASELSDEARRELIREAADKKEWTRAFELILPLALKGDYQAQANLGILYARGQGVPQDFEKAYWWFSEAAEKGSIKAINNLAVFYLQGHGVKQDIRHSITLFEKTANSGSLDAMLVLGQIYENELNQMTQAFKWYKKAAEAGNHDAQFRLAVMYENGEGTKKNKKQAVYWYQKVSVQQNELAALAQERLSRLQ

SEQ ID NO: 52881 - DNA, 519 bp, Pasteurella multocida subsp. multocida str. Pm70
  CDS (1)..(519): transl_table=11
atgcaaagatggagcaaaacactgctcagtattatgttgcttgtgagtacaatgaatgtcttcgctcaacgagaagaagacccggtttttgaacaaggtgttgaagcctataaacgcggtgatcatgctactgcgtttaaactttggctatcacgagccgagcaaggggagatgagcgctcaatttaatgtggggagaatgtacgacgatggtgacggtgttgaacaagacaagcaacaagctttgaaatggtatcaaaaatccgctgagcaaaatcaccccgatgcacagtatcatttagggctgatgtacagtgaaggcgacggcattgcacaagactttaaacaagcctacaaatggtatagccaatctgccgtacagggcgatgcgcgtgcgctctataatttaggtacactctatgcgaatggcgaaggaatcgaacgtgattgggacagagcgaaaatgtattttaaacaagcttgcaaagcgggtttgccagaagggtgtgattgggagtaa

SEQ ID NO: 52882 - protein, 172 aa, Pasteurella multocida subsp. multocida str. Pm70
MQRWSKTLLSIMLLVSTMNVFAQREEDPVFEQGVEAYKRGDHATAFKLWLSRAEQGEMSAQFNVGRMYDDGDGVEQDKQQALKWYQKSAEQNHPDAQYHLGLMYSEGDGIAQDFKQAYKWYSQSAVQGDARALYNLGTLYANGEGIERDWDRAKMYFKQACKAGLPEGCDWE

SEQ ID NO: 52883 - DNA, 987 bp, Pseudomonas aeruginosa PAO1
  CDS (1)..(987): transl_table=11
atgttcagtcagtgggtgttcctgtccgtccttgctcttgccgtaccctcgttcgcctgggcggaggatgcggtgtccgacctcgccagggagcagtccaaggccgagcagggcgacaagcgcggcgatgaactgttcgccgaattcacccgcctccgccaggccgccgagacgggggagccgcaggctctgttcgatttcggcgcctacttctaccagcaacagaactacgccagcgcgcgcgaatggtggggcaaggcggccgctgcggggatggtccgcgcgcagatccaactggccatgctctatcgcgatggtgacggcgggccacaggacaagaccgaggcggcacgctggttccggaaggccgcggagcagggggatgccgccgcccagaatgaaatgggcgttctctactggagaggcgaaggggtcgaccaggaccgggtgaaggccgggacctggttcgaacgcgcggcggccagcggtagcgaagacgccgaaaccaatctgggatggttctacctggacgactcgcaaggcgtctattccgccacttcagacgaggaagccgccctgctggaccgttatgccggcagccgggaaaaggccttccagtggttctgcaaggctgcgacccagggagatgcccgtgcccagttcaaggtgggcgaggcctactggaacggttccggtgccgggatgaacaagctgcaagcgcggctctggctggaaaaggccgcacagcagcaggatgcggatgccatcgcctggttggagagcgccgcgaacgcagcctggtacacccgcctggaaaactggattcacgctgcgctggatggagagctgtccggcgtcgccgactgctccggtgccgccgatcgccggcactccggccgaggcatggagggcgccccgtctgacccggaggcggtggaagccagtgcggaggatgcgcagcaggcggttgaagcggcgagccagtga

SEQ ID NO: 52884 - protein, 328 aa, Pseudomonas aeruginosa PAO1
MFSQWVFLSVLALAVPSFAWAEDAVSDLAREQSKAEQGDKRGDELFAEFTRLRQAAETGEPQALFDFGAYFYQQQNYASAREWWGKAAAAGMVRAQIQLAMLYRDGDGGPQDKTEAARWFRKAAEQGDAAAQNEMGVLYWRGEGVDQDRVKAGTWFERAAASGSEDAETNLGWFYLDDSQGVYSATSDEEAALLDRYAGSREKAFQWFCKAATQGDARAQFKVGEAYWNGSGAGMNKLQARLWLEKAAQQQDADAIAWLESAANAAWYTRLENWIHAALDGELSGVADCSGAADRRHSGRGMEGAPSDPEAVEASAEDAQQAVEAASQ

SEQ ID NO: 52885 - DNA, 816 bp, Pseudomonas aeruginosa PAO1
  CDS (1)..(816): transl_table=11
atgcgccacctgctgcttcgtcacgacgcgctggacgccgaaggtttcgccgcacaactggccggtaccccgggcgaggttgcccaggccatccttggcgctgcgcgcgagggcctgacggaagcccaggccctgctcggacagatccttctggacggccaaggcatccagcgcgacccgaccctggcgcggacctggttcacgatcgccgccgaacgcggccacgcaatggcgcgcaatatgctcgctcgctgtcttgaacatggctggggcggcccggcggatccagccgcggcagccgtccactatcggatcgccgcccaggccggccttgactgggcccgctacaacctggccaatctccacgccaccggccgcggggtgccccaggaccagccgcgcgcctatgcgctgtatcggcaagcggccgagcagggccacgcgaaatcgatgaacctggtggggcgctaccacgaagaaggcctggtggtcgctcgcgacctggcgcaagctgcgcactggtatcgacgttccgccgagggcggcgattttcgcggccagttcagccacgccgcgatgctcagcgcctcgggccgccatgccgaagccgaaacctggctccggcgtgccctcgaaggcggcaacctgaacttcctgcgcagtgcccgccatggcctggagcagtcggcccacccgccattccgcagcctggcgctggcctactaccgacgcgcggcgcagttgggcgacgacatcgatcgagaggctctggaacaggcgctcgaacgtcatgggcacgcgcaactgcccgtctga

SEQ ID NO: 52886 - protein, 271 aa, Pseudomonas aeruginosa PAO1
MRHLLLRHDALDAEGFAAQLAGTPGEVAQAILGAAREGLTEAQALLGQILLDGQGIQRDPTLARTWFTIAAERGHAMARNMLARCLEHGWGGPADPAAAAVHYRIAAQAGLDWARYNLANLHATGRGVPQDQPRAYALYRQAAEQGHAKSMNLVGRYHEEGLVVARDLAQAAHWYRRSAEGGDFRGQFSHAAMLSASGRHAEAETWLRRALEGGNLNFLRSARHGLEQSAHPPFRSLALAYYRRAAQLGDDIDREALEQALERHGHAQLPV

SEQ ID NO: 52887 - DNA, 597 bp, Neisseria meningitidis MC58
  CDS (1)..(597): transl_table=11
atgaaacagacagtcaaatggcttgccgccgccctgattgccttgggcttgaaccgagcggtgtgggcggatgacgtatcggattttcgggaaaacttgcaggcggcagcacagggaaatgcagcagcccaatacaatttgggcgcaatgtattacaaaggacgcggcgtgcgccgggatgatgctgaagcggtcagatggtatcggcaggcggcggaacaggggttagcccaagcccaatacaatttgggctggatgtatgccaacgggcgcggcgtgcgccaagatgataccgaagcggtcagatggtatcggcaggcggcagcgcagggggttgtccaagcccaatacaatttgggcgtgatatatgccgaaggacgtggagtgcgccaagacgatgtcgaagcggtcagatggtttcggcaggcggcagcgcagggggtagcccaagcccaaaacaatttgggcgtgatgtatgccgaaagacgcggcgtgcgccaagaccgcgcccttgcacaagaatggtttggcaaggcttgtcaaaacggagaccaagacggctgcgacaatgaccaacgcctgaaggcgggttattga

SEQ ID NO: 52888 - protein, 198 aa, Neisseria meningitidis MC58
MKQTVKWLAAALIALGLNRAVWADDVSDFRENLQAAAQGNAAAQYNLGAMYYKGRGVRRDDAEAVRWYRQAAEQGLAQAQYNLGWMYANGRGVRQDDTEAVRWYRQAAAQGVVQAQYNLGVIYAEGRGVRQDDVEAVRWFRQAAAQGVAQAQNNLGVMYAERRGVRQDRALAQEWFGKACQNGDQDGCDNDQRLKAGY

SEQ ID NO: 52889 - DNA, 1404 bp, Neisseria meningitidis MC58
  CDS (1)..(1404): transl_table=11
atgaacaatcccgacttaccctatcggcaggccttagaatgcctgtctcaaaaacaatataactttaccgaagtccgccgactgctgacagaagcgttctcggcaggtcatcccgccgccgcattcgagttggcaaaacacctgatggacgcggacagcccctaccaagaccgcgaacaaggtatggaaatgctccgcatcgccgctgaacagggacatccctacgcgcgttacaatctggcatatatccaagaattggaaggcgcacccccggaaaccctgataccgctttacagaccgttggcagaagaaggactgcccgaagcgcaagtccgcctgatgtaccttctgtacgcgtcccgacattttgaagaagccttggaatgggcaaaaacaagcgcaaaaaacaacaacccccacgggcaatacctgcttgcccaatactgccggtacggcacaccgccggattttgaaacggcgcacctgctctaccgaaaatcggcggcacaaggcttgccggaggcacattggcagctcgggctgcaatatcgtttcgggcaagggacgaaagtcgacacggcacaggccgtcaatcatttgcgcgccgccgcacaacaaggatacattcctgcctacaccccacttgccgagctcatcctacctacggctcctgatgaagccgttcactggtttcaacaggccgcacaggaaaatgaccccgatgcccatgccgcacttgccgacatctacctgcaaggcaagcatctggaaagaaaccacaaacttgccctgcatcatgccgaagcagccgccgccgaacgccatcccgaaggtttgcggatactgggcgacatctgccgctacggtttgggcatagcccccgatacggaaaaagcccggcattattatcggcaggcagccgaagccggcagcctttccgcctatcagaaactcatatccgacagcgcgttaaaccatcctgaccaatacggcggcattaaagattccgccatcaggcggcaaagggcagaacggctttatcaaaaagcccaagccctgcattacggattacaatgcgcgcccgaatacgcagccgcgctcaaactctacacagaagccgcagaactcggacacagcaaagcccaaaccaatctgggcagcatgtattacttcggacagggtatgaccgccgactacaatgaagcacgcaaatggtttgaaaaagccgccgcgaaaaaagacagtatggcgttctacaacctcgcctgcatccattacagcggacacggcgtcgagccggacaaagaaaaagcctgccgctacctgcaagaagccataaacaacggatacgggcaaaaaagcgtcctgcaagaactgctgcaacaatggcaaaatgccgtctga

SEQ ID NO: 52890 - protein, 467 aa, Neisseria meningitidis MC58
MNNPDLPYRQALECLSQKQYNFTEVRRLLTEAFSAGHPAAAFELAKHLMDADSPYQDREQGMEMLRIAAEQGHPYARYNLAYIQELEGAPPETLIPLYRPLAEEGLPEAQVRLMYLLYASRHFEEALEWAKTSAKNNNPHGQYLLAQYCRYGTPPDFETAHLLYRKSAAQGLPEAHWQLGLQYRFGQGTKVDTAQAVNHLRAAAQQGYIPAYTPLAELILPTAPDEAVHWFQQAAQENDPDAHAALADIYLQGKHLERNHKLALHHAEAAAAERHPEGLRILGDICRYGLGIAPDTEKARHYYRQAAEAGSLSAYQKLISDSALNHPDQYGGIKDSAIRRQRAERLYQKAQALHYGLQCAPEYAAALKLYTEAAELGHSKAQTNLGSMYYFGQGMTADYNEARKWFEKAAAKKDSMAFYNLACIHYSGHGVEPDKEKACRYLQEAINNGYGQKSVLQELLQQWQNAV

SEQ ID NO: 52891 - DNA, 1407 bp, Neisseria meningitidis Z2491
  CDS (1)..(1407): transl_table=11
atgaccgccgctcctgatatcctctaccggcaagccgccgcccttttggaacaatccaataccgcccaagccctgcccctgttgcaacaggcggcagagcaaggttatgcggaagctgctttcgtattgggcaaccatctgctgcaaaacggccaaccggagcaggcactttcatggttggaagccgccgcggcccaacgccatcccaaagcactcttctccctgctgcaacaacgcgaacacaacggcaccccgaccggacagcttctcaacgactatgcctggctgggtgagcaggggcactcagaagcccaattaatcctcatgcgttaccacgcgcaacgcaacgatccacaatcgctctactgggcggaacttgctgccgcccgatatgccgcacctgcgtattaccatctggcacgccatcatcaacgccaaggcgacgttgaaacagccatcgaacaatacgaaaaagcggcagcactcggcgtaactgccgcctgctggcaacttggtcaaatctacttctacggtacaggtgtcagccccaaccacgcacaagccgaacactatctcgaaccagccgcacaagccggccacatcgccgcacaaacgctgctggctgaccttcttgccgcccaacgcaaacctgaagccttggaatggtatcgtcgtgccgccgataaggaacaagcggaagcacagtctaagctggcccaatacgccctgaccggcgaactttccgaacgcgatccgttccaagcggcacgatatgccaaagccgctgccgagaaagaccatcctgaagccctgaaaatcatgggcgacctctaccgctacggcctcggcatcaaagctgacaaccatatcgcgcacgattactaccaccgtgctgccgcgctgggttctgccgccgcagcacaaaaactcatcagcgacgccgcgctgtaccatccgcaacaatacgaacaaatcaaaactgccgccctgcaacagcaacaaaccgaaaccatctaccgtttggcggaagcacaagcctgcgccatcggccgtcccgccgactacaatgccgcgcgaaaaaattacatggaagctgccgggttccaccataaaaacgcagcggcagccttaggccgcatctaccattacggcctcggtacggcgcaagatcctcgggcggctgcacactggtacgccattgctgccgaacaaaaccacccttccgcccaataccacctcgcctgtttttactatcacgggcaaggtgtcggctgtcatgttccgaccgcctgctactggctgcaggccgccatcggcaacggccacacttcggccgaatcattaatatccctattagaacaatggcgacgcgaagcacaccatgccatcggacaaaaggccgtctga

SEQ ID NO: 52892 - protein, 468 aa, Neisseria meningitidis Z2491
MTAAPDILYRQAAALLEQSNTAQALPLLQQAAEQGYAEAAFVLGNHLLQNGQPEQALSWLEAAAAQRHPKALFSLLQQREHNGTPTGQLLNDYAWLGEQGHSEAQLILMRYHAQRNDPQSLYWAELAAARYAAPAYYHLARHHQRQGDVETAIEQYEKAAALGVTAACWQLGQIYFYGTGVSPNHAQAEHYLEPAAQAGHIAAQTLLADLLAAQRKPEALEWYRRAADKEQAEAQSKLAQYALTGELSERDPFQAARYAKAAAEKDHPEALKIMGDLYRYGLGIKADNHIAHDYYHRAAALGSAAAAQKLISDAALYHPQQYEQIKTAALQQQQTETIYRLAEAQACAIGRPADYNAARKNYMEAAGFHHKNAAAALGRIYHYGLGTAQDPRAAAHWYAIAAEQNHPSAQYHLACFYYHGQGVGCHVPTACYWLQAAIGNGHTSAESLISLLEQWRREAHHAIGQKAV

SEQ ID NO: 52893 - DNA, 162 bp, Escherichia coli O157:H7 EDL933
  CDS (1)..(162): transl_table=11
atgataatgattttcacgtcaagttgctgcgataatttatcaatagatgagattatcgaacgtgctgaaaaaggcgattgcgaggctcaatatattgttgggttttattataatcgcgatagcgcaattgactctccggacgacgaaaaggccttttactag

SEQ ID NO: 52894 - protein, 53 aa, Escherichia coli O157:H7 EDL933
MIMIFTSSCCDNLSIDEIIERAEKGDCEAQYIVGFYYNRDSAIDSPDDEKAFY

SEQ ID NO: 52895 - DNA, 588 bp, Escherichia coli O157:H7
  CDS (1)..(588): transl_table=11
atgtcttatgcgcaaaataatcttgggtggatgtacagaaatggcaacggagccgcacaagactatacgctggcatttttctggtacaaacaagctgcattacaaggccatagtgacgcgcaaaacaatctggccgatctttatgaagacggaaaaggcgttgctcaaaacgagacactcgccgcattctggtatttgaaaagcgcacagcagggtaatcggcatgctcagtttcaaattgcatgggattataacgctggcgaaggggtggaccaggactataagcaagcgatgtactggtatctgaaggctgccgctcaggggagcgtcggcgcttacgtcaacatcggttatatgtataaacacggacaaggcgttgagaaagattatcaggctgcctttgaatggtttacgaaagccgctgaatgcaatgacgccactgcctggtataacctggccattatgtatcactacggagaaggaagacctgtcgatctccgacaggctctcgacctgtatcgtaaagttcagtcatccggaaccagagatgtcagtcaggaaattcgtgagactgaagatttactgtag

SEQ ID NO: 52896 - protein, 195 aa, Escherichia coli O157:H7
MSYAQNNLGWMYRNGNGAAQDYTLAFFWYKQAALQGHSDAQNNLADLYEDGKGVAQNETLAAFWYLKSAQQGNRHAQFQIAWDYNAGEGVDQDYKQAMYWYLKAAAQGSVGAYVNIGYMYKHGQGVEKDYQAAFEWFTKAAECNDATAWYNLAIMYHYGEGRPVDLRQALDLYRKVQSSGTRDVSQEIRETEDLL

SEQ ID NO: 52897 - DNA, 3645 bp, Agrobacterium tumefaciens str. C58
  CDS (1)..(3645): transl_table=11
atgagccagaagtttccgcgtgagccgcgcgctgcgagctctcagccggaaccgaaaaacgaggcctatgctgcgccgcgcgagccccgcgccgccgtcacaccgccgcagctcgatcccgtcaacgaaatccggcagcgccagcgtcttctcgaagcgagcttccagcgtccgcaggaacccgttgcccgcccggaacggacgattacccggccgctcgcaccggaatatggttcaagggacacgcagcaaacggccgctcccgcgccgcgtgcccgcgccattccgccctatcaggaacagcagcgcaatgatgcagccctgcaggagatcgcgcaggcgctggtcaaccttcgccatgagctgaaacacgatattgccgagggcgttgcccgcgaagcgcaggggctgcgtgccgaaatccgcaatattcgcgcggtggcggaagaccagcaattcatcggcgatctgcgcgacgacatcgcacgtcttgccggcagcatcgaccagctcggcaatctggcatctcctgacgcctacgggttgcgtaacgaattcgaagacctgcgcctgacgatcgaccagcttgcgcgcgaagacagcgtgcaccggatcgaaagccgctggaacaatgtggaggacacgctgcgcggtttcgatgcggcctcgctgcaggatgagatcgtttcactcgcctatcgtctcgatgacatcaagacgcaacttggcggtatgagcaacaatcccgccgtgcgcgtgcttgaggaaaagctcatcaccattgccagcgccgtggagcagcttggcaagcacatgcagcccaacgaggccgcctttaccgaacagttttccggtctcgaccagcggctggacgaaattagccgcgccattgccgcaaccggcacccgcgccaacgctcaggccacggacaacgcgctggcgcagcggctggaaacccggctgaacggccttgccgaacagctcggcgacatcaaccgcctcgccgccatcaagccggaaccggcgcccgaccttaccgcccgcctcgaagcgctctccggcaagatcgatgagctgagcaccgcgcgcgacgccgcgcaactgcatgaccggctggaccagctttccttgctgctggaacggtcgcagcgccccacgcagcaggcggaactgacatctttcctcagcgatatctcccgcaagatcgatgcgctggatcacggcgctatcaatgacggcctcgccgaacggctcgacctgctctcccggcggatagaagatctcgattatcgctacagccagccgcaaccggcttcgggtctcagcgacagcgctttttcccgtctggaagaacggctcggcacgatcgccgcccgcctggacgagaccgcccatgccgctcctgccgatagccgcgctctggcaagcctcgaaaaccagatcgcccatctgtcgacgctgatcagccagccggtgcaggtgcaggcggccggcatatctccggaactcgacgtccgcatggcggcgatcgaagactacatggcgtcgaacgacgaatatatcatcgaagcggcgcggcaggcagccgaggccgttctcgacgcctatacccgcaacaatctctcggccggcgcaaacctcgccgacatgacgatgctgaccgatctcgccaccgatctgcgcagtctcgaagccttgagccgcaacaccgaagagcgcacgcaccgcaccttcgaggcgctgcacgagacgctggtgcagattgccggccgtctggacaatctcgacagcgcgcccgcctatcgccaagacgctccccgtaacgtcgcgcagcacatggttgccgccagccgcgaagacgcggccatgccggccgccgttttcccggcagacggctatatcgccgaagagcaggccattctcgatgatgtcagcgaaaacgatgcgaccgcgatcgtaccgccggctgccgccaagcccgcaaaagcggaacggaagagcctgctcgccggcctgacgaagcgtttcaagacaagcacggcgaagcccgcaaaggccaaggaagaacccgtatcggcctcctccgcccgcacgcaggttgagcccgccccgtcgctcgatccgatcgacgttctgcctgctggccaggagaatgaacttctggaaccgggctcgggtgcgcccgatatcaagaaaatcctcgaacgtgtgcgtgccagccaggtcgcaggcgccggcaaggccgcggatgcggaaggacggacggatttcatcgccgccgcccgccgcgccgcccaggccgccgccatggagacatcgccggagaagctggataccggcaagaagagccgcaaggccgacacgtcggcactttcgcgttatcgtcggccgctgctgctcggcatcggcgccattcttctggcgatgatggccatgccgctcgtcaagacgctgatcggcggcgctgaagcgccggcaccggtcatagagcagaagacggaccagggcccggtctccgcgcttcccgaaaccgacgataaggccgtgaccattccctccggtcttgccatcgatccggaacaggctgcctcggcagacagcatcgaaaacgccgcaccggcgcagaacatcattgacaatcgcaccatcggcggcgcgccgttgccggacgagccgccggttgccgatgttcccgccgtggaccccgcaaagtccgacaccgtcgcgcagaacgaaggaccgaaaccgactgaggtcgccaccacgactattcctgcgcaggacaccattgtggttccggccggcatcgagcccgcatcgcttgccgaagcggccgccaagggcgacacgcaggcgctgttcgagattgcggcacgctacaccgacggccgcggcgtaaccgccgaccgtgcggaagcagcaaagtggtacaagatggcggccgatcgtggccttgcccccgcgcaatatcgtctcgccaatctttacgagaaggcgaatggcgtcgagcgcaatcttgtcgaagcgaagcgctattacacgctggctgccgaacagggtaatgccggcgccatgcacaatctcgcagtcctgctcgcctcagacgcggccggccagccggatttcgccacctctgcacaatggttcatcaaggcgtccgaactcggcgttcgtgacagccagttcaacctcgccattctctacgcccgtggcagcggcgtgaagcaggatatcgaggaatcctacaagtggttcgccattgccgccaaggatggcgatgctgatgccgcccagaagcgcgacgaggttgcaggcgcgatgagcccgcagcagctgcagagcgccaaggccaaggtcgatgcttggaaggtgaagccgctctcggacgacgccaacagcgtcaacccgcctgaggaatgggccggcaaagagggcgtgaagaccgcctccgtggacatggaaaaggcgatccgcaacattcaggcgatcctgaacaagaacggtttcgatgccggccagccggatggcaagcttggcaagaacacggtgacggccatcagggacttccagaaatccgtgggccagacgccggacgggcgtatcaccaacgacttggtgaccgcgctgctcgcccgcaacaaataa

SEQ ID NO: 52898 - protein, 1214 aa, Agrobacterium tumefaciens str. C58
MSQKFPREPRAASSQPEPKNEAYAAPREPRAAVTPPQLDPVNEIRQRQRLLEASFQRPQEPVARPERTITRPLAPEYGSRDTQQTAAPAPRARAIPPYQEQQRNDAALQEIAQALVNLRHELKHDIAEGVAREAQGLRAEIRNIRAVAEDQQFIGDLRDDIARLAGSIDQLGNLASPDAYGLRNEFEDLRLTIDQLAREDSVHRIESRWNNVEDTLRGFDAASLQDEIVSLAYRLDDIKTQLGGMSNNPAVRVLEEKLITIASAVEQLGKHMQPNEAAFTEQFSGLDQRLDEISRAIAATGTRANAQATDNALAQRLETRLNGLAEQLGDINRLAAIKPEPAPDLTARLEALSGKIDELSTARDAAQLHDRLDQLSLLLERSQRPTQQAELTSFLSDISRKIDALDHGAINDGLAERLDLLSRRIEDLDYRYSQPQPASGLSDSAFSRLEERLGTIAARLDETAHAAPADSRALASLENQIAHLSTLISQPVQVQAAGISPELDVRMAAIEDYMASNDEYIIEAARQAAEAVLDAYTRNNLSAGANLADMTMLTDLATDLRSLEALSRNTEERTHRTFEALHETLVQIAGRLDNLDSAPAYRQDAPRNVAQHMVAASREDAAMPAAVFPADGYIAEEQAILDDVSENDATAIVPPAAAKPAKAERKSLLAGLTKRFKTSTAKPAKAKEEPVSASSARTQVEPAPSLDPIDVLPAGQENELLEPGSGAPDIKKILERVRASQVAGAGKAADAEGRTDFIAAARRAAQAAAMETSPEKLDTGKKSRKADTSALSRYRRPLLLGIGAILLAMMAMPLVKTLIGGAEAPAPVIEQKTDQGPVSALPETDDKAVTIPSGLAIDPEQAASADSIENAAPAQNIIDNRTIGGAPLPDEPPVADVPAVDPAKSDTVAQNEGPKPTEVATTTIPAQDTIVVPAGIEPASLAEAAAKGDTQALFEIAARYTDGRGVTADRAEAAKWYKMAADRGLAPAQYRLANLYEKANGVERNLVEAKRYYTLAAEQGNAGAMHNLAVLLASDAAGQPDFATSAQWFIKASELGVRDSQFNLAILYARGSGVKQDIEESYKWFAIAAKDGDADAAQKRDEVAGAMSPQQLQSAKAKVDAWKVKPLSDDANSVNPPEEWAGKEGVKTASVDMEKAIRNIQAILNKNGFDAGQPDGKLGKNTVTAIRDFQKSVGQTPDGRITNDLVTALLARNK

SEQ ID NO: 52899 - DNA, 993 bp, Caulobacter crescentus CB15
  CDS (1)..(993): transl_table=11
gtgacgcttcagcggtgtgaggcattgatgcgtttgggttggttgatcgcgctgatcgtcgcgggcctttggcccgatgactcggcgcgcgcccaggactggcgctcccagaccgactgcgctgctgtcgaacgggcggcggaggggggcgacacgtccttctatgtcgatctggcgatctgtcacattcggggcgaggggcgcgagccggatgtcgctaaggggctggtctggcttcggaaggctgtggcgctcggcgataccgacgcgatggtcgagctcgggaatctctacctcttcggcgcggaagggctggcggttgacgcccctggcgccgtgaagctctacgcgcgggcggcgcgtctgggcgatccgaacgccatgttcaacatggccgtgatgcaccggggcggatacggattgcccgagaacccgcgtctggcccgcgcctggtatctgcggtcgggtgaggccggattggccgctggcgcgttcggcgcaggcgtcgccctgttggaagggtatggcgggcgctcggacgccagacggggcgttctttggctgcgccgcgctatcgagatgggctcggccgaggccatgaacgaactaggtcgacttcacgccgaggggttgggtgtgtcctcggactccgacaaggcgctctacttctaccgcgccgcggcgcggaacgagctgccggacgcgatgtatcgattgggcgcggcccactacaatgggcggctgacggacagaaactatgttgtggcgatgcgctggttccagttggcggcggaccggggcgactacgacgcctggtttgccctgggcgtgatgtgcgagacgggtcgcggcgtgaagtctgatcgggagctggcgcttcagatgtatcgacgagcggccgacagcgaccagcccgccgtccgcgacaaggcgcaaagagcgatcgaccggctgctcggcttggccgaggatgacgaggacccggtgggttag

SEQ ID NO: 52900 - protein, 330 aa, Caulobacter crescentus CB15
MTLQRCEALMRLGWLIALIVAGLWPDDSARAQDWRSQTDCAAVERAAEGGDTSFYVDLAICHIRGEGREPDVAKGLVWLRKAVALGDTDAMVELGNLYLFGAEGLAVDAPGAVKLYARAARLGDPNAMFNMAVMHRGGYGLPENPRLARAWYLRSGEAGLAAGAFGAGVALLEGYGGRSDARRGVLWLRRAIEMGSAEAMNELGRLHAEGLGVSSDSDKALYFYRAAARNELPDAMYRLGAAHYNGRLTDRNYVVAMRWFQLAADRGDYDAWFALGVMCETGRGVKSDRELALQMYRRAADSDQPAVRDKAQRAIDRLLGLAEDDEDPVG

SEQ ID NO: 52901 - DNA, 735 bp, Sinorhizobium meliloti 1021
  CDS (1)..(735): transl_table=11
atggccgaggccctggcacgcgcccaagccggcgactacgggtcggcgctgcgcatctgggagcctctggcgcgtgccggcgtcgcgcgggcgcagaacaatatcggcgcctgcttcgcagaagggctcggagtgccggagaatcgagaactggcgtgcaaatggctgcgccttgcggccgaagccggggatcccgtcgggcaacgcaactatgccgccctgcacatgcaagggctcgccggcaccgatgccgactacggcatcgcagccgaatattatcgacgcgccgctgaaaagggcgacgcgccggcccaggacatgttgagctggctgctgctggaaggcgagatcatgacggccgacccgctcgaggcgcgacgctgggcggaatgtgccgccgaggccggcatcgcgtcctcgatgacgcggctcggcatgctccaccacaacgcactcggtgtcgaacgcgatgcgcaaaaggccgtctactggtggctgaaggctgcagagaggggcgacgcagacgcccaggccatgctgggagcggcctgccatatgggggcgggcacgatacgcaatggtgtgactgccttggtctggctgatccgggcgacggaaggcggcagcaccctggcaaagcccttcatgggaccggttcgtgacagcctttcgccggcggagatccaggaagcggaacgtcgggcgcaagagccgctttcaaggcgggcgccatga

SEQ ID NO: 52902 - protein, 244 aa, Sinorhizobium meliloti 1021
MAEALARAQAGDYGSALRIWEPLARAGVARAQNNIGACFAEGLGVPENRELACKWLRLAAEAGDPVGQRNYAALHMQGLAGTDADYGIAAEYYRRAAEKGDAPAQDMLSWLLLEGEIMTADPLEARRWAECAAEAGIASSMTRLGMLHHNALGVERDAQKAVYWWLKAAERGDADAQAMLGAACHMGAGTIRNGVTALVWLIRATEGGSTLAKPFMGPVRDSLSPAEIQEAERRAQEPLSRRAP

SEQ ID NO: 52903 - DNA, 996 bp, Salmonella typhimurium LT2
  CDS (1)..(996): transl_table=11
atgaatcattccataaccagtcatccctgcgacaacgtatctttagcacaattaaccgaactggcgcagtcaggaaatagtgaagctcaatatatattaggccgtttatataatgacgaacgtatagatggcagcgaagaggataagctctctttttattggttgcagcaggcagctgaacaaggacactgcgaggcacaatattggctcggcttacgatacaaagacacgcctaccgacatgaaagataatacgctggctttattctggtcagaaaaagccgcacagcaaggacaccgccacgctttcaacacattaggctgggttcaggaaggagaaaccgggatggcgccagattatgcccaggccgttgcctggtatcgcaaaggagcagaacagagccacaaccttgcgcaatataatctcgggagaatgtatcattcaggaactggcgtagagcaaaatgatacacaggcactctactggtttaaacaggcagcattacaaggccattgcgccagccaggaaagactggcgtatatgtatggcaatgggaaaggatgtcggaaaaatttatcccttgccgccctttggtacaagaagagcgcgctacaagagagcagctactcgcaatatcagatgggctattgttattacatcggaaaaggtatcaaacaagattaccagcaggcaatatactggtttcgaaaagcggcagaccagggtgacgatgatgcctataacagtatcggctggatgtacaaatgcggtcatggcgtcgagcaaaattattcgctagcactggaatggttccacaaatcagcagaatgtaacaattcatcgggctggtacaacctcggatgcatgtacagagatggacacggtaccgcacaagacctacaacaagcgctctactggttcaaaaaagcacagcccacgggcaaatggaacgtcgatgaagagatccgcaaactggaagcccaactgcacgcttaa

SEQ ID NO: 52904 - protein, 331 aa, Salmonella typhimurium LT2
MNHSITSHPCDNVSLAQLTELAQSGNSEAQYILGRLYNDERIDGSEEDKLSFYWLQQAAEQGHCEAQYWLGLRYKDTPTDMKDNTLALFWSEKAAQQGHRHAFNTLGWVQEGETGMAPDYAQAVAWYRKGAEQSHNLAQYNLGRMYHSGTGVEQNDTQALYWFKQAALQGHCASQERLAYMYGNGKGCRKNLSLAALWYKKSALQESSYSQYQMGYCYYIGKGIKQDYQQAIYWFRKAADQGDDDAYNSIGWMYKCGHGVEQNYSLALEWFHKSAECNNSSGWYNLGCMYRDGHGTAQDLQQALYWFKKAQPTGKWNVDEEIRKLEAQLHA

SEQ ID NO: 52905 - DNA, 1530 bp, Salmonella typhimurium LT2
  CDS (1)..(1530): transl_table=11
atgcgtttttcatcaattttcaaaataataatattaaatatatttatttcaaaaatggctcacgctgctgtctgcgaggagcgctatcccgccgactcagaagaatgccagtacgttcaggaattagagcaaaaagcggaacaaggagatgaaagcgcgcagttctcgcttggaagctggtatgcggaggggcgatacgttaagcctgattataaactagccataaaatggctggagaaagcgggtaaacaaggttctgatttttcctatttcatccttggctatcattacaactatggtgaaaattttccacttagtcgacaaaaagcgctggagtggtatcgcaaggcggcagagctaggggatagtagtacgcaagaaatcctcggtgacgcctatatgtatggcgatgggtttccccaaaatacccagctagcgctggagtggtatcgaaaagccgcctctccaaccaatgatgcgggcgttgtccgcggacagggttcagcttcgtcagcacaatttaagcttggagtaatgtacgcccacggtcagggcgttcctcaggattatcagcaaacggcgatcttgatgcgtaaagcggcggaaaatatgtactaccccgcgcaactttatctcggcgttgcctatttttatggtgaaggcgtgcctcaggattatcgtcaggcagtttactggcttaatgaaggtataccaggcagctatacgccaggccacattccgctgaatgcgctctatgataaagcgcatcccgctgaccgggttcactctcagacgtggtatcgaaaaacagcgcaacgcgtgatggcaaaggtacagtacaattttggcgtatggtattacaacggttatcacttattgaaagatcacaacctggcgctggagtggtatcgcagagccgcagcgcaaggattggccgaggcgcaggatgcgatcggcgtgatgtttatgcagggtgagggcgtttctcaggactaccaacaggcgctggcgtggtatcgcaaagccgctcgccaggggctgcctgctgcgcaaacgcatctgggcatcatgtctgcatttggtcgcggcgtcgcgcaaagcgacagacaggctatcgcatggtatcgaaaagcagcaaaacaggattttgcgaaagcgcaatatcagcttggcgtagcatatagcacgggaagaggcgtgcctgaaaatagccggaatgcgctgaagtggtacctcaaagcggcagagcaggggtttactccggcacaatcagcgcttggggaaatttatgctcatgggcgccagggtgtgcctaaagataataagcaggcctatatttggtattacatggcaagtatgtatacggaaaaatctaaggatgattgttcagcgctcattgccgaaagaaaccgactcaagggaacgctcaccccagatcaacttagcgagacatatgccgcctttaatctcatctggcgaaaaattgatcagtcaaaggaggcgaaaaagattgccaggaagaagtattga

SEQ ID NO: 52906 - protein, 509 aa, Salmonella typhimurium LT2
MRFSSIFKIIILNIFISKMAHAAVCEERYPADSEECQYVQELEQKAEQGDESAQFSLGSWYAEGRYVKPDYKLAIKWLEKAGKQGSDFSYFILGYHYNYGENFPLSRQKALEWYRKAAELGDSSTQEILGDAYMYGDGFPQNTQLALEWYRKAASPTNDAGVVRGQGSASSAQFKLGVMYAHGQGVPQDYQQTAILMRKAAENMYYPAQLYLGVAYFYGEGVPQDYRQAVYWLNEGIPGSYTPGHIPLNALYDKAHPADRVHSQTWYRKTAQRVMAKVQYNFGVWYYNGYHLLKDHNLALEWYRRAAAQGLAEAQDAIGVMFMQGEGVSQDYQQALAWYRKAARQGLPAAQTHLGIMSAFGRGVAQSDRQAIAWYRKAAKQDFAKAQYQLGVAYSTGRGVPENSRNALKWYLKAAEQGFTPAQSALGEIYAHGRQGVPKDNKQAYIWYYMASMYTEKSKDDCSALIAERNRLKGTLTPDQLSETYAAFNLIWRKIDQSKEAKKIARKKY

SEQ ID NO: 52907 - DNA, 1695 bp, Salmonella typhimurium LT2
  CDS (1)..(1695): transl_table=11
atgcccctcccctatgacaaagagaaaaaattatggaaagtcaccggctggtatctggaatcctcagaagaaacaggggaggtgatgcagagtaaacagatagcctttgaaggctataccaacgaagaaaacttcgctaaccgacaacgtgtttctgtatttaaatctttctatgaaagcggcaatctcaaaagtatttatcattataatgcgcaaaataagcgtgacggaaaagctgaaacttactttgatgaaaaagacaaaatagcggaaacgctgacgtttaaagatggtcaacccgaaggggaatacatcgtataccatgaaaacggagccgttgaaagtaaacgttactttgcccaaggtaaaattaaagatggcgaatgcccacatttttatgataacggcgttttaaaacaaaaacacagctatttaaatcagaaactggaaggcccggcatttgaatatttccctgatgggaaaataaaggggaaatattcatacagtaaaggcaccattgtcggcaccagtacggaatattattctaccggtaaaattcgtggtgtttaccacagaaataaccaaggtgaaaacgacggaacgttcgaacaatacagtgaagagggcaaactcctttctaaagcgacctataaaaatggcaaacagctttctgctcagagctggtatgaaaatgggcatcccaaagaagaatcctcttttgatagtgaaggccgtaaacatggtgcggtcaaagaatggttcagcaacggaaagcctgcctcatccaaaatgtataaacatgatgtgttagacggggatttcgaaaagtggtacgaaaatggtcaccgcgaatcagtctatccctataaaaacggtatgctaaatggggacgctaagcactggaatgaacagggcaaactcacctataccaccgaatataaagacgataaaaagcagggagccgatcgccgctggagcgaacgtaccggtaaacttgttgaagaggttatgtttgctaatgatgaaagaaacggcctgaaaagagagtttaacgatcgtacgggtaaggtcttaagtgcgctgccctatgtcgatggcgacaaggaaggtacagaagaagcctatgatgaagacggcataaaatacatccgttgttaccacaacgatgaagagctttcagagctatatgcgccgactgacgtcaccaataaggcaaagcagggtgacagcactgcgcaatatcatttaggtaagtatgagtttgaatgcacaaactacgatgcggcgatgaaatggttaactcagtccgcagagcaaaatcatcccggcgcgcttctctttttggcctatgcgtacaacgacggtgatggcgtagcgcaagacagtaaaaaatatctctcctatttattcaaagcggcagagcttggcgaaagtgatgcgcagttagaagtgggatatttaaatcttatcggcgaaggaatgccgaaaaacctgccggaagcctataagtggattaaaaaatccgctgaccagggaaatgctcaggcgcactataaccttggactcatgtacaggaatggtgatggcgttgagaaagacctcaacaaagccaaacttcatcttacagcggcggtaaaaggcggcgtcaaacctgcactggcagccttaaaggaattaacgcctcaaactaagtaa

SEQ ID NO: 52908 - protein, 564 aa, Salmonella typhimurium LT2
MPLPYDKEKKLWKVTGWYLESSEETGEVMQSKQIAFEGYTNEENFANRQRVSVFKSFYESGNLKSIYHYNAQNKRDGKAETYFDEKDKIAETLTFKDGQPEGEYIVYHENGAVESKRYFAQGKIKDGECPHFYDNGVLKQKHSYLNQKLEGPAFEYFPDGKIKGKYSYSKGTIVGTSTEYYSTGKIRGVYHRNNQGENDGTFEQYSEEGKLLSKATYKNGKQLSAQSWYENGHPKEESSFDSEGRKHGAVKEWFSNGKPASSKMYKHDVLDGDFEKWYENGHRESVYPYKNGMLNGDAKHWNEQGKLTYTTEYKDDKKQGADRRWSERTGKLVEEVMFANDERNGLKREFNDRTGKVLSALPYVDGDKEGTEEAYDEDGIKYIRCYHNDEELSELYAPTDVTNKAKQGDSTAQYHLGKYEFECTNYDAAMKWLTQSAEQNHPGALLFLAYAYNDGDGVAQDSKKYLSYLFKAAELGESDAQLEVGYLNLIGEGMPKNLPEAYKWIKKSADQGNAQAHYNLGLMYRNGDGVEKDLNKAKLHLTAAVKGGVKPALAALKELTPQTK

SEQ ID NO: 52909 - DNA, 2058 bp, Caenorhabditis elegans
  CDS (1)..(2058)
atgattaaaacctatctgacactgttgctactagcaacctcggccacgtgtcaaaaaaagtcagcgactctggtatctgcggaaggagaagcgcctgcaataaaagtgataaaaaccacaggctcgttactcactgcaattgatgtgtcgaaagctgatttggactgggaacaggtcacatcacagcaagatgagaataagagcaatcgagaaattccaaaagtaataagcgaggagtacttggctgaaaaagtagaacaaccaccaagccctgaagctgaagctgagtttcaacgcggaatggcttatattgaaagaggaaaaggtcatggaagagaaggaagagttgcagctcatagagtatttgaaagagcagccgcacaaggtcatcaagaagccagaaaagctgtagcgttctcacagatgttcggagattattcccgttggtccattcaggaagccaagacagttttcgaagatctcgaaaaaaacggctcaccagatgctcaacttgcattaggattcatgcatggagccggaatcggagtggaaaaatcgaatcaagcaaaagctcttgtatattatatgttctccgctctcggaggaaatcctcttgcccaaatggctatgggcttccggtatagtcacggagttggagtgccacaaaactgcgaaactgcactttcatattatcaaaaagttgcaaaaactgtagtggataatgttaaattcacaactggacagacaattcaacgattgagactaaccgacgaaacagatccaacaatccatatgcaaccaggaagtgcaccactggagagtaatcttcttgagtattacaagatgcttgccgacaaaggagatacatccgctcaattgggactcggacagatttatttagctggtggacgagggctcaatcaaaatttcgaactcgccttccgctacttgttagctgctgctgagtcaggaagtgccgatgcattgacatatctcggaaaaatgtatttggatggaactccgtttacgccaaaagattatcaaaaatcattcgaatatttgatgaaatcagctgataaatctagtcctagtgcacaggctgtattgggagcaatgtatatgaaaggaaaaggagtcaagaagaattacgaaaaggctttgaagttgctgacattgtcggctgataagaagaacgccgatggacaaatgtatttagcagaattacattacaaaggtgttccaaccaacaaaggagtgcatcgagatttcaagaaatctgtgaaactttaccagcttgcttctcaaaatggacatattcttgcctactataatcttgctcaaatgcacgctgctggaacgggagttccacgttcatgttcccacgcggttgatcttttcaaatctgtagccgaacgaggaaaatggggagaacgattgatggaagcccatagcgcatataaagataatcgagttgatgaggccgcaatgaaatatttattcatggctgaacttggctatgaagttgctcaaactaatctagcctatattttggatcgtggagaagcgacgtcattgttctcgggaccgaaagataacaatatggaaagagcgttcctcaattggcaaagatctgcaaatcaagaatatgctgctgctcgcgtgaaacttggtgattactactattatggtctcggtacagaagttgaccacagtttggcgttctcaaactataaaatggcagtcgatagacacggtgttgctcaagcaatgttcaatttgggatatatgcacgaagttggcgaaggaatcactcgggatctttacctggctaaacgtttctacgatcaagcaattgagcatagtcaggatgcatacatgccgtcgaaattagcattagcaaaactagcttttgtcttctatttggaagagctcaacaagctgccattaatcagttttatggagaaaaccgttggaccacgatgggatgctattttgatgaccgtttctgcattggttccattattcttgttctggaggcaccgacaaaatgataattga

SEQ ID NO: 52910 - protein, 685 aa, Caenorhabditis elegans
MIKTYLTLLLLATSATCQKKSATLVSAEGEAPAIKVIKTTGSLLTAIDVSKADLDWEQVTSQQDENKSNREIPKVISEEYLAEKVEQPPSPEAEAEFQRGMAYIERGKGHGREGRVAAHRVFERAAAQGHQEARKAVAFSQMFGDYSRWSIQEAKTVFEDLEKNGSPDAQLALGFMHGAGIGVEKSNQAKALVYYMFSALGGNPLAQMAMGFRYSHGVGVPQNCETALSYYQKVAKTVVDNVKFTTGQTIQRLRLTDETDPTIHMQPGSAPLESNLLEYYKMLADKGDTSAQLGLGQIYLAGGRGLNQNFELAFRYLLAAAESGSADALTYLGKMYLDGTPFTPKDYQKSFEYLMKSADKSSPSAQAVLGAMYMKGKGVKKNYEKALKLLTLSADKKNADGQMYLAELHYKGVPTNKGVHRDFKKSVKLYQLASQNGHILAYYNLAQMHAAGTGVPRSCSHAVDLFKSVAERGKWGERLMEAHSAYKDNRVDEAAMKYLFMAELGYEVAQTNLAYILDRGEATSLFSGPKDNNMERAFLNWQRSANQEYAAARVKLGDYYYYGLGTEVDHSLAFSNYKMAVDRHGVAQAMFNLGYMHEVGEGITRDLYLAKRFYDQAIEHSQDAYMPSKLALAKLAFVFYLEELNKLPLISFMEKTVGPRWDAILMTVSALVPLFLFWRHRQNDN

SEQ ID NO: 52911 - DNA, 759 bp, Ralstonia solanacearum GMI1000
  CDS (1)..(759): transl_table=11
atgggcaggcgaacgcagcagcacggcaccccgcgcaccaccaggatgacgctggccgcgatcatgctggcggccgccggatggaccgcgccggcccgtgccgccacctcgccggcggacgcccagggcgatgccgccgccctcacgcagatcgccatcgcgcactacgagcacaatgagttcggccgcgccatcgacgagttcgccgaagccgctcagcgcggcaaccgcctcgcccagttcaactacgcgatgatgctgatgcgcggcgaaggcaccgtcgcgcagcccgaggcggccgtcaaatggctgcgccgcgccgccgacaaccagatgacgcacgcgcagttcgcctacggcgagctgttcgagcgcggcgagctggtgccgcgctccctgccggaagccaacaagtggtacgagcgcgccgccgccggcgggcacatcgaggcgcagcgcgcgctggcgaccaactacttcaccggccgcggcgtgccgcgcgactacggccgcgccttcacctggtacaagaaagcggcggaagccggcgatgggccgtcgcaatacatcgtcggcagctactacgagcgcggcgagcccggcgtggtggcacaggacatcgaacaggccaagctctggtacggccgcgccgcggcacagggcgaccccggggcgctggccaagctgcgcgagctggtggagaagacctaccgcgccaagcacggcgatccgcccgcggccgcacgccccgccatgtag

SEQ ID NO: 52912 - protein, 252 aa, Ralstonia solanacearum GMI1000
MGRRTQQHGTPRTTRMTLAAIMLAAAGWTAPARAATSPADAQGDAAALTQIAIAHYEHNEFGRAIDEFAEAAQRGNRLAQFNYAMMLMRGEGTVAQPEAAVKWLRRAADNQMTHAQFAYGELFERGELVPRSLPEANKWYERAAAGGHIEAQRALATNYFTGRGVPRDYGRAFTWYKKAAEAGDGPSQYIVGSYYERGEPGVVAQDIEQAKLWYGRAAAQGDPGALAKLRELVEKTYRAKHGDPPAAARPAM

SEQ ID NO: 52913 - DNA, 3747 bp, Agrobacterium tumefaciens str. C58
  CDS (1)..(3747): transl_table=11
atgaacggattgcgatcgaaaacccaacagccaagcgacagatcgtctcttgatgcgctcaatcgcaccattgaaggccttgaagcccgtattgaagggctgatgagccagaagtttccgcgtgagccgcgcgctgcgagctctcagccggaaccgaaaaacgaggcctatgctgcgccgcgcgagccccgcgccgccgtcacaccgccgcagctcgatcccgtcaacgaaatccggcagcgccagcgtcttctcgaagcgagcttccagcgtccgcaggaacccgttgcccgcccggaacggacgattacccggccgctcgcaccggaatatggttcaagggacacgcagcaaacggccgctcccgcgccgcgtgcccgcgccattccgccctatcaggaacagcagcgcaatgatgcagccctgcaggagatcgcgcaggcgctggtcaaccttcgccatgagctgaaacacgatattgccgagggcgttgcccgcgaagcgcaggggctgcgtgccgaaatccgcaatattcgcgcggtggcggaagaccagcaattcatcggcgatctgcgcgacgacatcgcacgtcttgccggcagcatcgaccagctcggcaatctggcatctcctgacgcctacgggttgcgtaacgaattcgaagacctgcgcctgacgatcgaccagcttgcgcgcgaagacagcgtgcaccggatcgaaagccgctggaacaatgtggaggacacgctgcgcggtttcgatgcggcctcgctgcaggatgagatcgtttcactcgcctatcgtctcgatgacatcaagacgcaacttggcggtatgagcaacaatcccgccgtgcgcgtgcttgaggaaaagctcatcaccattgccagcgccgtggagcagcttggcaagcacatgcagcccaacgaggccgcctttaccgaacagttttccggtctcgaccagcggctggacgaaattagccgcgccattgccgcaaccggcacccgcgccaacgctcaggccacggacaacgcgctggcgcagcggctggaaacccggctgaacggccttgccgaacagctcggcgacatcaaccgcctcgccgccatcaagccggaaccggcgcccgaccttaccgcccgcctcgaagcgctctccggcaagatcgatgagctgagcaccgcgcgcgacgccgcgcaactgcatgaccggctggaccagctttccttgctgctggaacggtcgcagcgccccacgcagcaggcggaactgacatctttcctcagcgatatctcccgcaagatcgatgcgctggatcacggcgctatcaatgacggcctcgccgaacggctcgacctgctctcccggcggatagaagatctcgattatcgctacagccagccgcaaccggcttcgggtctcagcgacagcgctttttcccgtctggaagaacggctcggcacgatcgccgcccgcctggacgagaccgcccatgccgctcctgccgatagccgcgctctggcaagcctcgaaaaccagatcgcccatctgtcgacgctgatcagccagccggtgcaggtgcaggcggccggcatatctccggaactcgacgtccgcatggcggcgatcgaagactacatggcgtcgaacgacgaatatatcatcgaagcggcgcggcaggcagccgaggccgttctcgacgcctatacccgcaacaatctctcggccggcgcaaacctcgccgacatgacgatgctgaccgatctcgccaccgatctgcgcagtctcgaagccttgagccgcaacaccgaagagcgcacgcaccgcaccttcgaggcgctgcacgagacgctggtgcagattgccggccgtctggacaatctcgacagcgcgcccgcctatcgccaagacgctccccgtaacgtcgcgcagcacatggttgccgccagccgcgaagacgcggccatgccggccgccgttttcccggcagacggctatatcgccgaagagcaggccattctcgatgatgtcagcgaaaacgatgcgaccgcgatcgtaccgccggctgccgccaagcccgcaaaagcggaacggaagagcctgctcgccggcctgacgaagcgtttcaagacaagcacggcgaagcccgcaaaggccaaggaagaacccgtatcggcctcctccgcccgcacgcaggttgagcccgccccgtcgctcgatccgatcgacgttctgcctgctggccaggagaatgaacttctggaaccgggctcgggtgcgcccgatatcaagaaaatcctcgaacgtgtgcgtgccagccaggtcgcaggcgccggcaaggccgcggatgcggaaggacggacggatttcatcgccgccgcccgccgcgccgcccaggccgccgccatggagacatcgccggagaagctggataccggcaagaagagccgcaaggccgacacgtcggcactttcgcgttatcgtcggccgctgctgctcggcatcggcgccattcttctggcgatgatggccatgccgctcgtcaagacgctgatcggcggcgctgaagcgccggcaccggtcatagagcagaagacggaccagggcccggtctccgcgcttcccgaaaccgacgataaggccgtgaccattccctccggtcttgccatcgatccggaacaggctgcctcggcagacagcatcgaaaacgccgcaccggcgcagaacatcattgacaatcgcaccatcggcggcgcgccgttgccggacgagccgccggttgccgatgttcccgccgtggaccccgcaaagtccgacaccgtcgcgcagaacgaaggaccgaaaccgactgaggtcgccaccacgactattcctgcgcaggacaccattgtggttccggccggcatcgagcccgcatcgcttgccgaagcggccgccaagggcgacacgcaggcgctgttcgagattgcggcacgctacaccgacggccgcggcgtaaccgccgaccgtgcggaagcagcaaagtggtacaagatggcggccgatcgtggccttgcccccgcgcaatatcgtctcgccaatctttacgagaaggcgaatggcgtcgagcgcaatcttgtcgaagcgaagcgctattacacgctggctgccgaacagggtaatgccggcgccatgcacaatctcgcagtcctgctcgcctcagacgcggccggccagccggatttcgccacctctgcacaatggttcatcaaggcgtccgaactcggcgttcgtgacagccagttcaacctcgccattctctacgcccgtggcagcggcgtgaagcaggatatcgaggaatcctacaagtggttcgccattgccgccaaggatggcgatgctgatgccgcccagaagcgcgacgaggttgcaggcgcgatgagcccgcagcagctgcagagcgccaaggccaaggtcgatgcttggaaggtgaagccgctctcggacgacgccaacagcgtcaacccgcctgaggaatgggccggcaaagagggcgtgaagaccgcctccgtggacatggaaaaggcgatccgcaacattcaggcgatcctgaacaagaacggtttcgatgccggccagccggatggcaagcttggcaagaacacggtgacggccatcagggacttccagaaatccgtgggccagacgccggacgggcgtatcaccaacgacttggtgaccgcgctgctcgcccgcaacaaataa

SEQ ID NO: 52914 - protein, 1248 aa, Agrobacterium tumefaciens str. C58
MNGLRSKTQQPSDRSSLDALNRTIEGLEARIEGLMSQKFPREPRAASSQPEPKNEAYAAPREPRAAVTPPQLDPVNEIRQRQRLLEASFQRPQEPVARPERTITRPLAPEYGSRDTQQTAAPAPRARAIPPYQEQQRNDAALQEIAQALVNLRHELKHDIAEGVAREAQGLRAEIRNIRAVAEDQQFIGDLRDDIARLAGSIDQLGNLASPDAYGLRNEFEDLRLTIDQLAREDSVHRIESRWNNVEDTLRGFDAASLQDEIVSLAYRLDDIKTQLGGMSNNPAVRVLEEKLITIASAVEQLGKHMQPNEAAFTEQFSGLDQRLDEISRAIAATGTRANAQATDNALAQRLETRLNGLAEQLGDINRLAAIKPEPAPDLTARLEALSGKIDELSTARDAAQLHDRLDQLSLLLERSQRPTQQAELTSFLSDISRKIDALDHGAINDGLAERLDLLSRRIEDLDYRYSQPQPASGLSDSAFSRLEERLGTIAARLDETAHAAPADSRALASLENQIAHLSTLISQPVQVQAAGISPELDVRMAAIEDYMASNDEYIIEAARQAAEAVLDAYTRNNLSAGANLADMTMLTDLATDLRSLEALSRNTEERTHRTFEALHETLVQIAGRLDNLDSAPAYRQDAPRNVAQHMVAASREDAAMPAAVFPADGYIAEEQAILDDVSENDATAIVPPAAAKPAKAERKSLLAGLTKRFKTSTAKPAKAKEEPVSASSARTQVEPAPSLDPIDVLPAGQENELLEPGSGAPDIKKILERVRASQVAGAGKAADAEGRTDFIAAARRAAQAAAMETSPEKLDTGKKSRKADTSALSRYRRPLLLGIGAILLAMMAMPLVKTLIGGAEAPAPVIEQKTDQGPVSALPETDDKAVTIPSGLAIDPEQAASADSIENAAPAQNIIDNRTIGGAPLPDEPPVADVPAVDPAKSDTVAQNEGPKPTEVATTTIPAQDTIVVPAGIEPASLAEAAAKGDTQALFEIAARYTDGRGVTADRAEAAKWYKMAADRGLAPAQYRLANLYEKANGVERNLVEAKRYYTLAAEQGNAGAMHNLAVLLASDAAGQPDFATSAQWFIKASELGVRDSQFNLAILYARGSGVKQDIEESYKWFAIAAKDGDADAAQKRDEVAGAMSPQQLQSAKAKVDAWKVKPLSDDANSVNPPEEWAGKEGVKTASVDMEKAIRNIQAILNKNGFDAGQPDGKLGKNTVTAIRDFQKSVGQTPDGRITNDLVTALLARNK

SEQ ID NO: 52915 - DNA, 954 bp, Brucella melitensis 16M
  CDS (1)..(954): transl_table=11
atgccggcgcttccaccagagccgcaggcatccgcacagttttcgccaccggaaaccgaacagacagccgcgcctgaacccaaaaagatcgaaatcccgtccattcccgaagaagccgggcctgccgcgctgcgcgaggccgctgccaagggggacatacgcgcgctttttgaaatcggcaatcgctatatggaagggcgcggtgttgccgaaaacgtgaaagaagcggcgaaatggtatcagcttgccgccgatcagggctttgcgcctgcgcaatatcgcatcggcagtttcaatgaaaagggcctcggcatggcccgcaatctggaaaaggccaaaagctggtatcagcttgccgcagatcagggcaatgcaagcgccatgcacaatcttgccgtgctttttgccacaggtacaaacggcacgccggataatgctgccgctgtgcgctggttcaccgaagcggcagaacttggtgtgaaggacagccagtataatctcggcatccttgccgccaaggggctgggaatgccggtcaatctggaagaaagctacaaatggttcgcgcttgccgccaatgcgggcgacaaggacgccgccgaaaagcgcgaccagatcgcaaaagccctgaagccggaaatgcttacccgcgccaagggagccgtgaaactgtggaaggcaaaaccgcttgacgatgcggccaattccattgacgtgcccgacgcctggaccgaggcaaaaccgctgtccaccagctcggtggacatgaagaaggccgttcgcaacatccagctcattctccagaaaaacggctatgataccggcactgccgacggcatgatgggcgccaagacccggacggcaatttccgcctttcagaaggccaatggtcaggagccgaccggcgaagtgaaccagaagctggttcaactcctgctcgaaaagaacaaataa

SEQ ID NO: 52916 - protein, 317 aa, Brucella melitensis 16M
MPALPPEPQASAQFSPPETEQTAAPEPKKIEIPSIPEEAGPAALREAAAKGDIRALFEIGNRYMEGRGVAENVKEAAKWYQLAADQGFAPAQYRIGSFNEKGLGMARNLEKAKSWYQLAADQGNASAMHNLAVLFATGTNGTPDNAAAVRWFTEAAELGVKDSQYNLGILAAKGLGMPVNLEESYKWFALAANAGDKDAAEKRDQIAKALKPEMLTRAKGAVKLWKAKPLDDAANSIDVPDAWTEAKPLSTSSVDMKKAVRNIQLILQKNGYDTGTADGMMGAKTRTAISAFQKANGQEPTGEVNQKLVQLLLEKNK

SEQ ID NO: 52917 - DNA, 2037 bp, Arabidopsis thaliana
  CDS (1)..(2037)
atgagaatattaagctacggaatcgttattctctctttactcgttttctctttcattgaatttggcgttcacgctcgtcccgtcgttctcgtcctctcaaatgacgatctcaatagcggcggcgatgataacggagtcggagagtcctctgacttcgatgagtttggagaatccgaacctaagtccgaagaggagcttgatcccggttcatggcgatcgatcttcgagccagatgactcaacagtccaagcagcctcgccgcagtactactccggcctcaaaaagattctatcggcggcgagtgagggaaatttcaggttgatggaagaagcagtggatgagatagaggctgcttcttcagctggagatccacacgcacagtcgataatggggttcgtttacgggataggaatgatgcgagagaagagcaaaagcaagtcgtttcttcaccataatttcgcagctgctggtgggaatatgcagtcgaagatggcacttgcgttcacgtatcttcgtcaagatatgcatgataaagctgttcaattatatgctgaattagcagagacagctgtcaatagttttctgatctcaaaggattctccggtggttgaaccaactagaattcatagcggaactgaagagaacaaaggtgctctaaggaaatctcgaggcgaggaggatgaagatttccagatattggaatatcaggcacagaaagggaatgctaatgcaatgtacaaaattggactgttctactactttggcctgcgaggattaaggcgtgatcacaccaaggcattgcattggtttttgaaagcagtagataaaggagagccgaggtcaatggaacttctgggggagatatatgctagaggagctggtgttgaaagaaattataccaaggcacttgaatggcttacacttgctgcaaaagaaggtctctattcagcatttaatggaattggctacttgtatgtcaaaggctatggagtagataagaaaaactatactaaggcaagagaatattttgagaaggctgttgacaatgaagaccccagtgggcattataaccttggagttttgtatcttaaaggcatcggagtcaacagggatgtgaggcaggcaacaaaatacttctttgttgctgcaaatgctggtcaaccaaaggctttctatcaactcgccaagatgttccatactggtgttgggcttaagaagaatctggagatggcgacttcattttataagctagtagcagaaagggggccgtggagttctctctctagatgggctcttgaagcttacttaaaaggtgatgtgggtaaggctttgattttgtactcaaggatggcagagatgggttatgaagtggcacaaagtaatgctgcctggatcctcgataaatacggcgaaagaagcatgtgcatgggagtatctggattttgcacagacaaagagagacatgagcgggcacattctttgtggtggcgggcctctgaacaaggcaatgaacatgctgctctgcttattggagatgcatattactatggccggggaactgagagagattttgtgcgtgcggcagaagcatacatgcatgctaaatcacagtccaatgcgcaagcaatgttcaacctcggttacatgcatgaacatggacaaggacttccctttgatctccatttagcaaaacgttactatgatgaatcccttcagagcgatgcagccgcgagattgccagtcacacttgctctcgctagcttatggctccgtagaaactatgctgataccgtcctggtgagagttgtggattcattaccagaagtgtatccgaaggtagagacttggatagagaatgtggtgtttgaagaaggtaatgcaacaatacttacactctttgtctgtctcatcacaattctctatctccgggaaagacaacgtagacaagtcgtcgttgttgccgatccagtggctgctgacgtggcacaaccgctcgacgctgatgtggcgcaacacctcgctgcgttcccacggtaa

SEQ ID NO: 52918 - protein, 678 aa, Arabidopsis thaliana
MRILSYGIVILSLLVFSFIEFGVHARPVVLVLSNDDLNSGGDDNGVGESSDFDEFGESEPKSEEELDPGSWRSIFEPDDSTVQAASPQYYSGLKKILSAASEGNFRLMEEAVDEIEAASSAGDPHAQSIMGFVYGIGMMREKSKSKSFLHHNFAAAGGNMQSKMALAFTYLRQDMHDKAVQLYAELAETAVNSFLISKDSPVVEPTRIHSGTEENKGALRKSRGEEDEDFQILEYQAQKGNANAMYKIGLFYYFGLRGLRRDHTKALHWFLKAVDKGEPRSMELLGEIYARGAGVERNYTKALEWLTLAAKEGLYSAFNGIGYLYVKGYGVDKKNYTKAREYFEKAVDNEDPSGHYNLGVLYLKGIGVNRDVRQATKYFFVAANAGQPKAFYQLAKMFHTGVGLKKNLEMATSFYKLVAERGPWSSLSRWALEAYLKGDVGKALILYSRMAEMGYEVAQSNAAWILDKYGERSMCMGVSGFCTDKERHERAHSLWWRASEQGNEHAALLIGDAYYYGRGTERDFVRAAEAYMHAKSQSNAQAMFNLGYMHEHGQGLPFDLHLAKRYYDESLQSDAAARLPVTLALASLWLRRNYADTVLVRVVDSLPEVYPKVETWIENVVFEEGNATILTLFVCLITILYLRERQRRQVVVVADPVAADVAQPLDADVAQHLAAFPR

SEQ ID NO: 52919 - DNA, 1773 bp, Encephalitozoon cuniculi GB-M1
  CDS (1)..(1773)
atgcggatggacacgcttcactcgtttttcggcagaaaaatgtccagagaagccgacgtggtgcttttgggcgtgggcagagaaaaaaacgaggagcttgggctaaagatgcatctggaaaactctgcaagagatgcaaactcgcttgcagtatctgcattctgctacgagtttggaattggcactagtgtcgatatgaagaaagcagagatgagatacactaaggctgcgttgagcgacaacgggcttgcgctaattagactagcatttataaggcggtttggcaggcctacggcaacaatagatcggcgggaggctaagcggtatctcgataagctaaagcgcctgggcagaagaggggtggaatggctagtttatgcaaacaagcatggaaacctttatgccaggtactgcttgggggtgtgctaccaggagggatatggtgttcctgtagatccgttactagctgtgaagtactacagtgagggtgcatatgaaggaaatacctgctcgattggaatccttggatactgcttcctaaagggatttggagtggagaggaacgaagaaatagccgtggagctcttcaaatatgcgtctgaaaagaaggactcgacggcgctgtacaacataggtttctgctacgaggaggggcgaggggttgagagaaacctcatcaaagcctttgaaatgtacaggctgtctgcaaagatggagaattcgtatgctcagaatgcattgggcaactgctatgaggaggggaagggagtggatagagatctccaaaaagcctttgagctctataagaaaagtgctttgcaaggatatccgtctggtcaatgcaaccttgcgttctgctaccaaaaggggattgggacggagaggaatttggaaaaggccttcgagtggtacaaaagggctgccatccaaggactcagcagggcaaagcataacattggatactgctaccagaatgggctggggacctctccgtgtatgcgtagtgccgtcaattggtacaaggagtccgcagctgaagacaataagtattcaatacatgcactaggggtttgttaccagcatggatatggagtacccaaggacgaaaggctggctgtaaggtattttagtgagggtgtccgggccggctttgacgaagcaatcataagccttgcattgtgctacagatctggaataggagtccggatctctccggagaagtcctttgcgctgatgaagagagcagcagaaatgaataactcctcagcacagaataccttgggatactactacgaggaaggatatggaacacccaaaaacctaagaaaggcagtgaaatggtatgagacaagtgccaagcggaacaactcatgggcgctgttcaacctaagcaccttatacctcaatggaaaccatgttccagcagacaaagagttagggataaggctcctgattaggtcgagagatttgggtaaccccagagcaatgaacaccctgggatactgttttgagaagggcattgttgttgggaaggatccaaggcttgcctttgagcactacacacaggcattgatgaacggatactcgaaggcagggtatagtctcggaaggtgctatgagagcggtatcggaactgaagttgacctggataaagctctgtactatttttacaaggcatcttctgccggagaagaggcttctctacagagactcaagaagatactgtcttcattggttgagccaaaccacatgactatcccgccctgcgcctga

SEQ ID NO: 52920 - protein, 590 aa, Encephalitozoon cuniculi GB-M1
MRMDTLHSFFGRKMSREADVVLLGVGREKNEELGLKMHLENSARDANSLAVSAFCYEFGIGTSVDMKKAEMRYTKAALSDNGLALIRLAFIRRFGRPTATIDRREAKRYLDKLKRLGRRGVEWLVYANKHGNLYARYCLGVCYQEGYGVPVDPLLAVKYYSEGAYEGNTCSIGILGYCFLKGFGVERNEEIAVELFKYASEKKDSTALYNIGFCYEEGRGVERNLIKAFEMYRLSAKMENSYAQNALGNCYEEGKGVDRDLQKAFELYKKSALQGYPSGQCNLAFCYQKGIGTERNLEKAFEWYKRAAIQGLSRAKHNIGYCYQNGLGTSPCMRSAVNWYKESAAEDNKYSIHALGVCYQHGYGVPKDERLAVRYFSEGVRAGFDEAIISLALCYRSGIGVRISPEKSFALMKRAAEMNNSSAQNTLGYYYEEGYGTPKNLRKAVKWYETSAKRNNSWALFNLSTLYLNGNHVPADKELGIRLLIRSRDLGNPRAMNTLGYCFEKGIVVGKDPRLAFEHYTQALMNGYSKAGYSLGRCYESGIGTEVDLDKALYYFYKASSAGEEASLQRLKKILSSLVEPNHMTIPPCA

SEQ ID NO: 52921 - DNA, 1824 bp, Streptomyces coelicolor A3(2)
  CDS (1)..(1824): transl_table=11
atgggggacatggcaaatctgttcgggacagggcgttttgcgcagccttccggtcagctttccggtcaggaggaggccacggacgaggctcaggaagccgccgacgaggccgccgaggaagtgcgcctgcggctcgccgtcgactgtggtgacgtcgaggcgatgagcgtgctcggcgcgatgctgctgcgccgtggcgacttcgacgcagccgagtcgcacctgcgtgccgccaccgcggccggcgaccgggccgccgccaacaacctgggcgtcctgctgcaccagcggggatacgccgacgaggccgccggctggtggcgcatcgccgccgtcgccggatccgccgccgccgcgcacgcgctcggccggcacttccgggaacgcggggacgagcccgccgccgagtactggctgtgccagtccgcggaacaggggcacgtgctgggcgcctacgcgctcgccgacctgctggagcaccgcggcgacgacaccgggtccgagcggtggatgcgggccgcggccgaacgcgggcaccgggaagcggcgtaccggctggcgcggacgctggaccggcgggccgggcgggacggcgacgacaaggccgccgcacgcgcggccgacgaggccgagcagtggtaccggcaggccgccgcgcgcggtcaccggcgcggcgcgctgcacctggggacgatcctggagaagcgcggcgagctcaaggaggcgggccgctggtacctcacgtccgccaaggacggcgaggcccgcgccgcctgcgcgctcggcttcctgctgcgggacgccggggacaccgagagcgccgccgtgtggtggctgcgcgccgcccaggacggcgacggcaacgccgccaacgccctgggcgcgctgcacgccgagcgcggcgagacccagaccgcggagcgctggtaccgggccgcgatggacgcgggcgacgacaacggggcgtacaacctcgggctgctctgcgccgagcagggccgcaccacgcaggccgagcagtggtaccggagggccgcctacgccgggcaccgggaggcctccaacgcgctggccatcctgctgctgcgcgccggggacgagagcggcgccgagccgtggttctccaaggccgccgaggcgggcagcgtcgacgccgccttcaacctcgggatcctgcacgccgggcggagcgaggagcgggcggcgctgcgctggtacgagcgggccgccgccgccgggcacaccgaggcggcgctccaggtcgggatggcgcggctgcgcggcggggacgagcaagaggcggagcggttcctgcgctgtgcggccgggggcggcagcgcggaggccgcgtaccggctggcgacggtgctggacgcgcgccggccgccggagcccgcgcacgagctgggtgagcccgcgcaggacaagtccgagtgcgaggagtggtacgagcgggccgcctcccaggggcaccggcgcgcgcaggtgcgggtcgggatgctcgccgcggcgcggggcgacgtggtggaggccgcgcggtggtaccgcgaggcggccgaggccgggtcccgcaacggtgcgttcaacctggggctgctgctggcccgcgaagggagcgagcccgaggccgtcgtgtggtggcgcagggcggccgacgccgggcacgggcgggcggcgctgcggctggcgctggtctgtgcgcggcggggggagctggcggaggggcagcggtgggcggacctcgcggtgtcactggggccgcgggaggtgggggagcgggcggctcggctgcgggacgcgttgcggcaggagctgtcggcgtga

SEQ ID NO: 52922 - protein, 607 aa, Streptomyces coelicolor A3(2)
MGDMANLFGTGRFAQPSGQLSGQEEATDEAQEAADEAAEEVRLRLAVDCGDVEAMSVLGAMLLRRGDFDAAESHLRAATAAGDRAAANNLGVLLHQRGYADEAAGWWRIAAVAGSAAAAHALGRHFRERGDEPAAEYWLCQSAEQGHVLGAYALADLLEHRGDDTGSERWMRAAAERGHREAAYRLARTLDRRAGRDGDDKAAARAADEAEQWYRQAAARGHRRGALHLGTILEKRGELKEAGRWYLTSAKDGEARAACALGFLLRDAGDTESAAVWWLRAAQDGDGNAANALGALHAERGETQTAERWYRAAMDAGDDNGAYNLGLLCAEQGRTTQAEQWYRRAAYAGHREASNALAILLLRAGDESGAEPWFSKAAEAGSVDAAFNLGILHAGRSEERAALRWYERAAAAGHTEAALQVGMARLRGGDEQEAERFLRCAAGGGSAEAAYRLATVLDARRPPEPAHELGEPAQDKSECEEWYERAASQGHRRAQVRVGMLAAARGDVVEAARWYREAAEAGSRNGAFNLGLLLAREGSEPEAVVWWRRAADAGHGRAALRLALVCARRGELAEGQRWADLAVSLGPREVGERAARLRDALRQELSA

SEQ ID NO: 52923 - DNA, 759 bp, Xanthomonas axonopodis pv. citri str. 306
  CDS (1)..(759): transl_table=11
atgtctgagccggcgctggacatcgcgcagctgagcgcgttgctgcgcacgcagccggaacaggcacgtgcgcgcttgcacaaagccgctgcgaaccatgacgtaggcgcacaattgctgctcgcgcagatgtacgccgaaggacgcggcattgccgcagatccggctgcagcgatgctgtggtacgaagtggccgccaacgcagggtgtgcggaggcgatgaaccagctgggccgctgccatgagctcgggttcggcaccgccatcaacgcggtgctggccgtgctgtggtatcgccgcgccgccgaacatggcctggcatggggcatgtacaacctggcgcacatgtacgcctccgggcgcggcgtggcgcaggaccacgcgcaggcattggcgctgtaccaccgcgcggccgaagccggacatgccaagtcgatgaacttcctggcgcgctatctcgaccagggcctggcctgcgctgcagaccctctggccgcatgcgtgtggtaccgccgctccgccgaagcgggcgatttccgcggccaggccggctacgccaccctacttgccgacagcggcgagctggatcaggccgagacatggatgcgccgcgccatcgcaggtggccacgccggctttttgcaacagctcgcaccactgctggccggcgcgcgccatccgcgcctgcgcgccttgctgcacgaggtggctgcacggcagcggcaactgcagccttgcgtccccgcagacgtggcctga

SEQ ID NO: 52924 - protein, 252 aa, Xanthomonas axonopodis pv. citri str. 306
MSEPALDIAQLSALLRTQPEQARARLHKAAANHDVGAQLLLAQMYAEGRGIAADPAAAMLWYEVAANAGCAEAMNQLGRCHELGFGTAINAVLAVLWYRRAAEHGLAWGMYNLAHMYASGRGVAQDHAQALALYHRAAEAGHAKSMNFLARYLDQGLACAADPLAACVWYRRSAEAGDFRGQAGYATLLADSGELDQAETWMRRAIAGGHAGFLQQLAPLLAGARHPRLRALLHEVAARQRQLQPCVPADVA

SEQ ID NO: 52925 - DNA, 2460 bp, Drosophila melanogaster
  CDS (1)..(2460)
atgaaggccaacagctggatgtgcctgctggcgctgcttctcgcctggcagctgcgagcggaggagctccaagggcccaacattgatggtacgggcagcagtttgggttcggccacaggtacgggtacgggaacgggattgggcacgggaacagccacgccaacgctgcccaatgagccctccacccaggcggaggcggaggaggtgaccacggcggaatcagagtcgcgggttccgtcggaaagcaacgaacgcaaggcagacaaacccaaggagtccacaaagtttgcttccaggacgaaggttatgccggcttccctgttcgaacgcctgtggaacgaaagtctgatcaggcggcaaaagctgaaagccgagatcgagcgcatcgaagccaaacgcaaatccactgaagtgttagaacttaccccagaccaaatagaagctcaaaccgtgtacgacaacgcaatggacatgttggccaagccaagcacggataagcgagtagccatgattttgcttaagaaggctgctgcatttaatcacctcaaggcgagggcggaactagcctgggccgccctactgggtcaatggatggactttgatttcaaccatgctgtcgatgagtttgagagtctggccaacgaaggcgtcccagaggctcacatgggcctgggattcctttattcggtgggcgttggcggtaaaaatgtaagccagcccctggcactgatccactatagcctggctgccctcggtgataatactccggcgcaaatggccatggggtatcgctatctttatggcatcaatgtgcccattagctgtgagaaggcgctgatccactacaagcgagtagccaaaaaagtggcttccaagataaccttcgccaatgggccggttgtgcatcgggtaagactgctggatgacctagagaatcccggcagttccgaaactgagattgtcgactattacaaacttctggccgataaaggcgacatccagtcgcaggtgggattgggtcaggtgtactatcagggcggcaaggtcaccgagcaagatcatcaaaaggctttggaatatttcaaaatggccgccgatgcaggtagtgcagttggcatcgcgtttttaggcaagctttatctggaaggaagtgatcaaatcagggccgataatgatgcagcatttgggtacttctccaaggccgctgaaatgggggatccagttggtcaaagcggactgggcctcatgtatctaaagggtttaggtgttcccaaagactccatcaaggcattatcctatttcactcaggcggctgatcaaggttgggttgatgggcaactgcagctgggcaacatgtatttcactggcaatggtgtaaaaaccgactacaagttagcctttaagtacttcaacctggccacccaatcaggccatgttttagcctattataatctgggagtgatgaatgcctacggtatgggaatgctgcgttcatgtccagcagcagtagaattcttcaagactgtttcggagcgtggccgttggagcagccgattgatgatggcctacagcgactataaaaataaccgcatcgacgaggcctacatgcagtactcgttgatggccgaaatgggctatgaggtggctcaaagtaatgccgcctttttactagaccgcaaggaggtgcatgtgttcaacgatcggcacgaagatctgattcgtgccttctactactggaaacgagcagccggacagggctattctgcggcccaagtcaagctgggcgattactattactacggttggggtacttcgacggacttcgagactgccgctgctctttacaggaaagcctctgagcagcaatataatgcccaagccatgttcaacttgggatacatgcacgagcaagggctcggaatgaagaaagactggcatctggcaaagagattatacgatttggctgcggaaaccaattcagacgccaaagtgcctgtggccattgcgctttttaagctacaaatgttggccacgattgaatcaatcaaggagtcaccttacaggttcatcttctacatggatgaaaatattgctgccaattgggacttgtacatgattaccgttctaactctactgctgggcatcatcatgtacatgaggcgtccatttcagcagccggatcagccggcacagcagccagctgcagatgacattgctgctgcgccagttaacttggcgccggttggagcggaagcagcacctgtagccgcagtggtcgaaggtgtgggcgtcacaccacctgccgccgcagtttcatctcacgatgctgtggccgcgtcctcctctacggaaacctcatcaaccactgccacgtcccttgtcgatgcagcgtcacaagggggaagtggcacgacatctgcggcgccggatggcgctaacacactcgatcccactggttag

SEQ ID NO: 52926 - protein, 819 aa, Drosophila melanogaster
MKANSWMCLLALLLAWQLRAEELQGPNIDGTGSSLGSATGTGTGTGLGTGTATPTLPNEPSTQAEAEEVTTAESESRVPSESNERKADKPKESTKFASRTKVMPASLFERLWNESLIRRQKLKAEIERIEAKRKSTEVLELTPDQIEAQTVYDNAMDMLAKPSTDKRVAMILLKKAAAFNHLKARAELAWAALLGQWMDFDFNHAVDEFESLANEGVPEAHMGLGFLYSVGVGGKNVSQPLALIHYSLAALGDNTPAQMAMGYRYLYGINVPISCEKALIHYKRVAKKVASKITFANGPVVHRVRLLDDLENPGSSETEIVDYYKLLADKGDIQSQVGLGQVYYQGGKVTEQDHQKALEYFKMAADAGSAVGIAFLGKLYLEGSDQIRADNDAAFGYFSKAAEMGDPVGQSGLGLMYLKGLGVPKDSIKALSYFTQAADQGWVDGQLQLGNMYFTGNGVKTDYKLAFKYFNLATQSGHVLAYYNLGVMNAYGMGMLRSCPAAVEFFKTVSERGRWSSRLMMAYSDYKNNRIDEAYMQYSLMAEMGYEVAQSNAAFLLDRKEVHVFNDRHEDLIRAFYYWKRAAGQGYSAAQVKLGDYYYYGWGTSTDFETAAALYRKASEQQYNAQAMFNLGYMHEQGLGMKKDWHLAKRLYDLAAETNSDAKVPVAIALFKLQMLATIESIKESPYRFIFYMDENIAANWDLYMITVLTLLLGIIMYMRRPFQQPDQPAQQPAADDIAAAPVNLAPVGAEAAPVAAVVEGVGVTPPAAAVSSHDAVAASSSTETSSTTATSLVDAASQGGSGTTSAAPDGANTLDPTG

SEQ ID NO: 52927 - DNA, 747 bp, Chlorobium tepidum TLS
  CDS (1)..(747): transl_table=11
atgaagcgttttgttttcagcggttttgctgtgtttatgcttgctgctcctgtgacggggcattgccgggattatcaaatgaatgactcatcaccggaagcatcggtccgtcgggacgcggatactgataaagatgctgcccaaaaagagtatctcatcgcgatgaaatactattatggccgtgatgtggatcgtgattatgccgaggcgctcaaatggctcagattgtcagccgcgaaaggcaatgatgctgcggagtacgcaataggattcatgtaccagaagggactgggtgttccacaggactatgccgaggcgatgaaatggtaccggctcgctgctgccaaagataacgataatgcccagaaccagatcggttacctgtatcatcatggatggggtgtggagactgattatgccgaggcgatgaaatggtaccgcatatcggctgccaaagggaattttgctgctgaagacaatatcggggtgctctatgaacatggtcagggcgtagaacaggactatgctgaggcaatgagatggtaccgcatatcggcagccaagggcaacggcgaggctgaactcaatattggcaatttttatcagcatggtttgggcgttgagcttgatcttaacaaagctgtaaaatggtatcggtcggcagcggccaaaggcaacgaggaagctgcgcaaaagctcagtgccatgaagagcggcagtgtgttgcctgacgtgcaccatgagtaa

SEQ ID NO: 52928 - protein, 248 aa, Chlorobium tepidum TLS
MKRFVFSGFAVFMLAAPVTGHCRDYQMNDSSPEASVRRDADTDKDAAQKEYLIAMKYYYGRDVDRDYAEALKWLRLSAAKGNDAAEYAIGFMYQKGLGVPQDYAEAMKWYRLAAAKDNDNAQNQIGYLYHHGWGVETDYAEAMKWYRISAAKGNFAAEDNIGVLYEHGQGVEQDYAEAMRWYRISAAKGNGEAELNIGNFYQHGLGVELDLNKAVKWYRSAAAKGNEEAAQKLSAMKSGSVLPDVHHE

SEQ ID NO: 52929 - DNA, 2163 bp, Yersinia pestis KIM
  CDS (1)..(2163): transl_table=11
ttgaaaaaaaaactggtggcactcttaatactctcttatccgtcggttgcatatctaaagcaaccccctccggcagtacctaaacccattacctttgttgctaaaattgataacattgattttaacaaaacggccattgatagtgatatgaaattactgctggccgatcggttccactttaaaaccaaaaccccctgtaacaagaatacgctttcaggccggccagaatcatttggtttaacgtcagaagtatacgcggcaaaaatcaagagtttgctcgttgagatcttaagtgaacgttaccttttcctgacaatagatcaatgtgaccgcggtggcacaccgatgctcaccaatatagaagtttgcactgaagcactgtgcggtgctgaattcatgaaaaaagaatcttatctttggttaaatcaagacttaaaggccacggtgaaacgccaggcgacatcggtgatccctatgccattaacctttgataaagaaaagcaactgtggaaagtggccgggtggtttattgagtcatcagaagaaactgaggaacttataccgagcaaactgctggcctttgaaggttatactgacgatgaaacattcaaaacacaaaaattcgtctctaccttcaaatcctattactccagtggaaatattcaacatattctcacttataataaagagggaaaagaggatgggaaatacgactcatattatgatgaaaaagggaaattagctgagacgttggtatttaaaaatggcttggtcaatggtgagtatattatctaccatgaaaatggtgctattgaaagcaaacgacattttattgacagcaaaatagccgacggagagtgccctcattattacgacaatggaaaaattaaagagaaccatagctatttgaataataaactcgaagggaaatactttgagtattttcctgatggtaaaattaaagatgaaagaacctaccatgctggcaaagtcgttggtaaatacacagtctactttgaatcaggtaaaattagagctatttataataaaaacaataaagatcagtaccatggaactaacgaggaatacagccccgaagggcagttagtgtctaaatcaacgtataaagaaggaaaacaactctctagccagacttggtataaaaatggaaaaatgcgacaggaagaaatctacgataacgaaggccgcaaaaatggcgtatcaagagagtggtttgataatggacaacttaatacatcaaccagctataaaaatgatatcttagatggtgatagccagaaatggaacgaacagggtgaaatagtatcactctcaccgtataaagacggcaaacttcagggtgaacataaatattatgattcaggaaaactactttataccacaatgtataagaacgataaaaaagatggtccggatagacgatggagtatcaatacagggaagttaattgaagaaatgccctatgttgaaggcataagaagcggcatcaaaaaagagtttaatgatcgtaccggtagactgttaacaaccaccccttatgtgaataatgaaatacaggtcaccggagaaacatataatgccgatggtgttagcattattcactgctatatcaataataaaagtattgactcgctatacaatcctattgaaatacgcgagaaagcctcacagagtgatgataatgcacagtatgaactgggtaagtatcattatacttgtcaagactatgatagaggtcttaagtggctagaaaaatcagcagaccataaaaatattaaggcgttatttcttttagctcaaatgtataatgaaggtgacggcgttaaagaagatcaaaccaaatatttctcctatttactcaaagcagcgcagttagggctaagtgatgctcaagtggaaattggctatctgtatctcgtcggtgaaggggtagaaaagaacttaccagaagcctatcagtggcacataaaagctgccgaacaaggaaacgtgcacgcccattataaccttggttggatatatcaaaatggagacggcaccgagaaaaatttggataaggcaaaattccactttaccgttgcagctaaaagtgggatgagagaagcctatgaagaattaaaaaaattagaatccaacaagtaa

SEQ ID NO: 52930 - protein, 720 aa, Yersinia pestis KIM
MKKKLVALLILSYPSVAYLKQPPPAVPKPITFVAKIDNIDFNKTAIDSDMKLLLADRFHFKTKTPCNKNTLSGRPESFGLTSEVYAAKIKSLLVEILSERYLFLTIDQCDRGGTPMLTNIEVCTEALCGAEFMKKESYLWLNQDLKATVKRQATSVIPMPLTFDKEKQLWKVAGWFIESSEETEELIPSKLLAFEGYTDDETFKTQKFVSTFKSYYSSGNIQHILTYNKEGKEDGKYDSYYDEKGKLAETLVFKNGLVNGEYIIYHENGAIESKRHFIDSKIADGECPHYYDNGKIKENHSYLNNKLEGKYFEYFPDGKIKDERTYHAGKVVGKYTVYFESGKIRAIYNKNNKDQYHGTNEEYSPEGQLVSKSTYKEGKQLSSQTWYKNGKMRQEEIYDNEGRKNGVSREWFDNGQLNTSTSYKNDILDGDSQKWNEQGEIVSLSPYKDGKLQGEHKYYDSGKLLYTTMYKNDKKDGPDRRWSINTGKLIEEMPYVEGIRSGIKKEFNDRTGRLLTTTPYVNNEIQVTGETYNADGVSIIHCYINNKSIDSLYNPIEIREKASQSDDNAQYELGKYHYTCQDYDRGLKWLEKSADHKNIKALFLLAQMYNEGDGVKEDQTKYFSYLLKAAQLGLSDAQVEIGYLYLVGEGVEKNLPEAYQWHIKAAEQGNVHAHYNLGWIYQNGDGTEKNLDKAKFHFTVAAKSGMREAYEELKKLESNK

SEQ ID NO: 52931 - DNA, 1137 bp, Escherichia coli CFT073
  CDS (1)..(1137): transl_table=11
atgggaaaaataaaatattggctaatagtaggatttattatactttttgcgattttttacattgctattagtgacagggattctacgctttctaggttgaaatcagcaggtgaaaacggagatgtagaagctcagtatgctttggggctcatgtatttgtatggagaaattctggatgttgattatcagcaggcaaagatttggtatgaaaaagccgctgaccaaaatgatccgcgtgcgcaggccaaactcggtgtgatgtatgcaaatggtctcggggtaaatcaggattatcagcaatcaaaattatggtatgaaaaggcggctgcgcaaaatgatgttgatgcgcaatttttgcttggggagatgtatgacgatggtctcggggtaagccaagactaccagcatgcaaagatgtggtatgaaaaagcggctgctcaaaatgatgagcgtgctcaggtcaatctcgctgttctatacgcaaagggtaatggtgttgaacaggattatcgacaggccaaaagctggtatgaaaaggctgcagctcaaaatagtcctgatgcgcagttcgctcttggaattctgtatgccaatgctaatggtgtagagcaggactatcagcaggcaaaagactggtatgagaaagcagcagaacaaaatttcgccaatgctcagtttaatcttggtatgctctattacaaaggtgagggtgttaaacaaaactttcggcaagccagagaatggtttgaaaaagccgcatctcaaaatcagccgaatgcccaatataatttaggtcagatttattactacggtcagggtgtgactcagagctatcgacaggcgaaagactggtttgaaaaagcggcagagaaaggtcatgtcgatgctcaatataatctcggtgtaatatacgaaaatggtgaaggtgtgagtcagaactatcaacaggcaaaggcttggtatgaaaaggcagcctcacaaaatgatgcgcaggcgcagttcgaacttggcgttatgaatgaactgggtcagggtgaaagcatagacctgaaacaagcaagacattactatgagcggtcatgtaataatgggcttaagaaaggttgtgaacggttaaaagagttattatacaaatag

SEQ ID NO: 52932 - protein, 378 aa, Escherichia coli CFT073
MGKIKYWLIVGFIILFAIFYIAISDRDSTLSRLKSAGENGDVEAQYALGLMYLYGEILDVDYQQAKIWYEKAADQNDPRAQAKLGVMYANGLGVNQDYQQSKLWYEKAAAQNDVDAQFLLGEMYDDGLGVSQDYQHAKMWYEKAAAQNDERAQVNLAVLYAKGNGVEQDYRQAKSWYEKAAAQNSPDAQFALGILYANANGVEQDYQQAKDWYEKAAEQNFANAQFNLGMLYYKGEGVKQNFRQAREWFEKAASQNQPNAQYNLGQIYYYGQGVTQSYRQAKDWFEKAAEKGHVDAQYNLGVIYENGEGVSQNYQQAKAWYEKAASQNDAQAQFELGVMNELGQGESIDLKQARHYYERSCNNGLKKGCERLKELLYK

SEQ ID NO: 52933 - DNA, 1944 bp, Escherichia coli CFT073
  CDS (1)..(1944): transl_table=11
atgaactgctgggaaatattagctttacaaccaggtgcggaagaacgagatattaagcgtcgttatgcgcaactggtaaaaaattgccgcccggaagatgatcccgcagcctggcaacaattgcacgatgcttatgaacaggctttacgttatgacgacgaagatcagtggcaagaagaggaagaagagcaaccgatcaatatgtccaggggtattgttcatcctcgtcctgtgatgacatttcgcgcacccaacaccttttctggtcatccacttcctgatgtcactattaaatcagagggggaattcacctggcgagccgtgctggatatgctctgtgaggagaatgaagcaacccccgaacacgcccccatgcaacttgctaaggcgttatctttccttgagaaaaaagatctcagctcacgaatgtgctttgaagaaacgttattactgcatcttcatcgggtattccggccattattaactctcgctgcagcacaaacgttcagatggcatttagtcgcaggcagtcgtcaacccgtaatccagacagaaattaacgaaagttgtcttctttattatcgcatcgaaaaacaaattacccctttctttgccagtaacttgtctccactggaagaaatggaaaacgggaaggaaatggctacgatttatcaatcattaaaggataatgaagagagcctgaaatggtttgatatcgcagtattaaataaagttgctgaatttgaactatcagacaactatatggcattgttaatagagtgtttatcatattccttgcgaaaagaaaaaatgattcgcaagtggaaattaacagaacgcttcaataatttagcaatgcaacatcatagtggatataaaaagctgctaaatgccataaaattaaaaggtcttttttattatccatcttctgtataccagtcctgcttacatgctgcagagcaaggctattcactagcctggtattctcttggcaaaatgtattacgaaggtgatgaggtttcacaggatctaaaattagcctttaactggtttacccgcgccgcgcagcataatgttatcgatgctctgtatgcgctgggtatcatgtatagcgatggaaggggcacggataagaatatttgtgaggcacgaaaatggtttttacttgctgcccaaaatggcaacacatctgcgcaatatgagcttgcccgtatctcacgctttgctgttgagccattacgaaattatgaagaagcattgcagtggtatttatctgccgccacacaaggacatgaggttgcccagtatgagttgggacaaatgtatatacaagggattggcgtggagcgcgatgaggttcaggcccatcgttggtttttgcaatcagcagaacagggatatttacatgcgcaatatcatactgccaggttgtatagcggaagtgagagtattccacaggaccaggaaaaagcgctgtactggtttaccaaagcagcaaaaaatggggcagatggggcaggggatgccatgtatgaattggggaaatattatttaaccaacaatgatgatcctgaaaataacgcagaggctactcaatggcttactggtgcagcgcagcgtggtcgaatagaggcgatatttttgttagctgaaatgtatctgtacggtacaaaatatatcgcaaaagatgaaaatcatgcgctgcactggtacgaaaaagcggcgcgtttaggggcgaccgaagcgcagcaccagactgcggcaatgtatgctcaggggacgggcactaaaattgataataaacaagcatggatgtggctaacaattgccggaaataacaacccctggattgaaaaagatgcgttgcgatgcttaatgtctgaacaggatattcaggatgcagaacaaacggctgcaaattgcaaacgtctgctaaggatttaa

SEQ ID NO: 52934 - protein, 647 aa, Escherichia coli CFT073
MNCWEILALQPGAEERDIKRRYAQLVKNCRPEDDPAAWQQLHDAYEQALRYDDEDQWQEEEEEQPINMSRGIVHPRPVMTFRAPNTFSGHPLPDVTIKSEGEFTWRAVLDMLCEENEATPEHAPMQLAKALSFLEKKDLSSRMCFEETLLLHLHRVFRPLLTLAAAQTFRWHLVAGSRQPVIQTEINESCLLYYRIEKQITPFFASNLSPLEEMENGKEMATIYQSLKDNEESLKWFDIAVLNKVAEFELSDNYMALLIECLSYSLRKEKMIRKWKLTERFNNLAMQHHSGYKKLLNAIKLKGLFYYPSSVYQSCLHAAEQGYSLAWYSLGKMYYEGDEVSQDLKLAFNWFTRAAQHNVIDALYALGIMYSDGRGTDKNICEARKWFLLAAQNGNTSAQYELARISRFAVEPLRNYEEALQWYLSAATQGHEVAQYELGQMYIQGIGVERDEVQAHRWFLQSAEQGYLHAQYHTARLYSGSESIPQDQEKALYWFTKAAKNGADGAGDAMYELGKYYLTNNDDPENNAEATQWLTGAAQRGRIEAIFLLAEMYLYGTKYIAKDENHALHWYEKAARLGATEAQHQTAAMYAQGTGTKIDNKQAWMWLTIAGNNNPWIEKDALRCLMSEQDIQDAEQTAANCKRLLRI

SEQ ID NO: 52935 - DNA, 1473 bp, Escherichia coli CFT073
  CDS (1)..(1473): transl_table=11
atgaaaaaatctcttctggctgtaatgctgacaggactgtttgctctcgtttctcttcccgctctgggaaatgtcaatctcgaacaattaaagcaaaaagctgaaagtggagaagctaaagcacagttggagctgggatatcgctattttcagggtaatgaaacgacaaaggatctcacccaggcgatggactggtttcgccgtgccgcagagcagggatacaccccggcagaatatgtactggggttacgctatatgaacggtgaaggtgtgccgcaagattatgctcaggcagttatctggtacaaaaaagcggcactgaaggggcttccgcaagcgcagcagaatctgggtgtaatgtaccatgaaggtaatggcgtgaaggttgataaagccgaatctgtgaaatggtttcgcctggcagcagagcaaggtcgtgacagcggccagcaaagtatgggagacgcatattttgaaggcgatggtgtgacgcgggattacgttatggcacgtgagtggtatagcaaagcagcggaacaaggtaacgtctggtcctgtaaccagcttggttatatgtattccagaggtttaggcgttgaaagaaacgatgccatatcggcacaatggtatcgaaaatcagcgacatcaggcgacgagttggggcagcttcatttagccgatatgtactatttcggtatcggtgttactcaggattacactcagtcacgggtattattttcccagtcggcagagcagggaaattctattgcgcagtttcgtctgggatatatattggagcaaggtttagcgggagcgaaagagccgttaaaagcactggagtggtaccgtaaatcggcagaacagggaaattccgatggtcagtattatttggctcatctgtatgataaaggcgcagaaggtgtagcaaaaaatcgagaacaagccatctcctggtacacgaaatcggcagaacagggggatgctaccgcacaggctaatctcggcgctatttacttcagacttggttcagaagaagaacataaaaaggcggtggaatggtttcgcaaggccgccgcaaagggtgagaaagcggcgcaatttaatttgggtaatgctttactccagggaaaaggtgttaaaaaagatgagcaacaggccgcaatctggatgcgaaaagccgcagagcaaggattaagtgcagcgcaggtacaattaggtgaaatctattattatggcttgggcgtagaacgtgattatgtgcaggcctgggcgtggttcgataccgcatcgaccaatgatatgaatctttttggtacagaaaaccgcaacattacagagaaaaaactgacagccaaacaactgcaacaggctgaattattatcgcaacaatatatagaaaaatatgccccggaagcctgggcgagaatgcaaaagcttaaagcgcaatcagcggtaaagacgggtaataaataa

SEQ ID NO: 52936 - protein, 490 aa, Escherichia coli CFT073
MKKSLLAVMLTGLFALVSLPALGNVNLEQLKQKAESGEAKAQLELGYRYFQGNETTKDLTQAMDWFRRAAEQGYTPAEYVLGLRYMNGEGVPQDYAQAVIWYKKAALKGLPQAQQNLGVMYHEGNGVKVDKAESVKWFRLAAEQGRDSGQQSMGDAYFEGDGVTRDYVMAREWYSKAAEQGNVWSCNQLGYMYSRGLGVERNDAISAQWYRKSATSGDELGQLHLADMYYFGIGVTQDYTQSRVLFSQSAEQGNSIAQFRLGYILEQGLAGAKEPLKALEWYRKSAEQGNSDGQYYLAHLYDKGAEGVAKNREQAISWYTKSAEQGDATAQANLGAIYFRLGSEEEHKKAVEWFRKAAAKGEKAAQFNLGNALLQGKGVKKDEQQAAIWMRKAAEQGLSAAQVQLGEIYYYGLGVERDYVQAWAWFDTASTNDMNLFGTENRNITEKKLTAKQLQQAELLSQQYIEKYAPEAWARMQKLKAQSAVKTGNK

SEQ ID NO: 52937 - DNA, 1005 bp, Vibrio vulnificus CMCP6
  CDS (1)..(1005): transl_table=11
atgacacgtcgttgtaccgcgtggttggctgcgcttccccttcttctttccagtgtttctcatgcgtatgatcttacttacgaagattttgacgaagaaacgttagcagtgttaaagcaagccgaaacgtctaaagatgcacaactgcttttcaaagcgtcagagatcctcatcgacgaatcgatgatgcaagaaaacgttgatcaagggttgctttatctcaagcagtccgccgatctcgataacctagaagcactgagtactttggcggagcactattactatgaggaagcatatcagcaggctctaccgctctatcaaaaactggccgagaaaggtgatgccattgcgctttactacttgggtgtgatgtattttgatggtgaaggtgttgaacaggatcagaaaaaaggcaacgaatactacctcgcatccgcgcagaaaggcgatgaagatgcgatgttccaactggctttttcatacaatgacggtttaggcattgagcaagattttaagcaggcgaaccattggttcgcgagcgccgctgaaaagggacatgcattggcgacttttaatcttggtgtcagttacttgcaaggtgaaggcgtggcgcgtgactgccaaaaagccattactctgtttgagcacgccattgaacttgatgacgaatcaaaggcctatcagatcatgggtaaaatctactccgagcctagatacatgcgatcttgtggaatcaaatcggcagactacaaaaaagcgctggagtatttccaatatgcagcggaatggggtgaggagtacagccagtttatgattggttctttccactttaaagggcgtggtgtggagcgtaattacgtcaaagcactggcttggtacaacatcgcttatgaaaatggttatgatgaagctgaaaaggcgatcaaagaagtgaaaggaaaaatgaacgagaaagagatcgccaaagcaggtgaatatcaagaagcgattgaagaaacgctataa

SEQ ID NO: 52938 - protein, 334 aa, Vibrio vulnificus CMCP6
MTRRCTAWLAALPLLLSSVSHAYDLTYEDFDEETLAVLKQAETSKDAQLLFKASEILIDESMMQENVDQGLLYLKQSADLDNLEALSTLAEHYYYEEAYQQALPLYQKLAEKGDAIALYYLGVMYFDGEGVEQDQKKGNEYYLASAQKGDEDAMFQLAFSYNDGLGIEQDFKQANHWFASAAEKGHALATFNLGVSYLQGEGVARDCQKAITLFEHAIELDDESKAYQIMGKIYSEPRYMRSCGIKSADYKKALEYFQYAAEWGEEYSQFMIGSFHFKGRGVERNYVKALAWYNIAYENGYDEAEKAIKEVKGKMNEKEIAKAGEYQEAIEETL

SEQ ID NO: 52939 - DNA, 3498 bp, Bradyrhizobium japonicum USDA 110
  CDS (1)..(3498): transl_table=11
gtgggaaggctggagtcgccgggtggggcgccgaagtcggaaccggacagagtcatgaattcgcgcgtatcgtggagtgttgacggcatcgatccctccgtccgggagcgggccgaagctgctgcgcgcagagccggcatgtcactcaacgattggctgaactccacgctcggcgaaactgccccgccaaactttcgcggaccttacgagcagcgtccgcaacacatgccgaaccaggtaccgagtccggaaagccgcgaagtcgccgacatccaccagcggctcgacgcgatcacccagcagatcgaacggatttcgaagcccacccctcgccaggactcttcacgacaagaggtctcgcgcgagcagggcgtcgcacgccagctcaacgacgcgatctcgcggctcgatgcgcgcctgtcgcaaatctcaaagccgcagcagctgcaaccgcagccgcctcaggctccgcggcccgcacccgtcgagacgcgccagcgccaggccgatgcggtcgagcgcgcggccgcgcaggtctatcgcagttcgccgccgctgagccccgcctcgttcgacgtcgccgttgccgagatcacggcacggcagagcgagctcgacggctttacgcccaggcagatgccgccgcgcgccgcgccgtcgattgcgcccgcggcagctcctttcgccgcgccgatggcgccgcccgcgcccgcctacgctccgccgccaccgcagccggggccggatttctcgtcgctcgagcgccatctgctcaagatcacgagccagatcgagtcgctccagcgccccgacaataccgagcaggcgatcaacgctttccgcagcgagctcgcggagatccgccacgccatcaccgaggcgatgccgcgccgcgcgatcgaatcgatcgaaaacgaaatccgttcgctgcaccgtcgcatcgacgagacccgctcgtccggcaccgacggccaggttctgtcaggcatcgagcacgcgctgtccgacatcaagcaggtgctgcgcacgctgacgccggccgagcagctcaccggctatgacgaggcgatccgcaatctcggcgccaagctcgatctgatcctgcgcgccaatgacgatccgtccacggtgcgccagctcgaaggcgcgatctcggcgctgcgcggcatcgtctccaacgtcgcctccaacgaagcgctggcacggctgtccgaggacgtgcagctgttgtcgtccaaggtcgaccagatcacccgctcgtccggccccggcgacagctttgccgtgctcgagcagcgcatcgcggcactcaccgccgcgctggagacgcgcgagcggcctcagcccgccgagagcaccgagcacctcgaggccgcaatccgtgcgctgtcggatcgtttcgaccgtatgcaggtcggcagcgattcggcctcgacctttgcgcatctcgaacagcgcgtctcctatctgctggagcggatcgaagctgcctccgatccgcgcaacaccaatctcagccgcgtcgaggacgggctgcacgacatcctgcgccatctcgaacggcagcaggcgacctattccgcgctcgccgagagccgcagttcggcgccgtcccccgattccggcatggtcgatctcgtgaagcgcgagctctccgacattcgcttcagccaggccgaaaccaaccgcagcacccaggactcgctcgaagccgttcacagcgcgctcggccacgtcgtcgatcgcctctcgatgatcgagggcgatctgcgcgcggtgcgcaccgcgccgccggcccctgcgccgcagccgatgccgatgccgatggctgcgcccatggagcccgcgccgatggcgcgcgaagctcggcagcaagcacagcagccgaaatacgatccgaagcctgagctgccgaatccggccgccatgcagcagccggcgcattccgccttcgtggccgcgccgcgcgaattccacgccgccgcggcacctgccgctccgccgccggtcccgatggcgccgacggcaccgcaagccgcaccacccttgccgccgcgcgcgatcagtgaaatcctggagccgcatacggcgcccgcccgcgccgcgttggcgccggaattgccgccggatcatccgctcgagcctggcacgcggccgggcggacgcgtggccacgccgtcggagcgcattgccgcctccgagagcgcgatcagcggaattcccactgctccgaaggagccggtgtcgtcgtcgagcttcatcgcggccgcgcgccgcgccgctcaggccgccgccgcgcagccgcccgagaagccggcccgtggcgccaaggccgcaatcgcccgcgccaaggacaagggccaggaaggcgcctcgaccatcacctcgaagatccgctcgctgctggtcggcgcgagcgtggtcgtgatcgtgctcggcaccttcaagatggcgatgaacctgctcgatggcggcagcacgccgccggcaccgcaggcgatggaaaattcggtgagcgagcccgcgccgcaggcttcgccgcctccggtcgagaccaagcccgccatacccgagcaggtcacgccctcgatgacctcgccgacgccgatcggacggcaatcccagaacaatgccgcgccggctccaacgcccaattccggcagctcggcctcggttgaaatcccgcccgctccggcggccgtgccgcctgccgccagcgacgtcaccggcgcgctgtcgggggccagccgcgcgcggctcggcctcgtccaggtgccgccgagcgagaaactgcccgacgctatcggcggcccaggcttgcgcaccgccgcgatgaagggcgatgccactgccgcctacgagatcgccgtgcgctttgccgaaggcaagggcgtcgctgcaaactacgacgaagctgcgaaatggtacgaccgcgcggcgcaggccggcgtgatgcccgcaaccttccgcctcggcacgctctacgaaaagggcctcggggtgaagaaggacgccgatatcgcccgccgctactacacgcaggccgccgagcgcggcaacgccaaggcgatgcacaatctcgctgtgctcgatgccgacggcggcggacgcggcgccaattacaagagcgcggcgcagtggttcaggaaagcggccgaccgcggcgtcgccgacagccagttcaatctcggcatcctctatgcccgcggcatcggcgtcgagcagaacctcgccgagtcctacaaatggttcagcctggcagccgcccagggcgatgcggacgctgccggcaagcgcgacgacgtcgccaagcgcctcgatccgcaatcgctcgccgccgccaagctcgcgatccagactttcagcgccgaaccgcagcccgacgatgccgtcaacgtcccagccccgaacggcggctgggacagcgcgccgcaggcgaacgccaagcccgcgccgaagccggtcgcgacgaagcggtcggcgtcagcggcgcactga

SEQ ID NO: 52940 - protein, 1165 aa, Bradyrhizobium japonicum USDA 110
MGRLESPGGAPKSEPDRVMNSRVSWSVDGIDPSVRERAEAAARRAGMSLNDWLNSTLGETAPPNFRGPYEQRPQHMPNQVPSPESREVADIHQRLDAITQQIERISKPTPRQDSSRQEVSREQGVARQLNDAISRLDARLSQISKPQQLQPQPPQAPRPAPVETRQRQADAVERAAAQVYRSSPPLSPASFDVAVAEITARQSELDGFTPRQMPPRAAPSIAPAAAPFAAPMAPPAPAYAPPPPQPGPDFSSLERHLLKITSQIESLQRPDNTEQAINAFRSELAEIRHAITEAMPRRAIESIENEIRSLHRRIDETRSSGTDGQVLSGIEHALSDIKQVLRTLTPAEQLTGYDEAIRNLGAKLDLILRANDDPSTVRQLEGAISALRGIVSNVASNEALARLSEDVQLLSSKVDQITRSSGPGDSFAVLEQRIAALTAALETRERPQPAESTEHLEAAIRALSDRFDRMQVGSDSASTFAHLEQRVSYLLERIEAASDPRNTNLSRVEDGLHDILRHLERQQATYSALAESRSSAPSPDSGMVDLVKRELSDIRFSQAETNRSTQDSLEAVHSALGHVVDRLSMIEGDLRAVRTAPPAPAPQPMPMPMAAPMEPAPMAREARQQAQQPKYDPKPELPNPAAMQQPAHSAFVAAPREFHAAAAPAAPPPVPMAPTAPQAAPPLPPRAISEILEPHTAPARAALAPELPPDHPLEPGTRPGGRVATPSERIAASESAISGIPTAPKEPVSSSSFIAAARRAAQAAAAQPPEKPARGAKAAIARAKDKGQEGASTITSKIRSLLVGASVVVIVLGTFKMAMNLLDGGSTPPAPQAMENSVSEPAPQASPPPVETKPAIPEQVTPSMTSPTPIGRQSQNNAAPAPTPNSGSSASVEIPPAPAAVPPAASDVTGALSGASRARLGLVQVPPSEKLPDAIGGPGLRTAAMKGDATAAYEIAVRFAEGKGVAANYDEAAKWYDRAAQAGVMPATFRLGTLYEKGLGVKKDADIARRYYTQAAERGNAKAMHNLAVLDADGGGRGANYKSAAQWFRKAADRGVADSQFNLGILYARGIGVEQNLAESYKWFSLAAAQGDADAAGKRDDVAKRLDPQSLAAAKLAIQTFSAEPQPDDAVNVPAPNGGWDSAPQANAKPAPKPVATKRSASAAH

SEQ ID NO: 52941 - DNA, 1530 bp, Salmonella enterica subsp. enterica serovar Typhi Ty2
  CDS (1)..(1530): transl_table=11
atgcgtttttcatcaattttcaaaataataatattaaatatatttatttcaaaaatggctcacgctgctgtctgcgaggagcgctatccccccgactcagaagaatgccagtacgttcaggaattagagcaaaaagcggaacaaggagatgaaggcgcgcagttctcgcttggaagctggtatgcggaggggcgatacgttaagcctgattataaactagccataaaatggctggagaaagcgggtaaacaaggttctgatttttcctatttcatccttggctatcattacaactatggtgaaaattttccacttagtcggcaaaaagcgctggagtggtatcgcaaggcggcagaactaggggatagtagtacgcaagaaatcctcggtgacgcctatatgtatggcgatgggtttccccaaaatacccagctagcgctggagtggtatcgaaaagccgcctctccaaccaatgatgcgggcgttgtccgcggccagggttcagcttcgtcagcacaatttaagcttggagtaatgtacgcccacggtcagggcgttcctcaggattatcagcaaacggcgatcttgatgcgtaaagcggcggaaaatatgtactaccccgcgcaactttatctcggtgttgcctatttttatggtgaaggcgtgcctcaggattatcgtcaggcagtttactggcttaatgaaggtataccaggcagctatacgccaggccacattccgctgaatgcgctctatgataaagcgcatcccgctgaccaggttcactctcagacgtggtatcgaaaaacagcgcaacgcgtgatggcaaaggtacagttcaattttggcgtatggtattacaacggttatcacttattgaaagatcacaatctggcgctggagtggtatcgcagagccgcagcgcagggattggccgaggcgcaggatgcgatcggcgtgatgtttatgcagggcgaggccgtttctcaggactaccaacaggcgctggcgtggtatcgcaaagccgcacgccagggactgcctgctgcgcaaacgcatctgggcatcatgtctgcttttggtcgcggcgtcgcgcaaagcgacagacaggctatcgcatggtatcgaaaagcagcaaaacaggattttgcgaaagcgcaatatcagcttggcgtagcatatagcatgggaagaggcgtgcctgaaaatagccggaatgcgctgaagtggtaccttaaagcggcagagcaggggtttactccggcacaattagcgcttggggaaatttatgctcatgggcgccagggggtgcctaaagataataagcaggcctatatttggtattacatggcaagtatatatacggaaaaatctaaggatgattgttcagcgctcattgccgaaagaaaccgactcaagggaacgcttaccccagatcaacttagcgagacatatgccgcctttgatctcatcaggcgaaaaatcaaccagtcaaaggaggcgaaaaagattgccaggaagaagtattga

SEQ ID NO: 52942 - protein, 509 aa, Salmonella enterica subsp. enterica serovar Typhi Ty2
MRFSSIFKIIILNIFISKMAHAAVCEERYPPDSEECQYVQELEQKAEQGDEGAQFSLGSWYAEGRYVKPDYKLAIKWLEKAGKQGSDFSYFILGYHYNYGENFPLSRQKALEWYRKAAELGDSSTQEILGDAYMYGDGFPQNTQLALEWYRKAASPTNDAGVVRGQGSASSAQFKLGVMYAHGQGVPQDYQQTAILMRKAAENMYYPAQLYLGVAYFYGEGVPQDYRQAVYWLNEGIPGSYTPGHIPLNALYDKAHPADQVHSQTWYRKTAQRVMAKVQFNFGVWYYNGYHLLKDHNLALEWYRRAAAQGLAEAQDAIGVMFMQGEAVSQDYQQALAWYRKAARQGLPAAQTHLGIMSAFGRGVAQSDRQAIAWYRKAAKQDFAKAQYQLGVAYSMGRGVPENSRNALKWYLKAAEQGFTPAQLALGEIYAHGRQGVPKDNKQAYIWYYMASIYTEKSKDDCSALIAERNRLKGTLTPDQLSETYAAFDLIRRKINQSKEAKKIARKKY

SEQ ID NO: 52943 - DNA, 1848 bp, Rattus norvegicus
  CDS (1)..(1848)
atgcaggaagcagaagccatctatcagagcgggatgaagatcctgaacggcagcaccaggaagaaccaaaagagagaagcatatcggtaccttcagaaggcagcaggcatgaatcacaccaaagccctggagagagtgtcctatgctctcttgtttggtgattacctcacacagaatatccaggcagctaaagagatgtttgagaaactgactgaggaagggtctcccaaaggacaaactggtcttggctttctctacgcttctggacttggtgttaattcaagtcaggcgaaggctcttgtgtattacacttttggagctcttggaggcaacctgatagcacatatggttttgggttaccgctactgggctggcatcggagtcctccagagttgcgagtcggcactgacccattatcgtcttgttgccaatcatgtcgctagtgatatctccctaactggaggctctgtagtccagagaatacggctgcctgatgaagtggaaaacccagggatgaacagtgggatgctggaagaagatctgattcagtattaccagttcctagctgagaagggtgatgtccaagcacaggttggtctgggacagctgcatctgcatggagggcgtggagtagaacagaatcaccagagagcatttgactacttcaacttagcagcaaatgctggcaattcacatgctatggccttcctgggaaagatgtattctgagggaagtgacatcgtgcctcagagtaacgagacggcacttcactacttcaagaaagctgctgacatgggcaacccggtgggacagagcggacttggaatggcctacctctacggaagaggagttcaagttaattatgacctggcactcaagtatttccagaaagctgctgagcaaggctgggtggacgggcagctgcagcttggctctatgtactacaatggcattggagtcaagagagattataaacaggccttgaagtattttaatttagcttctcagggaggccatatcttggctttctataacctagcacagatgcacgccagcggcacaggggtgatgagatcctgccacactgcagtggagttgtttaagaacgtgtgtgagcgtggtcgctggtcagagaggctgatgactgcctacaacagctataaagacgacgactacaacgccgctgtggtccagtacctcctgctggcggagcagggctacgaggtggcgcagagcaacgcagccttcatcctcgaccagagagaagcaaccattgtaggtgagaatgaaacttaccccagagctttgctgcattggaatagggccgcctcccaaggttatactgtggctagaattaaacttggagactaccatttctatggatttggcactgatgtggattacgagactgcgtttattcattaccgcctggcctcagagcaacagcacagtgcccaagctatgtttaacctggggtacatgcatgagaagggcctaggcattaaacaggatatccacctggcaaaacgcttttatgacatggcagccgaagccagcccagatgcacaagtacctgtattcctcgcactctgcaaattaggtgtcgtctatttcttacagtacatacgggaagcaaacattcgagatctattcacacaactggatatggaccagctcttgggacctgagtgggatctttacctcatgaccatcattgcactgctgttgggtacagtcatagcctacaggcagcgacagcaccaggacataccagttcccaggcccccagggccacggccagctcctccccagcaggaaggacccccagagcagcagccaccacagtag

SEQ ID NO: 52944 - protein, 615 aa, Rattus norvegicus
MQEAEAIYQSGMKILNGSTRKNQKREAYRYLQKAAGMNHTKALERVSYALLFGDYLTQNIQAAKEMFEKLTEEGSPKGQTGLGFLYASGLGVNSSQAKALVYYTFGALGGNLIAHMVLGYRYWAGIGVLQSCESALTHYRLVANHVASDISLTGGSVVQRIRLPDEVENPGMNSGMLEEDLIQYYQFLAEKGDVQAQVGLGQLHLHGGRGVEQNHQRAFDYFNLAANAGNSHAMAFLGKMYSEGSDIVPQSNETALHYFKKAADMGNPVGQSGLGMAYLYGRGVQVNYDLALKYFQKAAEQGWVDGQLQLGSMYYNGIGVKRDYKQALKYFNLASQGGHILAFYNLAQMHASGTGVMRSCHTAVELFKNVCERGRWSERLMTAYNSYKDDDYNAAVVQYLLLAEQGYEVAQSNAAFILDQREATIVGENETYPRALLHWNRAASQGYTVARIKLGDYHFYGFGTDVDYETAFIHYRLASEQQHSAQAMFNLGYMHEKGLGIKQDIHLAKRFYDMAAEASPDAQVPVFLALCKLGVVYFLQYIREANIRDLFTQLDMDQLLGPEWDLYLMTIIALLLGTVIAYRQRQHQDIPVPRPPGPRPAPPQQEGPPEQQPPQ

SEQ ID NO: 52945 - DNA, 3135 bp, Coxiella burnetii RSA 493
  CDS (1)..(3135): transl_table=11
atgaaacgaatagctgtttttatcttaacgttaagttttttttcaattagttattctgataaaaaccctgtcttccaggagtattacgaaggcaactatcgcgcggccgaaactggcttaaaacaattagcggaaaaaaataatggggaagcgacattttatttggccaccatgtatatgaatggttttggagttcggagagattttgagaaaggatttgattatatgacgcgcgcggcggaattaaaatatttgccggcccaattatatctggggaattattattttcaacagcagaaagatttggaaaaggccgtgccttggtttaaaaaagcagcggatgctggggatgctggtgcgcaactttttactggaattagttatttgaatggatacggtgttaaaaaaaatattgatattgctagaaaatatttcattagagccgctcaaaacgaaattccaatgggtcaatatgagctagccaaaattttcttagccagcaggcacgctggcgatagacgaatgggaagaatttggttaaccaaagcggctgataaatataactatccagatgctcagtatttactgggtacaatgctatatactggaaatgaagcagaaaaagatcctgtcaaaggggttgaatggttggaaaaagcggctgctaacggaagtaaagaagcaagcaaaacattggataaaattaatcgaattaataccagcgatgccaaggcgaatagtgagaatcgttctgagcccacgccttggcaaatcatggttggactcatgcaaaaagcaggcgttcagttaaacaaccccattacagtcactgcgtctatcaacaattttactaaaacgccgaaatccatggccttagataaaaattctataattaaattaaatttaaatttagtaaattctaaagacattccgcccgaaaaaattctatcttacatgacacaattaaattataaagaagaaaaatttgatctaaccgtccctgcttatccttttgaaatgccgcctggagctaataactacaaagaggcttttcaatccctctcccgagtggccaattacggttatgctcaatcactctttagattggggcaaatgtatgagaatggattaggtgttcaaaaagaccctgaaactgcatttcaattgtatatgaaagcggcggaacaaaattatttaaaagcccaatacgctattggaacttattatttacaagggaaaggggttcctcaagattatgagaaagccatcagttggtttataagggctgctctgaaaggcagtttacaagctcaatttgtcctaggcaacatttatgagcgaggcattaaagctagcaataataaaattcttttcaagaactttgatagggcgaaagctatgtacagcttagctgtgggtggaaacttacctattgctgcgtatcgtttagcagaactttatgtcagcggttttctaaatcccgataataatgtttctttagaaacacaaaattggaaaaaagcctatgcactttaccaaaaagcagcaaaaagtggcctagagaaagctgatgtggctctaggttatttttatttgcaacaaaatcagaccactttggcagagaaaacgtttgagatagcacaaaaagcttatcaaacgaatgatccagaagccgctatgttattagctattttatatgatcgtggtttcggagttaatagaaacagccgaaaatcagccgaaattttagaaaaactttcaaaacaaaacaatgctattgcacaatttatgttaggtaattattaccttaaaaacaagcgaaaagagaatatagcaatcagtcttttagaaaagtcagctaatcaaggaaacggttatgcgaagtataatttagctattttagcgaaacaaaataaatacaccaagccgggagaaaactttttatcgttactgattagagccgctaaccattacgataaaataaaagagattttggcggattattatcttttagacaccccagttcccggatcagaaaaaaaagctgtcgctatttaccaagaattagctaataaacaagatccagcagcggagttaaaattaggatttatgaatgagcatggtcttctttttccgaaagattaccataaagcagaagagtggtaccaaaagtcggctgaacaagggaatcccatcgctcaatatttattaggaaacatgtactatttgggtcggggcgttgatcgcgatgttaacaaggccatcgattggttaaaaaaatcggctgcccaaaattacgtgcccgctaaagtaggacttggctttatttatgaaatgagcaaacataattatccagaggctaaaaagtggtataccttagcttctaagtttcataaccctcaagcgctctataatctgggtttaatgtatgagtatggaaaaggagttaaaagtgatccacaaaaagctttccgcttatacaaagacgcggcccaaaacgggctcgatttggcggcggttcaggttgcaggaatgtatctaaagggaacgggcattggttttgatcctaacaccgcattaaaaatgtatagccaagcggcgcaaaaaaataattcatttgcgacttatcaattaggtttgatgagcgagtcaggcgttgcgcaaaaaatcgatcttaataaagctcgattgtactatgaaaaagccgctaaagagggaagcgtagaagcacaattagcgctagctcgattttatgaatttggtatcagcgttccagcagacatttcaaaatcgattaacttttaccaagccgcagctgctgaaggaaatgaatttgctaaacaacaattaacccgtttatcgaatcaaggaaaatcttcctctaatgcaatgccatttcaatgtgtgaatcaagtagctctggaaaaagtaaaaaattcattctggaaaaaagtcaccgactggattgcaccggtgcccaatattgattacatgaatgccattgattatttaaattctggtaaagttgagcaagcaacaacggctttgcagaaaattataaaagtaagacctaatttccagcccgcaagagagacggtttctcattatttctgtcaaaaagcagatagaaaatag

SEQ ID NO: 52946 - protein, 1044 aa, Coxiella burnetii RSA 493
MKRIAVFILTLSFFSISYSDKNPVFQEYYEGNYRAAETGLKQLAEKNNGEATFYLATMYMNGFGVRRDFEKGFDYMTRAAELKYLPAQLYLGNYYFQQQKDLEKAVPWFKKAADAGDAGAQLFTGISYLNGYGVKKNIDIARKYFIRAAQNEIPMGQYELAKIFLASRHAGDRRMGRIWLTKAADKYNYPDAQYLLGTMLYTGNEAEKDPVKGVEWLEKAAANGSKEASKTLDKINRINTSDAKANSENRSEPTPWQIMVGLMQKAGVQLNNPITVTASINNFTKTPKSMALDKNSIIKLNLNLVNSKDIPPEKILSYMTQLNYKEEKFDLTVPAYPFEMPPGANNYKEAFQSLSRVANYGYAQSLFRLGQMYENGLGVQKDPETAFQLYMKAAEQNYLKAQYAIGTYYLQGKGVPQDYEKAISWFIRAALKGSLQAQFVLGNIYERGIKASNNKILFKNFDRAKAMYSLAVGGNLPIAAYRLAELYVSGFLNPDNNVSLETQNWKKAYALYQKAAKSGLEKADVALGYFYLQQNQTTLAEKTFEIAQKAYQTNDPEAAMLLAILYDRGFGVNRNSRKSAEILEKLSKQNNAIAQFMLGNYYLKNKRKENIAISLLEKSANQGNGYAKYNLAILAKQNKYTKPGENFLSLLIRAANHYDKIKEILADYYLLDTPVPGSEKKAVAIYQELANKQDPAAELKLGFMNEHGLLFPKDYHKAEEWYQKSAEQGNPIAQYLLGNMYYLGRGVDRDVNKAIDWLKKSAAQNYVPAKVGLGFIYEMSKHNYPEAKKWYTLASKFHNPQALYNLGLMYEYGKGVKSDPQKAFRLYKDAAQNGLDLAAVQVAGMYLKGTGIGFDPNTALKMYSQAAQKNNSFATYQLGLMSESGVAQKIDLNKARLYYEKAAKEGSVEAQLALARFYEFGISVPADISKSINFYQAAAAEGNEFAKQQLTRLSNQGKSSSNAMPFQCVNQVALEKVKNSFWKKVTDWIAPVPNIDYMNAIDYLNSGKVEQATTALQKIIKVRPNFQPARETVSHYFCQKADRK

SEQ ID NO: 52947 - DNA, 1851 bp, Streptomyces avermitilis MA-4680
  CDS (1)..(1851): transl_table=11
atggacgttatgggggacaaggcaactctgttggaaacagggcgttttgcgcagcctgccgactttgtgcagcctgccgacattgcgcagccttccgaccgggacgaaaccggcgaggctgcagaggaggcgcgccgtcggctcgccgccgaagcgggcgacgtggaggcgaagagcgtcctcggagccatgctgctgcgacgcggcgatctcgacggcgcggagccccagctgcgcgccgcgaccgccgccggtgaccgtgccgccgccaacaacctgggtgtcctcctgcatcagcgtggatacgccgaggaggcggccggctggtggcggatcgccgccgtcgccggttccgccgcggccgcgcacgcgctcgggcgccaccaccgcgagcgcggcgacgagcccgcagccgagtactggctgcgccagtccgccgagcagggccacgccctcggcgcgtacgcgctcgccgacctgctggagcaccgcaacgacgcccgcgcggagcagtggatgcgggccgcggccgagcgcgggcaccgcgaggccgcctaccggctggcgcgcgcgcttgatcgcaaggtcgcggacgcgggtgagccgggcgctgacaacggtgtcataggagcaggcggtgaagaggccgcgcagtggtaccggcaggccgccgcgcgcgggcaccggcgcgcggcgctgcatctcggggcgatcctggagaagcggggcgagctcaaggaggccgggcggtggtatctgacgtccgccaaggacggcgaggcgcgcgccgcatgcgccctcggcttcctgctgcgggacgcgggcgacagcgagagcgccgccgtgtggtggctgcgggccgcccaggacggcgacgggaacgcggcgaacgcgctcggcgccctgcacgccgagcgcggcgagacccagaccgccgagcggtggtaccgggccgcgatggacgcgggcgatgtgaacggcgcgtacaacctgggcctgctctgcgccgagcagggacggaccgcgcaggccgaccagtggtaccggcgtgcggcgtacgccggacaccgggaggcggccaacgcgctcgccatcctgctgctccaggtcggcgacgcggccggggccgagccctggttctccaaggccgcggaggcggggagcgtggacgccgcgttcaacctcggcatcctgcacgccgggcgcggcaccgaggaagacgatgcggcggcactgcgctggtacgagcgggcggctgccgccgggcacaccgaggcggcgctccaggtcggcatcgcgttgctgcgcgacggggacgagcaggcggcggagcggcaccttcggtgcgcggcgggcgggggcagtgccgaggccgcgtaccggctggcgtccgtgctggacgcgcgccggccgcccgcgcccgcgcacgagctgggcgagcccgcgcacgagaagaccgagtgcgaggagtggtacgagcgcgcggcgtcccaggggcaccggcgggcgcaggtgcgggtcgggatgctggcggcggcccgaggggacgtggtggaggcggcccggtggtaccgggaggcggcggaagcgggctcccggaacggggcgttcaatctggggctgctgctggcccgcgagggaagtgagccggaggccgcgctgtggtggacccgggcggccgatgccgggcatggacgggcggcgttgcggctggccctggtctacgcgcgtcgcggggagcttgtcgaggggcagcggtgggcggaccgagcggtgtctctgggacccgccgaggtctccgagcgtgccgcccggctacgggatgccttgcggcaggagctgtcggcctga

SEQ ID NO: 52948 - protein, 616 aa, Streptomyces avermitilis MA-4680
MDVMGDKATLLETGRFAQPADFVQPADIAQPSDRDETGEAAEEARRRLAAEAGDVEAKSVLGAMLLRRGDLDGAEPQLRAATAAGDRAAANNLGVLLHQRGYAEEAAGWWRIAAVAGSAAAAHALGRHHRERGDEPAAEYWLRQSAEQGHALGAYALADLLEHRNDARAEQWMRAAAERGHREAAYRLARALDRKVADAGEPGADNGVIGAGGEEAAQWYRQAAARGHRRAALHLGAILEKRGELKEAGRWYLTSAKDGEARAACALGFLLRDAGDSESAAVWWLRAAQDGDGNAANALGALHAERGETQTAERWYRAAMDAGDVNGAYNLGLLCAEQGRTAQADQWYRRAAYAGHREAANALAILLLQVGDAAGAEPWFSKAAEAGSVDAAFNLGILHAGRGTEEDDAAALRWYERAAAAGHTEAALQVGIALLRDGDEQAAERHLRCAAGGGSAEAAYRLASVLDARRPPAPAHELGEPAHEKTECEEWYERAASQGHRRAQVRVGMLAAARGDVVEAARWYREAAEAGSRNGAFNLGLLLAREGSEPEAALWWTRAADAGHGRAALRLALVYARRGELVEGQRWADRAVSLGPAEVSERAARLRDALRQELSA

SEQ ID NO: 52949 - DNA, 3099 bp, Nitrosomonas europaea ATCC 19718
  CDS (1)..(3099): transl_table=11
atgacaggggcagtccgtcgaaatgtccgaaaaaggctcaataaaaatcagaagcaattaaggcagaactgggaaggttatcaccttttggaatttgccaagactatccggccagtcaaacaggatacaaaaagaagaaaagagcttgatgatcatctcgttagcaatggtatcggcggatttgaaacacttcagaaactgccagctgacaacaagactgcttttactactgaaaaatcagatggtgtttttgaaagcttggcagaatttcaagacatacccacttttgtttgctttttaaactttctggaattctgtcggaattccattccccgcaggccgttggatgtgtttgatggcaatgacacattatcaatcgaaattgacggaaaacgcaaagccgtaacgctggattatgcaatcgatgatttcaagaggcacgccaagactgttgaagaaagacttaaacttgaatcttcccagagcagcactggacaggcagacccaatccagccacgcctaaccatacctcaagcaagagagaacaatcccaattactttgccaatgctgttttggatgtgattggtcgtgacgagcaaaaatctcgtttaaaagcgtttttggaatgcgataaaaatgttgcatggtttcagcttgcaggtgttgccggacaaggcaaaagtcgcttggcatttgatttaatcaaagttgccgaagagttaggttttcgagccggttttcttacagaaaatgacatcaagtttttcaaagatcagtggaaggactggcaacccgacaagccctatttgctgatattcgattatgtgattgggcgcgaagaacaaatcaaacccatttttcaaactctaatttccaatcaagatggttattgtcacaatatccgtattctcttggttgaaaggcagcgatgggatcagggaaacgtaatagaaacacaagatcaaatcaacaaagatgcaccacggcaattaatagctatcagcaataaagcgccatggtttctcaagctgtgtgaagaaggtgactctgaaggtgaacgtctcgccccctttcgttttgataacggtgttgaagaacttaaagaacttggtcaagataatctggcttcaatagttaagcagttattatccggcaaaaccctcaccctatccgatgatgtgttagaagaaacattggaacggatcgataatactggccgtccattgtatgcttatttactagcacaacaattaagcgaaagtgaggaaggttttcgaagctggacaaagatcgatttgctgaatggtcagctgaagcgagataaaagacgctgggagcaggcttttaacgataaagcgccaacttggggggattctcatgaagctatgaagctagctgtacttgcaaccattgttcgccagataaattttgaggatgaaataattaaatcaaattttggccatatcgattcatctcttggaaaagaagccttagctattacgaacagctatcttgttaataatgataatcgtcctcataaaattcatgcattagaacctgacttattgggtgaatggtttgttttgtattgtttttaccaaggccttaatttcgaagaattattaaacattgcctgggaatattcaccaaatgatacagcaatgtttctaataagagttatgcaagattttattgatttaacaaaaacatataatgactggaacttaaccgaaaaactgttagcgcataaacccccgcatgaaaaccattatctagttttagccagagttgcagtctttatctcttatgaactaggtcgtagaaatttaacaatacctcataacattatcattgcattagaacatgctgcaaatttgtctaatgttattgctatggattaccttggtttcttttaccaacaaggcctaggagttgtaagaaatcctgaaaaagctatttattggtttcaaatggctgttaataaaaaaagcgatacagccatggttaatctaggaatttgctatcaaaaaggcgaaggggttaaacagaatctaaatgcagcattcaaactgtttcaacgagcagttaagctagataacagcacagccatgttctatcttggcctttgctatcaaagaagtgaaggagttaaggaggacttaaatgaagcttttgctctatatcagcaggcggctgataaaggtaacagtacggctacagcatatcttggtctttgttatcagtatgaagtgggagttaagcaggatttagacaaagccatttctcaatatcaacgggcagttgatgaaggcaatagtttggctatggtatttcttggacgctgctatcaatatggcgaaggagtcaaccagaacataaataaggctattgcactgtatcagaaggcgactgataaaggtgacagtacggctatgacatgtcttgcactttgttaccaagatggcaaaggagttgatcaagactggaataaggctattaacttgtatcagcaagcagttaaaaaaaatgattgtacagccatgtactatcttggcgcttgctatgaaaatggttatggagttaaacaaaatcggagtagtgctatcgaattgtatcggatggctgcaaatcaaggtaatagtaacgcgatggttaatcttggcttttattatcgaaatggcataggagtgaagcagaatcggaaagaggcagttaagttatttcaacgcgccgctaaagtaggtgattacagagcaatgtgcaatcttggtgtctgctatgaaaatggtgaaggagttgatcaagattggaataaagctattagcttgtatcagcaagcaactaaggctggtgagattagagccattagtaatattcaaaatatactcttacgaaattttctaggtgaaggtaattacaaaagtcgaaaaactaatggttgtacaagaaataagctttcacacttagtcgagaaacttgcatttgaccctcccattcttggaggagattggaagccacttctcactgaagaaataaaagcttgtatcgataaagttattgtaccttttgaaattttagatgtagtagttgagatctga

SEQ ID NO: 52950 - protein, 1032 aa, Nitrosomonas europaea ATCC 19718
MTGAVRRNVRKRLNKNQKQLRQNWEGYHLLEFAKTIRPVKQDTKRRKELDDHLVSNGIGGFETLQKLPADNKTAFTTEKSDGVFESLAEFQDIPTFVCFLNFLEFCRNSIPRRPLDVFDGNDTLSIEIDGKRKAVTLDYAIDDFKRHAKTVEERLKLESSQSSTGQADPIQPRLTIPQARENNPNYFANAVLDVIGRDEQKSRLKAFLECDKNVAWFQLAGVAGQGKSRLAFDLIKVAEELGFRAGFLTENDIKFFKDQWKDWQPDKPYLLIFDYVIGREEQIKPIFQTLISNQDGYCHNIRILLVERQRWDQGNVIETQDQINKDAPRQLIAISNKAPWFLKLCEEGDSEGERLAPFRFDNGVEELKELGQDNLASIVKQLLSGKTLTLSDDVLEETLERIDNTGRPLYAYLLAQQLSESEEGFRSWTKIDLLNGQLKRDKRRWEQAFNDKAPTWGDSHEAMKLAVLATIVRQINFEDEIIKSNFGHIDSSLGKEALAITNSYLVNNDNRPHKIHALEPDLLGEWFVLYCFYQGLNFEELLNIAWEYSPNDTAMFLIRVMQDFIDLTKTYNDWNLTEKLLAHKPPHENHYLVLARVAVFISYELGRRNLTIPHNIIIALEHAANLSNVIAMDYLGFFYQQGLGVVRNPEKAIYWFQMAVNKKSDTAMVNLGICYQKGEGVKQNLNAAFKLFQRAVKLDNSTAMFYLGLCYQRSEGVKEDLNEAFALYQQAADKGNSTATAYLGLCYQYEVGVKQDLDKAISQYQRAVDEGNSLAMVFLGRCYQYGEGVNQNINKAIALYQKATDKGDSTAMTCLALCYQDGKGVDQDWNKAINLYQQAVKKNDCTAMYYLGACYENGYGVKQNRSSAIELYRMAANQGNSNAMVNLGFYYRNGIGVKQNRKEAVKLFQRAAKVGDYRAMCNLGVCYENGEGVDQDWNKAISLYQQATKAGEIRAISNIQNILLRNFLGEGNYKSRKTNGCTRNKLSHLVEKLAFDPPILGGDWKPLLTEEIKACIDKVIVPFEILDVVVEI

SEQ ID NO: 52951 - DNA, 699 bp, Nitrosomonas europaea ATCC 19718
  CDS (1)..(699): transl_table=11
atgaagacaatcgcagttcttttgacagccctcctgctggccaccggctgcgggaataaggaatccaccggtgaaacagcatctgatgaaccagaaatcgtaatgatggatgaatccacttccgtcggcgaactcccctcgattctgaaagaaggtttgtcgaataaagaacaggatgagctgaagaaacagatcatgccgatactggatgatggcctcacaccggaacaacgtttcctgaacctgcgcaaggatgcggaggctggcaacgcagaagcgcagaacagcctcggttccatgtatttctccggagaagccatttcccgcgatgcacaagggaaggtgaaggataaagatccagaaacagctgcaggatggttcttccgggcggctgaacaaggccatgccggcgctcagttcaacctcgggctactgtatttcagtggcgagggtgttaccagggacactgccaaagcagtcgaactatttaccaaatctgccgaacagggaaatatcgacgcgcagaacaaccttggcgtcatctatctgatgggcgaaggtgtcaagcagaataccgacaaagctatcgaatggtttgagaaagcggccgaacagggcaatgaagaagctatcaaaaaccttgaagcagtccgcgcatcacagcaagattccaaagaagctgcggacaaacaaaaataa

SEQ ID NO: 52952 - protein, 232 aa, Nitrosomonas europaea ATCC 19718
MKTIAVLLTALLLATGCGNKESTGETASDEPEIVMMDESTSVGELPSILKEGLSNKEQDELKKQIMPILDDGLTPEQRFLNLRKDAEAGNAEAQNSLGSMYFSGEAISRDAQGKVKDKDPETAAGWFFRAAEQGHAGAQFNLGLLYFSGEGVTRDTAKAVELFTKSAEQGNIDAQNNLGVIYLMGEGVKQNTDKAIEWFEKAAEQGNEEAIKNLEAVRASQQDSKEAADKQK

SEQ ID NO: 52953 - DNA, 1467 bp, Helicobacter hepaticus ATCC 51449
  CDS (1)..(1467): transl_table=11
atgcgttgtttgtattttgtaatttgtatgataatgcttggagcgtgtgtaaatccagagccaccactgctaccttgtgatgataaagaaagttgtgagaaagctatcactttattgtttgattctaaattttctgaaaaaaaatttatcaaagtaatagaatatgctactaaagcctgtgatttgggtagtagtaagagctgtatttttttaggtaagttgcatcaagacagctatgaatcttattttcaaaaagaattagcaaagttagcaaagagaaatatagttttagattaccataaggcaaaagcattttatgaaaaagccattagctatggtgcttttgaagcttatatttatttagggtcgctctattttaggggcattggtgtaaaacaagatgacacaaaaggtataggcttacttaccaaggcgtgtgataaaaaaatagttaaaggttgccaaactttaggggatttatatgagtttggaagcgaaactattaaacaaaacttgcttaaagctagtgagttttatacaaaggcttgtgttttggagggtagtttcagaggttgtcatcaattaagtcgtttaggcttacaatattttaaaggcaatggtgtcaaacaagactatgtcaaggcaagagagctttttaccaaagcttgtaatgttgatataggtgagagttgcacaaatttgggcgttttatatggcaatggtatgggtgtgaagcaagattttgcaaaagcacgaacactttacaataagggttgtgatttagagaatggcagagggtgttataatctaggcttacactattttttaggcaaagaaattaaacaagactatacaaaagcaagagaattttttacccaaagttgcaatttatatgattctttaggttgttatgaattaggcactatgtattatcgtggcgaaggtgttttgcaagatgatagaatcgcatatgaatttttgagtaaggcttatgaaattgatgagagtttagattataatgaattgggtttgctgttaacgtggagtgaaaatattaaacacgactatgcaaaggcaaaagcaatctttagtaagtcttgtagtgagggtaacggcattggttgtgtgaatctaggcattttgtatgcctttggtagaggggtaatgacagattatacaaaagcagtggaactctatacgcaagcttgtaatatgaataatcgtgttggttgttataatctaggattactttatagcgagggtaaaggagttaggcaggattatataaaggctagagaattatacacaaaagcttgcaatatgggtgaagcgggggcttgtaataatttgggagttttttatacttatggaaaaggtgtgaggcaagataaggctaaagcaagagaactctttggtaaagcctgtgatatgggaaatcaaaagggttgcgataattataaagactaa

SEQ ID NO: 52954 - protein, 488 aa, Helicobacter hepaticus ATCC 51449
MRCLYFVICMIMLGACVNPEPPLLPCDDKESCEKAITLLFDSKFSEKKFIKVIEYATKACDLGSSKSCIFLGKLHQDSYESYFQKELAKLAKRNIVLDYHKAKAFYEKAISYGAFEAYIYLGSLYFRGIGVKQDDTKGIGLLTKACDKKIVKGCQTLGDLYEFGSETIKQNLLKASEFYTKACVLEGSFRGCHQLSRLGLQYFKGNGVKQDYVKARELFTKACNVDIGESCTNLGVLYGNGMGVKQDFAKARTLYNKGCDLENGRGCYNLGLHYFLGKEIKQDYTKAREFFTQSCNLYDSLGCYELGTMYYRGEGVLQDDRIAYEFLSKAYEIDESLDYNELGLLLTWSENIKHDYAKAKAIFSKSCSEGNGIGCVNLGILYAFGRGVMTDYTKAVELYTQACNMNNRVGCYNLGLLYSEGKGVRQDYIKARELYTKACNMGEAGACNNLGVFYTYGKGVRQDKAKARELFGKACDMGNQKGCDNYKD

SEQ ID NO: 52955 - DNA, 1815 bp, Rhodopirellula baltica SH 1
  CDS (1)..(1815): transl_table=11
atgcagtgtcgacactggattctatcggtagcagtcgctttcggctgtcaggcaatgccgacgaccgccgcctcaaaggaaaacggcgactctcatgttgctcagcagaccggtcgaaaaccaatcgtcgacgagtccatcaccgaccgcggcgaaagcgaccccagtcagactccttcattcgatcaaacgccttcgatgcctaaaaatgtgcctcagcagggcaaaacggcatggagttctttgatcctcggtcgcttgcgagaaatcgacaagacgcccttccgggatgagctggaagcaggccagattcagaagtacgcagaccttgggcatgcacatgcacaatttgtgcttggttgcatgcacgcggaggggcttggcgttccgcagaatgacgttgaagcggttcgctggttccagcgtgctgccgagcaagatttcgcggtcgcacaaaattggctcggttccatgcaccagcagggccgtggaatccgccaggatgatgttcaagcatttcgttggtttcatcgagctgctcaacagggtttgtcagatgcccagttcaaccttgcactttgctaccgccgtggaacaggcacgcctcaagatgattttggggcggttcactttcttaagctggcggcagagcaggatcatagatgggcacaattcgatcttgggtggatgtgctacgaacggagaggtggtgcaggaaacgatgtggactccgttaactggtaccgtcgtgccgcagtcgcgggtttggactcggcgcaatacaaccttggctacatgtacgacgtcggactgggagtggaacaagatttcgtcgaggcctcttcgtggtatcagaaagctgccgatcagaaccatgtcatggcccagcgagcgattggaatgatgtaccgcgacggcgacggggtgacacaagatcactcattggatgtggaatggtttcgcaagtctgcagcgcaagggtatgcgctcgcgcaagaatcgctggcgagcatgtacttccatggtcgcggtgtgccgcatgactaccacgaggcacaggagtggtaccacgctgctgcgacgcagggagagcggtggtcgcagcagaagcttgcctggatgcacatggttggacgtggtgtttccacagatgaagcacttgctttctattgggtgcagaaagccgccatgcaagatctctcatggtctcaagccgagcttggtaggctgtactatccgggccagggtgtgtcgctagacgacgccgacgcgctcagatggtttcgaatggccgcagaacaagatagccccgcggcgcagtacatgatcgggctgatgtatagcgaagggcgaggagtcgaggcggacgaaacaaaggcaatccagtggtatcgaaaagccgccaagcaacactacgccctcgcacaaaacaacctgggcagagctcaccagaagggactgggcgtcgctcaggatgatttgatcgcggtgcattggtatcgcaaagccgcagaacaacagcttcccgtcggccaatccaatctcggattcatgtacttgcatggcaagggcgtcgaggcagacgaagaattggctgttgagctttttagagaagctgctgaggccggtgacgcggaagccatcacggtactcgctcagcgcgatgaatttcatcgatcccggcggctgaagcgtattgcttcaatggtttctaccatcggagcatcactggcattggttctcgtcatggcgagaatcttgagacgtccaaagatgaaaacgttgccgaccgggttgagtggaatgggtggatag

SEQ ID NO: 52956 - protein, 604 aa, Rhodopirellula baltica SH 1
MQCRHWILSVAVAFGCQAMPTTAASKENGDSHVAQQTGRKPIVDESITDRGESDPSQTPSFDQTPSMPKNVPQQGKTAWSSLILGRLREIDKTPFRDELEAGQIQKYADLGHAHAQFVLGCMHAEGLGVPQNDVEAVRWFQRAAEQDFAVAQNWLGSMHQQGRGIRQDDVQAFRWFHRAAQQGLSDAQFNLALCYRRGTGTPQDDFGAVHFLKLAAEQDHRWAQFDLGWMCYERRGGAGNDVDSVNWYRRAAVAGLDSAQYNLGYMYDVGLGVEQDFVEASSWYQKAADQNHVMAQRAIGMMYRDGDGVTQDHSLDVEWFRKSAAQGYALAQESLASMYFHGRGVPHDYHEAQEWYHAAATQGERWSQQKLAWMHMVGRGVSTDEALAFYWVQKAAMQDLSWSQAELGRLYYPGQGVSLDDADALRWFRMAAEQDSPAAQYMIGLMYSEGRGVEADETKAIQWYRKAAKQHYALAQNNLGRAHQKGLGVAQDDLIAVHWYRKAAEQQLPVGQSNLGFMYLHGKGVEADEELAVELFREAAEAGDAEAITVLAQRDEFHRSRRLKRIASMVSTIGASLALVLVMARILRRPKMKTLPTGLSGMGG

SEQ ID NO: 52957 - DNA, 666 bp, Chromobacterium violaceum ATCC 12472
  CDS (1)..(666): transl_table=11
atgagatggggaatcttgctggcgttgctgctggcggcatcgggcgcgcaggcggccgaagccgaggtgccgggctggaaggactaccaggccggccgactggcggccgcccgcatcgccttctggcaggcggcgcagaatggcgaccgggtggcggccttcgacctggcgatgatggactggaagggcgaggccggcgcggcggacaaggcgcgggcggtgtactggctgcagcgttcggcgcagctggggctggaccgggcgcagcacgcgctgggcctgctggccgagcgcggcgatggcctgcccaaatcgctgaccgaggccacgcgctggttcgcgctggccgcgcgccagggttatctgccggcgcagatcgacctggggacccagtatttcctcggccgcggcgcgccgcaggacgaccgcctggccgcctactggtacgaggaggcggccaagcagggcgacgtcggcgcgcagtatctgatcgccagcatgtacgagcatggccagggggtgaagcgggacatcccggcggcgatacgctggtacgcgcgcgccggcgcgcagggcgacgccggcgcgcgggccaaggcgctggacctggccaggcgcgaaacggcgcgccgcgctcagagcgcgtccagcggcagcttcaggtag

SEQ ID NO: 52958 - protein, 221 aa, Chromobacterium violaceum ATCC 12472
MRWGILLALLLAASGAQAAEAEVPGWKDYQAGRLAAARIAFWQAAQNGDRVAAFDLAMMDWKGEAGAADKARAVYWLQRSAQLGLDRAQHALGLLAERGDGLPKSLTEATRWFALAARQGYLPAQIDLGTQYFLGRGAPQDDRLAAYWYEEAAKQGDVGAQYLIASMYEHGQGVKRDIPAAIRWYARAGAQGDAGARAKALDLARRETARRAQSASSGSFR

SEQ ID NO: 52959 - DNA, 849 bp, Wolinella succinogenes DSM 1740
  CDS (1)..(849): transl_table=11
atgaaattgaaaatagtcatcctctcagccctcgcccttgcaacgcttcaggcgggattcatcaaagagggaatggaagccaaagaggggggcgaccatcaaaaactagtcgagatctacgaaaaagcgtgcaatgaaggtaaggcttcggggtgctataacctcggtgtgctttatgaggagggaagcggaaatgtcgttaaggatgtgaaaaaagcgatagggctttatgagaaggcttgtaaggcggacttctcctcagcgtgctataacctcggcgtgctttacatcaaaggggttgatgttaagcaagatattaatagagccaaagagctatatgaaaaagcgtgtaaagcggatgatgatatcgcttgcaatagtttagggcttctctatgccaatggctcaggagtggctcaagattatcagaaggcgagcgagctctatagtcgagcttgccaaagcgggaatctctatgcctgcaataatctaggcttcctctataacgaggggcggggtgtggatcgagattataaaaaggcgagcgaacattaccaaaaagcctgcaatggaggcctagccatgggttgcgataatcttgggctgctccatgcttcgggcaagggagtggccaaggattacaaaaaagccgctcagcttcacgaaaaggcttgccaaaatggctatgagaaggggtgtaataacttagggattctctatgcagaaggcagaggcgtagagcttaatcaagatagggctagagagctttttaagcagagctgcgagaagggattgcaggtgggatgtgagaacggacgccttcttgattctcctcatgtaaagccctaa

SEQ ID NO: 52960 - protein, 282 aa, Wolinella succinogenes DSM 1740
MKLKIVILSALALATLQAGFIKEGMEAKEGGDHQKLVEIYEKACNEGKASGCYNLGVLYEEGSGNVVKDVKKAIGLYEKACKADFSSACYNLGVLYIKGVDVKQDINRAKELYEKACKADDDIACNSLGLLYANGSGVAQDYQKASELYSRACQSGNLYACNNLGFLYNEGRGVDRDYKKASEHYQKACNGGLAMGCDNLGLLHASGKGVAKDYKKAAQLHEKACQNGYEKGCNNLGILYAEGRGVELNQDRARELFKQSCEKGLQVGCENGRLLDSPHVKP

SEQ ID NO: 52961 - DNA, 1044 bp, Vibrio vulnificus YJ016
  CDS (1)..(1044): transl_table=11
atgcgagttcttaaaacaatcataatggacttattaactatgacacgtcgttgtaccgcgtggttggctgcgcttccccttcttctttccagtgtttctcatgcgtatgatcttacttacgaagattttgacgaagaaacgttagcagtgttaaagcaagccgaaacgtctaaagatgcacaactgcttttcaaagcgtcagaaatcctcatcgacgaatcgatgatgcaagaaaacgttgatcaagggttgctttatctcaagcagtccgccgatctcgataacctagaagcactgagtactttggcggagcactattactatgaggaagcatatcagcaggctctaccgctctatcaaaaactggccgagaaaggtgatgccattgcgctttactacttgggtgtgatgtattttgatggtgaaggtgttgaacaggatcagaaaaaaggcaacgaatactacctcgcatccgcgcagaaaggcgatgaagatgcgatgttccaactggctttttcatacaatgacggtttaggcattgagcaagattttaagcaggcgaaccattggttcgcgagcgccgctgaaaagggacatgcattggcgacttttaatcttggtgtcagttacttgcaaggtgaaggcgtggcgcgtgactgccaaaaagccattactctgtttgagcacgccattgaacttgatgacgaatcaaaggcctatcagatcatgggtaaaatctactccgagcctagatacatgcgatcttgtggaatcaaatcggcagactacaaaaaagcgctggagtatttccaatatgcagcggaatggggtgaggagtacagccagtttatgattggttctttccactttaaagggcgtggtgtggagcgtaattacgtcaaagcactggcttggtacaacatcgcttatgaaaatggttatgatgaagctgaaaaggcgatcaaagaagtgaaaggaaaaatgaacgagaaagagatcgccaaagcaggtgaatatcaagaagcgattgaagaaacgctataa

SEQ ID NO: 52962 - protein, 347 aa, Vibrio vulnificus YJ016
MRVLKTIIMDLLTMTRRCTAWLAALPLLLSSVSHAYDLTYEDFDEETLAVLKQAETSKDAQLLFKASEILIDESMMQENVDQGLLYLKQSADLDNLEALSTLAEHYYYEEAYQQALPLYQKLAEKGDAIALYYLGVMYFDGEGVEQDQKKGNEYYLASAQKGDEDAMFQLAFSYNDGLGIEQDFKQANHWFASAAEKGHALATFNLGVSYLQGEGVARDCQKAITLFEHAIELDDESKAYQIMGKIYSEPRYMRSCGIKSADYKKALEYFQYAAEWGEEYSQFMIGSFHFKGRGVERNYVKALAWYNIAYENGYDEAEKAIKEVKGKMNEKEIAKAGEYQEAIEETL

SEQ ID NO: 52963 - DNA, 3396 bp, Rhodopseudomonas palustris CGA009
  CDS (1)..(3396): transl_table=11
atgacgcggaggtgtgcgggcacggctagggccggcttgggtgcggacaagagcatgaatcgcgtgtcgtggagtgtcgaggagatcgagccgtcagtgcgcgagaaggccgaggccgccgcaaagcgcgccgggctgtcgctcaccgactggatcaatgctcagctcggcgaggctgccccgcagcagccggccaccgaacaactgcgcatgcccggccgcccggcgatgcccgagcgcagcgccaccgaagtcgctgaaatccatcagcggctcgacgccatcgctcgccagatcgatcatatttcccgcgccccggcgcgcagcgaaccgccggtcgcccggcagctgaatgacgcgatttcccggctcgacgcccgcttggcgcggatcaccgagccgaagcccgcggcggctcggcctgctgaggccgcagcagtgccgccgcagacgcccaccgaccgggtcgaacgcgccgctgcgcaggtttacccgtccccgacgctcgacccgaacgctctcgacaaggcgattgccgagatcgccgcgcggcagagcgagcttgatgccagcatcggccggatgccgcggcagccggcgtcgtttgctccgccgatcgcgcccgcgatggctccgccgcccccgcaggccggaccggatttcaccagcctggagaagcagctccacaagatcaccagccagatcgacgcgctgcagcgctccgacaaggtcgagcaatcgatcgcggcgttccgcgccgacctggccgagatccgccagaccatcaccgaagcgatgccgcgcaaggcgatcgaaacgctggaaggcgagatccgctcgctggcgcagcgtctcgacgaaagccgcgccaatggcagcaacagcgaagtcatcgtcggcatcgaacgcgcactcggcgagatccacgccgcgttgcgttcgctgacgccggccgagcagctcgccggcttcgacgaagcgatccgcaatctcggcggcaagatcgacatgatcgtccgcaacagcgacgatcccggcacggtgcagcagctcgaaaacgccatcggcgcgctgcgcggcattgtctccaatgtcgcctcgaatgaagcgctggggcagctcagcgccaacgtccacgcgctcggcgagaagatcgagcagctggcgcaggccgacaaccatagcatttcgttcgccgccctggagcagcgcatctcggcgctgaccgcggcgctggaaagccgcgagcgccctgcgccgagcgaatccaccgagcagctcgaaagcgccgtgcggacactgtccgagcggatcgaccatctgccgatcggcaacgataatcagtccgccttcgcgcatctcgaacagcgcgtcgcgcatctgctggagcggatggaagccgcaaccgagcagcgcgacggcagtgccaatctcggccgcgtcgaggaaggcctgcacgacatcctgcggatgctcgagcggcagcagtcgcaatttgacgtgctggctgacatcgaccgccgaccggcaccggccctggatccgagcttcgtcgacaccatcaagcgcgaactttccgacatgcgcttcagccagtcggaaaccgatcgtcacacccaggattcgctcgaggcggtgcacaacaccctcggccacgtcgtcgaccggctggcgatgatcgaaggcgatctgcgcaccgcgcgcgcaacgcctccgctggccccgccgccggctcccgctccggcgcccgaacaggcgaagcccgccttcctggccgcggcgccgatcgcgcctgctccggctgctcccgtggccgcgcctgtcccgccgcagcctcagccggagatggccaatccggccgccgagccgttcgcagccgcgccgcgcgaatttgctgccgccaaacccgccgtcgagccgccggccccggcacccgaaccgcgtgggccgcgggctttccacgacatccacgagtccgccgccggcccgcgtcagccgcagaagatcgagccggtcgttgctgtgccgcagccggcgcgccgggaagccacgttgccgccggaccatccgctcgagcccggtaccaagccgccggcccgggtcgcttcgccgtcggagcggatcgccgcctccgaaagcgcgctcggcgaaatcgctccggcgcagcccgagccggccaacgccaccagcttcatcgcggccgcgcgccgcgccgcacaagcggcggcgtccgccagctccagcgccggcaaggccaagcccggcaagccgaagaccgatggcgacaagcccgatccggacggcggcaccccgggctcgccgctcggctccaagatcaagtcgctgctggtcggcgccagcgtggtggtgatcgtgctgtccagcttccagatggcgatgaaactattcgacagcggcgaagcgccgccggtcgccagcgtcaccgcgccgaagctgagcccggcgccggacaaacagcgcctgcctgcggacgagcggcaatctgatccgactgagcccaccgcgccgccgtctgtggcgccggtggctccgccgccctcgatgatttcgccgactccggtcgagcgccagtcgctgtacacgccgccagccccgccgcagaccgagccggccgcgcccagcgacatcaccgggacaattccgtcgcagccgagcgcggcgccggagaagttcggcaccgtcgcgattccgtccgccgaacggctgcccgacaccatcggcggcgcgacgctgcgcaccctcgcgctcaagggcgatgccgccgccgcttacgaagtcgccacccgctacgccgaaggcaagggcgtgccggtgaactacgacgaagccgccaaatggtatcagcgcgcagcggatgccggcgtgacgccggcgatcttccggatcggcacactgtacgagaagggactcggcgtgaagcgcgacctcgacgtcgcgcggacgctgtattcgaccgctgccgatcgcggcaacgccaaggcgatgcacaatctggccgtgctgtacgccgacggcggcagcaagggcgcgaactacaagaccgccgcggcctggttccgcaaggccgccgaacgcggcgtggccgacagccagttcaacctcggcatcctgtatgcccgcggcatcggcgtcgatcagaacctcgccgagtcgtacaagtggttctctctcgccgccgctcagggcgatgaggatgcgggccgcaagcgcgaagacgtcgccaagcgcctcgacccgcaatcgctggcagccgccaagctcgcgatccagaccttcacggccgagccgcagcccgacgccgccgtcaaggtcgcggcgcccgccggcggctgggacgggcagccggccgctgcggctaagcgcgccgcccgctaa

SEQ ID NO: 52964 - protein, 1131 aa, Rhodopseudomonas palustris CGA009
MTRRCAGTARAGLGADKSMNRVSWSVEEIEPSVREKAEAAAKRAGLSLTDWINAQLGEAAPQQPATEQLRMPGRPAMPERSATEVAEIHQRLDAIARQIDHISRAPARSEPPVARQLNDAISRLDARLARITEPKPAAARPAEAAAVPPQTPTDRVERAAAQVYPSPTLDPNALDKAIAEIAARQSELDASIGRMPRQPASFAPPIAPAMAPPPPQAGPDFTSLEKQLHKITSQIDALQRSDKVEQSIAAFRADLAEIRQTITEAMPRKAIETLEGEIRSLAQRLDESRANGSNSEVIVGIERALGEIHAALRSLTPAEQLAGFDEAIRNLGGKIDMIVRNSDDPGTVQQLENAIGALRGIVSNVASNEALGQLSANVHALGEKIEQLAQADNHSISFAALEQRISALTAALESRERPAPSESTEQLESAVRTLSERIDHLPIGNDNQSAFAHLEQRVAHLLERMEAATEQRDGSANLGRVEEGLHDILRMLERQQSQFDVLADIDRRPAPALDPSFVDTIKRELSDMRFSQSETDRHTQDSLEAVHNTLGHVVDRLAMIEGDLRTARATPPLAPPPAPAPAPEQAKPAFLAAAPIAPAPAAPVAAPVPPQPQPEMANPAAEPFAAAPREFAAAKPAVEPPAPAPEPRGPRAFHDIHESAAGPRQPQKIEPVVAVPQPARREATLPPDHPLEPGTKPPARVASPSERIAASESALGEIAPAQPEPANATSFIAAARRAAQAAASASSSAGKAKPGKPKTDGDKPDPDGGTPGSPLGSKIKSLLVGASVVVIVLSSFQMAMKLFDSGEAPPVASVTAPKLSPAPDKQRLPADERQSDPTEPTAPPSVAPVAPPPSMISPTPVERQSLYTPPAPPQTEPAAPSDITGTIPSQPSAAPEKFGTVAIPSAERLPDTIGGATLRTLALKGDAAAAYEVATRYAEGKGVPVNYDEAAKWYQRAADAGVTPAIFRIGTLYEKGLGVKRDLDVARTLYSTAADRGNAKAMHNLAVLYADGGSKGANYKTAAAWFRKAAERGVADSQFNLGILYARGIGVDQNLAESYKWFSLAAAQGDEDAGRKREDVAKRLDPQSLAAAKLAIQTFTAEPQPDAAVKVAAPAGGWDGQPAAAAKRAAR

SEQ ID NO: 52965 - DNA, 1092 bp, Rhodopseudomonas palustris CGA009
  CDS (1)..(1092): transl_table=11
atgaaggcgctgcgcgcgttcgcgattgttgcggcttcactgctgcttgccaccggcgcggcggcgcaagtttcgctgtcgccgccgtctggccccaacccattcccgaagccgctggagccggaaaagccgaagcccaggccgccggccccggccaaggcacccgccaccgaggcgaaggacaaggccaagaagccgggagacaaacccgacgccaaggccgcccccgagggcggcgcggccacggccgaagatcccaacgtcgacctggtgtacggcgcctatcagcgcggcttctacaagaccgcgttcgaactggcgcagaagcgcgccgccgacaacgacgccaaggccatgaccatgctgggcgagctctatgccaatgccctcggcgtgaagcgcgactacaagaaggcggcggagtggtactcgcgagcggccgatctcggcgaccgcgaggcgatgtttgccctggccatggcccggatgggcggacgcggcggcccgccgaaccgcgaggaagccgccaaatggctcgcacaggctgccaagcttggcgagccgaaggcagcctataatctggcgctgctctatctcgacggccagaccttcccgcaggacgtcaagcgcgccgcagaactgctgcggatggccgcagacgccggcaatccggaagcccaatacgcgctggcgaccttctacaaggaaggtacaggggtaaccaagagcatcgagcagtcggtgcggctgctgcaggccgccgcgctggccggcaacgtccccgcccaggtcgaatacgccatcgcgctgtacaacggtaccggcaccccgaagaacgagccggccgccgtcgcgctgctgcgcaaggcggcgcgcgccaacaacccgatcgcccagaaccgcctcgcccatgtgttggtctccggccagggcgcgccgcgcgacatcaacgaggcgatgaaatggcacctgatcgccaagaccgccggcaagggcgatctgcagctcgaccagacgctggcccagatgtcggccgaggaccgcgccaaggccgaagaggcggcgcggacctggatcggcggcggcaaatga

SEQ ID NO: 52966 - protein, 363 aa, Rhodopseudomonas palustris CGA009
MKALRAFAIVAASLLLATGAAAQVSLSPPSGPNPFPKPLEPEKPKPRPPAPAKAPATEAKDKAKKPGDKPDAKAAPEGGAATAEDPNVDLVYGAYQRGFYKTAFELAQKRAADNDAKAMTMLGELYANALGVKRDYKKAAEWYSRAADLGDREAMFALAMARMGGRGGPPNREEAAKWLAQAAKLGEPKAAYNLALLYLDGQTFPQDVKRAAELLRMAADAGNPEAQYALATFYKEGTGVTKSIEQSVRLLQAAALAGNVPAQVEYAIALYNGTGTPKNEPAAVALLRKAARANNPIAQNRLAHVLVSGQGAPRDINEAMKWHLIAKTAGKGDLQLDQTLAQMSAEDRAKAEEAARTWIGGGK

SEQ ID NO: 52967 - DNA, 642 bp, Geobacter sulfurreducens PCA
  CDS (1)..(642): transl_table=11
atgaagcgcactatcactttaatattattttgtattttagctcagaatgtaacgatgaactattgtttcgccgatgttctttccgaagcatatacatatttcaaaaacaaaaattacgataatgccttaccattactagaaaatcttgtaacagaaggaaatctcgacgcttataatttgctaggaacaatgtacaaaaaaggatattcagtaccacaaaatcctaataaagcaattgagttatatgagtttgccgcaaagaaagggcatgcaggagcacaatataacctaggactaatgtatgaatctggctccggtatattgcaggattattctcaagccataaaatggtataaactcgcagctattcaaaacgattctggtgcgttaaacaatttaggccatatttatcacaatggattaggtgttaagaaaaatatgaaagaggcatgcaattattacggtaaagcagccgcaatgggtgacgcgttgggcaaatgtaatatggctggatgctatgctcaaggcgaaggtgtaaagaaagattataagaaagcaaaagttcttgcaaaagagggctatgaacaaggtgaagcggcttgtagtgaggtctgggatatttttgaactagcaaaacactag

SEQ ID NO: 52968 - protein, 213 aa, Geobacter sulfurreducens PCA
MKRTITLILFCILAQNVTMNYCFADVLSEAYTYFKNKNYDNALPLLENLVTEGNLDAYNLLGTMYKKGYSVPQNPNKAIELYEFAAKKGHAGAQYNLGLMYESGSGILQDYSQAIKWYKLAAIQNDSGALNNLGHIYHNGLGVKKNMKEACNYYGKAAAMGDALGKCNMAGCYAQGEGVKKDYKKAKVLAKEGYEQGEAACSEVWDIFELAKH

SEQ ID NO: 52969 - DNA, 738 bp, Geobacter sulfurreducens PCA
  CDS (1)..(738): transl_table=11
atgctgaatcgcaccacaagaaagatcgccctggttaccggcctgtccctggctcttgcccttccgtcgctgtcatgggcagattttgccgccgggcagcaggcattccggaacggcgactatgagacggcgttgcgggagtacagggaggacgggggcgcccaggcctgttaccggatcggaaccctctacgacaacgggttcggggtccccgaaaacaagcaggaggccctgaagtggtaccacaaggcggcagatctcggcctggaccaggcacagcaccggatcggagaaatgtacgacaacgggcgcggcgtcgaagagaacccggtcaccgccctgagctggtatctgaaggctgccgagcagggaatggcgatcgcccagttcaaggtgggcgacatgtattacaccggaaagggggtcaaacaggacgtggcgctgggggtcaaatggctgcagcaggcggccaagatgggaaacatcagggcccagtacgaaatagcgaccatgtacgagacgggcagggagctgaaaaaggacatctccgaggcggcgaagtggtatctccgggcagcggagcaggggcacagcagggcccagtacaccattgcgctccttttcctcaagggcgaaggcgtcaggcaggatcgggcggaagccgtgaaatggctgcgcaaggccgcggaaggcgggcacaccaaagcccaaatggacctggcaagcctgagccagtaa

SEQ ID NO: 52970 - protein, 245 aa, Geobacter sulfurreducens PCA
MLNRTTRKIALVTGLSLALALPSLSWADFAAGQQAFRNGDYETALREYREDGGAQACYRIGTLYDNGFGVPENKQEALKWYHKAADLGLDQAQHRIGEMYDNGRGVEENPVTALSWYLKAAEQGMAIAQFKVGDMYYTGKGVKQDVALGVKWLQQAAKMGNIRAQYEIATMYETGRELKKDISEAAKWYLRAAEQGHSRAQYTIALLFLKGEGVRQDRAEAVKWLRKAAEGGHTKAQMDLASLSQ

SEQ ID NO: 52971 - DNA, 804 bp, Treponema denticola ATCC 35405
  CDS (1)..(804): transl_table=11
atgaaaaaaatatttttttgtttaatattgtttatgatagctcttttatgctttgcagataaaaaatttgaaaaggtaaaagcagctgccgaacagggagatgcattcgctcagtttaatcttgctgctatgtatgataaaggggacgaatctcttgtcgataaaaaacaagctgtttattggtatacaaaagctgccgaacagggatatgatgtagctcagctttttcttgcttttatgtatgatataggtgatggaattcctattgacaaaaaacaggctttttattggtatacaaaagccgcagaacagggaaatgtagcagcacagtgtattcttggtctaatgtattctaatggagatgggaccccggtagataaaaaacaagctttttattggttcaaaaaagctgccgaacagggatatgcaaaagcacagtttaatcttggtggtatgtattacaaaggcaatggaatactgactgataaaaaacaagctttttattggttcaaaaaagctgccgaacagggatatgcagaagcacagtttaatcttgctcttatgtattataatggagatggaatactggctgacaaaaaacaagctttttattggtacactaaatctgccgaaaaaggactcgcattcgcccagtttaatcttggtctaatgtattctaatggagatggaatactggctgacaaaaaacaagctgcatattggataaagcaagcctatgagaatggttatgagccggcaaaagaactctgggatgcagacgaactttggaaatatcaggattaa

SEQ ID NO: 52972 - protein, 267 aa, Treponema denticola ATCC 35405
MKKIFFCLILFMIALLCFADKKFEKVKAAAEQGDAFAQFNLAAMYDKGDESLVDKKQAVYWYTKAAEQGYDVAQLFLAFMYDIGDGIPIDKKQAFYWYTKAAEQGNVAAQCILGLMYSNGDGTPVDKKQAFYWFKKAAEQGYAKAQFNLGGMYYKGNGILTDKKQAFYWFKKAAEQGYAEAQFNLALMYYNGDGILADKKQAFYWYTKSAEKGLAFAQFNLGLMYSNGDGILADKKQAAYWIKQAYENGYEPAKELWDADELWKYQD

SEQ ID NO: 52973 - DNA, 2397 bp, Eremothecium gossypii
  CDS (1)..(2397)
atggaatcaccgcgttcataccccccatcagaccaggcagaccaggcagaccaggcagaccagcagaagggctccactacgtatgaagagtccgcagtgtactcagaaaactcatacctacattcgctggtggagaatgacggaggtagtggggaaccgcaggctgggaagggccttccgccaatggatgcgctacacatcatggtacccgaccagattgacacaatacagctggatgggaatgtgccagtactagatgataggcttgacctgggtgtcggagagccaccgctagagctgcaagcactggactttgttgctgtggccgacagcttccaagcccaagctgaagcgctgactgttgcgccatatatcaacatagaactgaacggagcatttgataccgaggatttatctgagaaaccgcagcttgcagccggccccctaagcgaagatgctcgtgcttcgggatcatcaacgtcgtcaagggcacaaggatgctcctccttatcacttttaaactcccagagcacttcaactatgcatttaggttcaagtcatggcatgcgttcgagtgtcacaggctcctatgattccagaaaaccaaagatcaaaccagtagatctatcgcatttgtatttggtcaacaacagtgatagtataaccctaacacaaacaaatgaatcggtggcccacttctctcacaagatgataagtgagtgtttaggagatgactcagaatctattttagtgccgaggctgaaggcattggagatgtacaagaagaacgtaaagaagtccaaagatcctgatgttttattccaatacgcccagtatatgctacaaactgcattgactatggatgtcagtccaattatcgaaacggaagaccccagaagaaagggattgtgcaaaaaattgtcacccacagagaaccttaaggagcagtttctcaaagaggctaaggtttatttgactaaacttagtgtcaaaggctacaaagatgcacagtatttgctcgcagatgcatattcttcgggtgcatttggaaaagtaaaccataaagacgcattcatcctgttccagtcctctgccaagcacggccatgtggaggcagcatatcggacggcggtatgcttcgagaagggattaggcaccaccagggattcacggaagtgtatcgagtttttgaaatttgcggcttccaaaaatcatccagccgctatgttcaaactcgggctatattccttccatgggcgcatgggtttgcctaacgatgtcaatacgaaacagaatggtattaaatggctctcccgcgctgccgctagggctactgaacttacatgtgctgcaccctacgagcttgcacaggtttacgaaaacggcttcttggatatcattattccggatgaaagttatgccaccgaactataccttcaagcagctgctcttggacatgttccatcaacaacaaagttaggaaagctctatgagcagggcaatgaaattgttcctcaagatacctccctaagtgtgcattactataccgatgctgccatgaaaggggatccagaagccatgttaggcctctgtgcctggtacctcattggcgcgcaaccggcattcgaccgcgacgaccgtgaggcctttcagtgggcactaaaagcagctaagaaaggatacggaaaggcccagtatacagtgggatacttccatgaaaacggtaaaggatgtaagaaagatattgacatggcctacaagtggtatgagtgtgctgccgataatgaagatccaagagctcttcgcaaattggctagtcgtacggataaaaagaagagaaacagtaccgttttcaacttctcctttctgaagccagacgatttcgagtcgaaattacaacgtatggatgttggtgagtattcccctttatgtctggatttccagggcacattagcacggaccaatgcagcatcccgcagtaaacacggtatcaatacaagctgcagctacgatgttataaacgtcataactgatgaccaatctctgggaatggagatggatgacggcatgcaacgtccagctcaacaaagatgtctaacaccaatatcacgacagacttctagcttcttatcggaagtcagcccataccaaagctcaaacaaccctatggcgcctaactatgcggctgaaaatcaagcagtggaactaagacctgttgccacaggtcagacatcgaacagtagtacgagttgtggcccacgggaaaaagatcaagaaataatgccaagtaatatacctggagaacgttggcatacatctgctgcccctgaaggggcaccattcaataacgttgcgccaaaaaaggtaacggacagaaacgtctgtgttataacttaa

SEQ ID NO: 52974 - protein, 798 aa, Eremothecium gossypii
MESPRSYPPSDQADQADQADQQKGSTTYEESAVYSENSYLHSLVENDGGSGEPQAGKGLPPMDALHIMVPDQIDTIQLDGNVPVLDDRLDLGVGEPPLELQALDFVAVADSFQAQAEALTVAPYINIELNGAFDTEDLSEKPQLAAGPLSEDARASGSSTSSRAQGCSSLSLLNSQSTSTMHLGSSHGMRSSVTGSYDSRKPKIKPVDLSHLYLVNNSDSITLTQTNESVAHFSHKMISECLGDDSESILVPRLKALEMYKKNVKKSKDPDVLFQYAQYMLQTALTMDVSPIIETEDPRRKGLCKKLSPTENLKEQFLKEAKVYLTKLSVKGYKDAQYLLADAYSSGAFGKVNHKDAFILFQSSAKHGHVEAAYRTAVCFEKGLGTTRDSRKCIEFLKFAASKNHPAAMFKLGLYSFHGRMGLPNDVNTKQNGIKWLSRAAARATELTCAAPYELAQVYENGFLDIIIPDESYATELYLQAAALGHVPSTTKLGKLYEQGNEIVPQDTSLSVHYYTDAAMKGDPEAMLGLCAWYLIGAQPAFDRDDREAFQWALKAAKKGYGKAQYTVGYFHENGKGCKKDIDMAYKWYECAADNEDPRALRKLASRTDKKKRNSTVFNFSFLKPDDFESKLQRMDVGEYSPLCLDFQGTLARTNAASRSKHGINTSCSYDVINVITDDQSLGMEMDDGMQRPAQQRCLTPISRQTSSFLSEVSPYQSSNNPMAPNYAAENQAVELRPVATGQTSNSSTSCGPREKDQEIMPSNIPGERWHTSAAPEGAPFNNVAPKKVTDRNVCVIT

SEQ ID NO: 52975 - DNA, 2163 bp, Yersinia pestis biovar Medievalis str. 91001
  CDS (1)..(2163): transl_table=11
ttgaaaaaaaaactggtggcactcttaatactctcttatccgtcggttgcatatctaaagcaaccccctccggcagtacctaaacccattacctttgttgctaaaattgataacattgattttaacaaaacggccattgatagtgatatgaaattactgctggccgatcggttccactttaaaaccaaaaccccctgtaacaagaatacgctttcaggccggccagaatcatttggtttaacgtcagaagtatacgcggcaaaaatcaagagtttgctcgttgagatcttaagtgaacgttaccttttcctgacaatagatcaatgtgaccgcggtggcacaccgatgctcaccaatatagaagtttgcactgaagcactgtgcggtgctgaattcatgaaaaaagaatcttatctttggttaaatcaagacttaaaggccacggtgaaacgccaggcgacatcggtgatccctatgccattaacctttgataaagaaaagcaactgtggaaagtggccgggtggtttattgagtcatcagaagaaactgaggaacttataccgagcaaactgctggcctttgaaggttatactgacgatgaaacattcaaaacacaaaaattcgtctctaccttcaaatcctattactccagtggaaatattcaacatattctcacttataataaagagggaaaagaggatgggaaatacgactcatattatgatgaaaaagggaaattagctgagacgttggtatttaaaaatggcttggtcaatggtgagtatattatctaccatgaaaatggtgctattgaaagcaaacgacattttattgacagcaaaatagccgacggagagtgccctcattattacgacaatggaaaaattaaagagaaccatagctatttgaataataaactcgaagggaaatactttgagtattttcctgatggtaaaattaaagatgaaagaacctaccatgctggcaaagtcgttggtaaatacacagtctactttgaatcaggtaaaattagagctatttataataaaaacaataaagatcagtaccatggaactaacgaggaatacagccccgaagggcagttagtgtctaaatcaacgtataaagaaggaaaacaactctctagccagacttggtataaaaatggaaaaatgcgacaggaagaaatctacgataacgaaggccgcaaaaatggcgtatcaagagagtggtttgataatggacaacttaatacatcaaccagctataaaaatgatatcttagatggtgatagccagaaatggaacgaacagggtgaaatagtatcactctcaccgtataaagacggcaaacttcagggtgaacataaatattatgattcaggaaaactactttataccacaatgtataagaacgataaaaaagatggtccggatagacgatggagtatcaatacagggaagttaattgaagaaatgccctatgttgaaggcataagaagcggcatcaaaaaagagtttaatgatcgtaccggtagactgttaacaaccaccccttatgtgaataatgaaatacagggcaccggagaaacatataatgccgatggtgttagcattattcactgctatatcaataataaaagtattgactcgctatacaatcctattgaaatacgcgagaaagcctcacagagtgatgataatgcacagtatgaactgggtaagtatcattatacttgtcaagactatgatagaggtcttaagtggctagaaaaatcagcagaccataaaaatattaaggcgttatttcttttagctcaaatgtataatgaaggtgacggcgttaaagaagatcaaaccaaatatttctcctatttactcaaagcagcgcagttagggctaagtgatgctcaagtggaaattggctatctgtatctcgtcggtgaaggggtagaaaagaacttaccagaagcctatcagtggcacataaaagctgccgaacaaggaaacgtgcacgcccattataaccttggttggatatatcaaaatggagacggcaccgagaaaaatttggataaggcaaaattccactttaccgttgcagctaaaagtgggatgagagaagcctatgaagaattaaaaaaattagaatccaacaagtaa

SEQ ID NO: 52976 - protein, 720 aa, Yersinia pestis biovar Medievalis str. 91001
MKKKLVALLILSYPSVAYLKQPPPAVPKPITFVAKIDNIDFNKTAIDSDMKLLLADRFHFKTKTPCNKNTLSGRPESFGLTSEVYAAKIKSLLVEILSERYLFLTIDQCDRGGTPMLTNIEVCTEALCGAEFMKKESYLWLNQDLKATVKRQATSVIPMPLTFDKEKQLWKVAGWFIESSEETEELIPSKLLAFEGYTDDETFKTQKFVSTFKSYYSSGNIQHILTYNKEGKEDGKYDSYYDEKGKLAETLVFKNGLVNGEYIIYHENGAIESKRHFIDSKIADGECPHYYDNGKIKENHSYLNNKLEGKYFEYFPDGKIKDERTYHAGKVVGKYTVYFESGKIRAIYNKNNKDQYHGTNEEYSPEGQLVSKSTYKEGKQLSSQTWYKNGKMRQEEIYDNEGRKNGVSREWFDNGQLNTSTSYKNDILDGDSQKWNEQGEIVSLSPYKDGKLQGEHKYYDSGKLLYTTMYKNDKKDGPDRRWSINTGKLIEEMPYVEGIRSGIKKEFNDRTGRLLTTTPYVNNEIQGTGETYNADGVSIIHCYINNKSIDSLYNPIEIREKASQSDDNAQYELGKYHYTCQDYDRGLKWLEKSADHKNIKALFLLAQMYNEGDGVKEDQTKYFSYLLKAAQLGLSDAQVEIGYLYLVGEGVEKNLPEAYQWHIKAAEQGNVHAHYNLGWIYQNGDGTEKNLDKAKFHFTVAAKSGMREAYEELKKLESNK

SEQ ID NO: 52977 - DNA, 1473 bp, Cryptococcus neoformans var. neoformans JEC21
  CDS (1)..(1473)
atggcagccaccaacgcccagatatatcaacagtctcagatgcccatgcctatgcccatgcctatgcccaccccgtctctcaaccccaacatcaactcggccccaactccaggcccaaatgccatgagcgtctacgacgactgtcagagcccgcttgataccagtgtcagtggcatgtatcctggagatagaggaagccgtgtcgtcagccaacctgctcctttattagatcagtcccacctacgaccgggcaatcaggccaaccttctctctcatgaccgcactattgaactgtaccgcgaaaatgccaaaaagacgaacgatcccgaactcatattcgagttctctgcgttcatgatcgatgcggccaaagcgatgattcctcctgagcaggaaaatgacaccaacccttcgcctgcggtcataaaacaaatggaaaaacgagaagagattatcaaggaggctacatcgttacttaaacgattagccgataggggtttcccagacgcccagtactttttggccgactgttatgccaatgggattggtacagcgagaggcaagcaagactttgacagggcattccccctctttattcttgctgccaaacacggccatccggatgcttgctacagagctggaacatgttgtgagcatggatgggggtgtaggagggatagtgcaaaggccgtttccttttacaacaggaaagccgcagtcggtctccaccctggggcaatgtaccgacttggcactgctgaactcaatggcgctcttggattcccccgtcgcccaaaggaaggtgtcaaatggctcaagcgatccgcggaacacgccactgaagaattccctcacgcccttcatgaactcgcccttttgcatgaaagaggtattgaaaatgttgttttcgtagacaatgattatgctgctgagcttctcgctcaaagcgcagagctgggatatgctccgagcgctttcaagctgggagagtgttacgaatacggcaagatgggatgccctgtcgatcctgccttgtctatccactactataacatttctgcccagcaaaatcacaaagatgcctgtttcgccctcacagcatggtacctcgtcggttcgcccggtgtcctcccacaatcagatacagaagcctacctctgggctaagaaagcggccgagctaggattggccaaggcgcagtatgccgttggatactttaccgagactggtataggaatagaagccaaccctcaagccgcacttacatggtacaaaaaagcagctgagggaggtgataaacgtgctgcaaagagattggctactggatccaggagttcagcactagataggagattagaaatggaggctttgaaggaagaaaagagattgggagccgcagaccttgcgcaaaggtccggcagcggcagtggtgcaagtggaaaggatgggaaggacgggtgtttgatcatgtaa

SEQ ID NO: 52978 - protein, 490 aa, Cryptococcus neoformans var. neoformans JEC21
MAATNAQIYQQSQMPMPMPMPMPTPSLNPNINSAPTPGPNAMSVYDDCQSPLDTSVSGMYPGDRGSRVVSQPAPLLDQSHLRPGNQANLLSHDRTIELYRENAKKTNDPELIFEFSAFMIDAAKAMIPPEQENDTNPSPAVIKQMEKREEIIKEATSLLKRLADRGFPDAQYFLADCYANGIGTARGKQDFDRAFPLFILAAKHGHPDACYRAGTCCEHGWGCRRDSAKAVSFYNRKAAVGLHPGAMYRLGTAELNGALGFPRRPKEGVKWLKRSAEHATEEFPHALHELALLHERGIENVVFVDNDYAAELLAQSAELGYAPSAFKLGECYEYGKMGCPVDPALSIHYYNISAQQNHKDACFALTAWYLVGSPGVLPQSDTEAYLWAKKAAELGLAKAQYAVGYFTETGIGIEANPQAALTWYKKAAEGGDKRAAKRLATGSRSSALDRRLEMEALKEEKRLGAADLAQRSGSGSGASGKDGKDGCLIM

SEQ ID NO: 52979 - DNA, 900 bp, Parachlamydia sp. UWE25
  CDS (1)..(900): transl_table=11
atgcaattaaaatatatagatggcgatgctcctagcaactactttgctctttcttctagcccagatccaaaattaagccaaagtacaataaacaatggtaaaacatatatccttttaggaagctttgaaaaaacataccctttaatgcgtagaattggaattggaatatatataacttttaagactttatgtacgttaggcttggggcttttttctgaaaatgttcgagaagattggaagtctttttggagcggtaaaaaaagtaaaattatttactcttcttctccctcatttttaccaattaaacttttggcagaccaaggcgatgcaaaagctcaatataaacttggagtcatatatgccaatgggcggggtattacacaatcagatacagaagcttttaaatattttaaactcgctgccgatcaaggtcatgcagttgctcaatataaccttggagtcatatatgacaatgggcagggtattacacaatcagagcaagaggctattaaatattacaaactcgctgccgatcaaggtgatgcagatgctcaatataatcttggagtcatatatgccaatgggcagggtattacacaatcagatgcagaagcttttaaatattttaaactcgctgccgatcaaggtgatgcagatgcccaatacgagcttggagtcaggtatgccaatgggcagggtattacacaatcagatacagaagcttttaaatattttaaactcgctgccgatcaaggtgatgcagatgctcaatacaacctcgaagtcagatattccaatggacgaggtgttatacaatcagatcaagaagcttttaaatattttaaactcgctgccgatcaaggtgatgcagatgcccaatacgagcttggaactctgtaa

SEQ ID NO: 52980 - protein, 299 aa, Parachlamydia sp. UWE25
MQLKYIDGDAPSNYFALSSSPDPKLSQSTINNGKTYILLGSFEKTYPLMRRIGIGIYITFKTLCTLGLGLFSENVREDWKSFWSGKKSKIIYSSSPSFLPIKLLADQGDAKAQYKLGVIYANGRGITQSDTEAFKYFKLAADQGHAVAQYNLGVIYDNGQGITQSEQEAIKYYKLAADQGDADAQYNLGVIYANGQGITQSDAEAFKYFKLAADQGDADAQYELGVRYANGQGITQSDTEAFKYFKLAADQGDADAQYNLEVRYSNGRGVIQSDQEAFKYFKLAADQGDADAQYELGTL

SEQ ID NO: 52981 - DNA, 930 bp, Parachlamydia sp. UWE25
  CDS (1)..(930): transl_table=11
atgacagtaaaatacatagatagcaatgttctccccaataaatatgctaatttctccccctgcttgaattcagaattaaatcaaagcaaagtttacaatggtaaaacttatacccttttaggaagctttgaaaaaacatatcctttaatacgtaggattgaaattggaatacgtgcagttttcaaaactctattttctttaggattcggacttctttttgaaagtgttagagaggattggaagactttttggaatggtaagaaaagaaaaatcatttatactttttcctcttttttaccggttaaacttttggcagaccaaggcgatgctaaatctcaatacctctttggattaaggtatataaacggccaaggtgtcgcacaatcagatcaagaagcttttaaatattttcaacttgctgccaatcaaaattatgcagatgctcaatacagccttggttgtatgtatgaaaacggccaaggtgtcgcacaatcggatcaaaatgctgcgcaatgttatcagctcgccgctaatcaaaatcatgtaaaagctcaatataacctgggtgtcatgtatatgcatggccaaggtgtcgcgcaatcggatcaagaagccgctcgatattatcaactcgctgctaaacaaggccatgcaaaagctcaattcagccttggattcatatatgcacatggaaaaggtgttgagcaatcggatcaaaaagctgtgaaatattatcaacgcgctgctaaacaaggaaacgcctctgcacaatgcaatctcggagttatgtattcaagcggtcgtggtgtcccacaatcggatcaagaagccgctcgatattatcaactcgctgccgatcagggtgatctaattgctcaaaggaacctcagaactatgcgtgaaaatggacgccttaataatatagcgtag

SEQ ID NO: 52982 - protein, 309 aa, Parachlamydia sp. UWE25
MTVKYIDSNVLPNKYANFSPCLNSELNQSKVYNGKTYTLLGSFEKTYPLIRRIEIGIRAVFKTLFSLGFGLLFESVREDWKTFWNGKKRKIIYTFSSFLPVKLLADQGDAKSQYLFGLRYINGQGVAQSDQEAFKYFQLAANQNYADAQYSLGCMYENGQGVAQSDQNAAQCYQLAANQNHVKAQYNLGVMYMHGQGVAQSDQEAARYYQLAAKQGHAKAQFSLGFIYAHGKGVEQSDQKAVKYYQRAAKQGNASAQCNLGVMYSSGRGVPQSDQEAARYYQLAADQGDLIAQRNLRTMRENGRLNNIA

SEQ ID NO: 52983 - DNA, 1140 bp, Parachlamydia sp. UWE25
  CDS (1)..(1140): transl_table=11
ttgttagtaaaatacataaacgacaacgctatttccaataaatattttaatgctacttcctgtttgaatctagaattcgaacaaagtaagatgtacaaaggtagaacatatctactcttgggaaattttgaaaaaacatattctttaataagtagatttgaaattggaataagggtaatttttaaaactttattttctgtaggatttgggcttttttttgaatcagttagagaagattggaaatctttttggaatggtagaaaaaaacaagttatttacagctcctccccttttttagctacaaaaattttagtaaagcaaggaaatgcaactactcaatacaagcttggagttatgtatttagaaggaaaaggtactatccagtctcatcaaaaagctgcgaaatattttcaactcgccgccaatcaaaatcatgcagctgctcagaataatcttggactcctgtatgcaaatggatggggcattgcccagtctgatcaagaagctgtaaaatattaccaacttgctgctaaacaaggaaacgcttctgctcaatgcagactcggagatttatatgtacatggacgaggtgtttcacaatcttaccaaaaaagttttgaatattaccaacttgctgctaaacaaggaaacgcttctgctcaatgcaaactcggagcaatgtatgcagagggcctaggtgtcccacaatctgatcaagaagctgtggaatattttcaactcgctgccaatcaaaatcatgcagctgctcagtattgcttaggagttttttatgcacatggacgaggtgttacacaatctgatcaaaaagctttagaatattgccaactcgctgctaatcaaggtattgcaaccgctcagtatagccttggactcatgtatgcacatggccactgtgtcccacaatctgatcaagaagctgtaaaatattaccaactcgctgctaatcaaaatcatacaatcgctcaacgcaacctcggattgatgtataaaaatggccaaggtgtcgcacaatcggatcaagaagcggttaaatactttcaactcgctgccaaccaaggtgatttaactgcccagcataatcttgaggttatgaatgaaaatggccaaaacattacataa

SEQ ID NO: 52984 - protein, 379 aa, Parachlamydia sp. UWE25
MLVKYINDNAISNKYFNATSCLNLEFEQSKMYKGRTYLLLGNFEKTYSLISRFEIGIRVIFKTLFSVGFGLFFESVREDWKSFWNGRKKQVIYSSSPFLATKILVKQGNATTQYKLGVMYLEGKGTIQSHQKAAKYFQLAANQNHAAAQNNLGLLYANGWGIAQSDQEAVKYYQLAAKQGNASAQCRLGDLYVHGRGVSQSYQKSFEYYQLAAKQGNASAQCKLGAMYAEGLGVPQSDQEAVEYFQLAANQNHAAAQYCLGVFYAHGRGVTQSDQKALEYCQLAANQGIATAQYSLGLMYAHGHCVPQSDQEAVKYYQLAANQNHTIAQRNLGLMYKNGQGVAQSDQEAVKYFQLAANQGDLTAQHNLEVMNENGQNIT

SEQ ID NO: 52985 - DNA, 1239 bp, Parachlamydia sp. UWE25
  CDS (1)..(1239): transl_table=11
atgcaattaaaatttatagatggcaacgctcctagcaactactctgccctttcttctagcatggattcaaaattaagccaaaataaaataatcaatggtaaagcgtacatacttttaggaagctttgaaaaaacatatccactagtgcgtagaatttggattggaatccgtgcattttgcaattctctattttctttaaaagtcgggcttttttctgaaagtgttcgagaagattggaagtctttttggaacggtaaaaaatgtaaaattatttactcttcttctcccccatttttaccaactaaaaatttggcagaccaaggcgatacaaaagctcaatacaaactcggattgatgtatgatgaaggctgtggtgtgacacaatcaaagcaagagacttttaaatattttaaactcgctgccgatcaaggccatgtaatggctgaatatagcctcggagccatgtatgatgaaggctgtggtgtgacacaatcaaagcaagaggcttttaaatattttaaattcgctgctgatcaaggcgacgcaacggctcaatataaacttggagccatgtatgatgaaggcagcggtgtgacacgctcagagcaagaggcttttaaatattttaaactcgctgccgatcaaggccatgcaacggcccaatataaacttggaatcatatatggctatggaaggtgtgttacaaattcagagcaagaagcttttaaatattacaaactcgctgccgatcaaggccatgtaatggctcaatatagccttggattaacgtatgcttatggatggggcgttaagcaatcaaagcaagaggcttttaaatattttaaactcgctgctgatcaaggccatgcaaaggctcaatatcagctcggagacacgtataaaaatgggcgaggtgttaagcgatcaaagcaagaggctattaaatattacaaacttgctgccgatcaaggttatgcagatgctcaatattatcttggaatcatatatgataaaaaacgagatgctatacaatcaaaacaagaggcttttaaatattttaaactcgctgctgatcaaggccatgcagatgctcaatactttgtcggaatgatgtaccaaaaaggaagaggtgtctctccatcagaagaaggggctattaaatattacaaacttgctgccaaacaaggcgatacaatggcagcaagtaaaattaactctataatctctcgacagaactag

SEQ ID NO: 52986 - protein, 412 aa, Parachlamydia sp. UWE25
MQLKFIDGNAPSNYSALSSSMDSKLSQNKIINGKAYILLGSFEKTYPLVRRIWIGIRAFCNSLFSLKVGLFSESVREDWKSFWNGKKCKIIYSSSPPFLPTKNLADQGDTKAQYKLGLMYDEGCGVTQSKQETFKYFKLAADQGHVMAEYSLGAMYDEGCGVTQSKQEAFKYFKFAADQGDATAQYKLGAMYDEGSGVTRSEQEAFKYFKLAADQGHATAQYKLGIIYGYGRCVTNSEQEAFKYYKLAADQGHVMAQYSLGLTYAYGWGVKQSKQEAFKYFKLAADQGHAKAQYQLGDTYKNGRGVKRSKQEAIKYYKLAADQGYADAQYYLGIIYDKKRDAIQSKQEAFKYFKLAADQGHADAQYFVGMMYQKGRGVSPSEEGAIKYYKLAAKQGDTMAASKINSIISRQN

SEQ ID NO: 52987 - DNA, 1344 bp, Parachlamydia sp. UWE25
  CDS (1)..(1344): transl_table=11
atgcgatcaaaatttatagatggcgatattcctagcagctactctgctctttcttccagtccggatctaaaattaagccaaagtacgataaacaatggtaaaacatatatccttttaggaagctttgaaaaaacataccctttaatgcgtagaattggaattggaatatatgcagcttttaagactttatgtacgttaggcttagggcttttttctgaaagtgttcgagaagattggaagtctttttggagcggtaaaaaaagtaaaattatttactcctcttctccctcatttttaccaattaaacttttggcagaccaaggcgatgcaaaagctcaatgcgagcttggactcatgtataaaaatggtcaagttgtcgcacaatcagatgcagaagcttttaaatattttaaacttgctgctgatcaaggtgatgtaaaggctcaatacaaccttggatgcatgtatatcaatgggcggggcgttgtgcattcagagcaagaggctattaaatattttaaattcgctgctgatcaaggccatgcagatgctcaattcattattggaattagatataaaaagggtcgaggtgtctcccaatcgaatcaagaagctactaaatattttcagcttgctgccaaacaaggccatgcagaagcgcagcttgagctcaagctcattatagaaagccatgatattgcacaaacgaatcaagaaacttttaaatattttaaactcgctgccgatcaaggcgatgtaaatgctcaatccaaacttggaactatgtataaaaaggggttaggagttgagcaatccaatcaagaagctattaaatattttaaactcgctgccgatcaaggcgatgtaaatgctcaatataatcttgcattcatgtatgcaaaaggaaaacgggttccacaatctcaccaagaagctattaaatattttgaactcatagctgaccaaggtgaggcaattgctcaatgtgctcttggatttatgtatttccagggaaaaggtattacacaatcccatcaagaagccgctaaatactttaaatttgcagccgatcaaggtgaggcagatgctcaatgtgctcttgggtttatgtatgccaatggactaggcgtcacacaatctgatcaagaagctgctaaatattacaaactcgctgccgatcaaggccatgcagatgctcaatacgagcttgggactatgtataaaaaggggctaggagttgaacaatccagtcaagaagctctgagatattatcaacttgctgctgaacaagggaatactcaggcagcaataaaaattgactctattatttctcaaaaaaactaa

SEQ ID NO: 52988 - protein, 447 aa, Parachlamydia sp. UWE25
MRSKFIDGDIPSSYSALSSSPDLKLSQSTINNGKTYILLGSFEKTYPLMRRIGIGIYAAFKTLCTLGLGLFSESVREDWKSFWSGKKSKIIYSSSPSFLPIKLLADQGDAKAQCELGLMYKNGQVVAQSDAEAFKYFKLAADQGDVKAQYNLGCMYINGRGVVHSEQEAIKYFKFAADQGHADAQFIIGIRYKKGRGVSQSNQEATKYFQLAAKQGHAEAQLELKLIIESHDIAQTNQETFKYFKLAADQGDVNAQSKLGTMYKKGLGVEQSNQEAIKYFKLAADQGDVNAQYNLAFMYAKGKRVPQSHQEAIKYFELIADQGEAIAQCALGFMYFQGKGITQSHQEAAKYFKFAADQGEADAQCALGFMYANGLGVTQSDQEAAKYYKLAADQGHADAQYELGTMYKKGLGVEQSSQEALRYYQLAAEQGNTQAAIKIDSIISQKN

SEQ ID NO: 52989 - DNA, 1338 bp, Parachlamydia sp. UWE25
  CDS (1)..(1338): transl_table=11
atgcaattaaaatatatagatggcgatattcctagcagctactctgctctttcttccagtccagatctaaaattaagccagagtacaataaacaatggtaaaacatatattcttttaggaagctttgaaaaaacataccctttaaagcgtagaattggaattggaatatatgcagcttttaagactttatgtacgttaggcttagggattttttctgaaagtgttcgagaagattggaagtctttttggagcggtaaaaaaagtaaaattatttactcttcttctccctcatttttaccaactaaacttttggcagaccaaggcgatgcaaaagctcaatacaaactcggattgatgtatgatgaaagctgtggtgtgacacaatcagatgcagaagctattaaatattttaaactcgctgccaaacaaggtcatgcagatgctcaatataaccttggggtcaggtatgccaatgggcggggtgtgacacaatcagatcaagaagctattaaatattacaaactcgctgccgaacaaggccatgcagatgctcaatatgctcttggatttatgtatgccaataggtggggtattgcacaatcagagcaagaagctattaaatattacaaactcgctgccgaacaaggtcatgcagatgctcaatatgctcttggatttatatatgccaatggactgggtgttacacaatcagatgcagaagcttttaaatattttaaactcgctgccgaacaaggccatgcaaatgctcaatacaacctcggagtcagatattccaatggacgaggtgttacgcaatcagatcaagaagcttttaaatattacaaacttgctgccgatcaaggtcatgcagatgctcaatataatcttggagtcaggtatgtgaatgggcaaggcgttatgcgatcagagcaagaagccgctaaatattacaaactcgctgccgatcaaggctatgtagatgctcaatacaaccttggagtcagatattccaatggacgaggtgttatgcaatcagatcaagaggctattaaatattacaaacttgctgccgatcaaggtcatgcaaaggctcaatacaaccttggagtcagatattccaatggacgaggtgttacgcaatcagagcaagaggctactaaatattataaacttgctgccgatcaaggtgatgcaaaggctcaatacaaccttggagccaggtatgcgaatgggcgaggcgttacgcaatcagagcaagaggctgctaaatattacaaacttgctgccgatcaaggccatgcagatgcccaatacgagcttgaaactctaactctgtaa

SEQ ID NO: 52990 - protein, 445 aa, Parachlamydia sp. UWE25
MQLKYIDGDIPSSYSALSSSPDLKLSQSTINNGKTYILLGSFEKTYPLKRRIGIGIYAAFKTLCTLGLGIFSESVREDWKSFWSGKKSKIIYSSSPSFLPTKLLADQGDAKAQYKLGLMYDESCGVTQSDAEAIKYFKLAAKQGHADAQYNLGVRYANGRGVTQSDQEAIKYYKLAAEQGHADAQYALGFMYANRWGIAQSEQEAIKYYKLAAEQGHADAQYALGFIYANGLGVTQSDAEAFKYFKLAAEQGHANAQYNLGVRYSNGRGVTQSDQEAFKYYKLAADQGHADAQYNLGVRYVNGQGVMRSEQEAAKYYKLAADQGYVDAQYNLGVRYSNGRGVMQSDQEAIKYYKLAADQGHAKAQYNLGVRYSNGRGVTQSEQEATKYYKLAADQGDAKAQYNLGARYANGRGVTQSEQEAAKYYKLAADQGHADAQYELETLTL

SEQ ID NO: 52991 - DNA, 972 bp, Parachlamydia sp. UWE25
  CDS (1)..(972): transl_table=11
ttggcttatttagctttcaaagacaaaaaacaagcaagaataaaagttttattagttctagcgaaagtggtgggggtcattatgaacgcagtggatttttattgcggtcaatacttagtcaatccagtcaatcaattgatactaagtccctttccaactgagcttaataaacctctgttggtaagactgtcaatgctttatcatgcgactgtggtgttagttaattcacaaatgacttcaatcttttacttcttacttggtagagtcaataattttatttcgtgtgcatgttctgaacgaaatacagctttagcggtgaaaattttggccagtcaaaaaaatgctcgagctcaaaattatttaggttacttatatgagtcaggcaagggagttaaacaaaataacgaaaaagctttttattactatcgattagctgcccatcaaaatattacgaacgcgcaacttaaaattggtctgatgtatttagaaggaaagggaattacacaatcggatgagcaacaagccgttttttatttaaaactcgctagtgataatggttctttagaggcgagatatcgactttcgttgctatatttaagcgggcatggagttgaaaaaaatgaaaagaaggctttacagctttgtcagtctgccgctaataatggatacatgttggctcaatttaaacttgccaagagttatgaatatggcttaaatggtgtctctaaaaatcagcaaaaagctgcagaatattataaaggagctgcagatcaggggcatcttgaagcaaaacatcgttatggcattttctgttgtttaggacaaggttgttcacaaaataatcaagaggcaattaaatatttgcagtctgcctatgatttaggatatttaggatctaaaatttaccttgataaaattctcagttatgagaatagactgagaatatatcattattggaatatgagagaataa

SEQ ID NO: 52992 - protein, 323 aa, Parachlamydia sp. UWE25
MAYLAFKDKKQARIKVLLVLAKVVGVIMNAVDFYCGQYLVNPVNQLILSPFPTELNKPLLVRLSMLYHATVVLVNSQMTSIFYFLLGRVNNFISCACSERNTALAVKILASQKNARAQNYLGYLYESGKGVKQNNEKAFYYYRLAAHQNITNAQLKIGLMYLEGKGITQSDEQQAVFYLKLASDNGSLEARYRLSLLYLSGHGVEKNEKKALQLCQSAANNGYMLAQFKLAKSYEYGLNGVSKNQQKAAEYYKGAADQGHLEAKHRYGIFCCLGQGCSQNNQEAIKYLQSAYDLGYLGSKIYLDKILSYENRLRIYHYWNMRE

SEQ ID NO: 52993 - DNA, 1428 bp, Desulfovibrio vulgaris subsp. vulgaris str. Hildenborough
  CDS (1)..(1428): transl_table=11
atgtcccgcaccattgccgaaacaccccgtcccgccgtagcgtccatgtccagcggctgcataccgccccaccatcgccctgacacgttgaagcagcgatggggcaccccggctgcggtctgcctgctggtgacctgtcttttcgcgatgacgctgctcaccaccggctgcaagcccccccgcaggaccccgcccacgctccccgaccggcccgacatggctacggtggaacagcccgtcgtcccgcccgccactgtggacggcaaggaccttgacgccccccagacaccgaaagaacgcatcgcgctcgccttgcgccttctcgatgacggcggcgacggggccgacccgacgcaggctgtgcaactcatcgaacaggatgccacgacgggatacgcccccgcgcaagacctgctcgcccgtctttcgctggaagggtacggcacggccaaggacccggcgcgcgccttcgcactggccatcgaagccgcccgacagggattgcccgatgcacaaaggcttgccgggaccatgtacacactcggactgggtaccgcccgcgaccttgagcagggaatgcgctggctgcgcgaagccgccgacgcaggcgacggtgaagccgcagccatggtagccgactattaccggcaaggcctcggggtggaacggaacgacacggaagccttcctctggacccaccgcgcagccgaacgcggcgtgaagcgtgccgcgctatggcttggcctgcactaccactacggtgtaggcactcctgcagaccagaaacaggccttcgcccttctcagacctttcgcagacgaaggcgatgcagaggcgctgaccatcatcgccctgctactgcacaagggggaaggcgtcgcacaggacaggaaggcggcccttcgctatttcgagaagggagcagcagcgggggacccggtggcacaactcgacctcggggtgctgtaccatcagggtgacggcgtcacgcgtgacatggacaaggcgcgcggcctcttccgtcaatgcgcggaaggcggcaacgcccggtgcatgaccctgtacgccagcatgctcgaagaaggggaaggcggaccgtcagacccggctgaagccctcgcatggtacatggtcgcgtccatggccggagatgatgacgcaacgccgttccttgacgacctgcgaagccgcatcaccgcggaacaggcagcacagggcaaggtcagggccaccgccatcatcaggtcgttgaccgcaagccccgccgctgacgaagcgtcacggcaatcatccgggcagactgcgggccaagcatcgggccacgcttcgggccagacgccagagagtacctcggcgcggacatcggccccggtgccatctgcccttccccgcgaggcggcaggcaagcgtccgaccgtactgccctga

SEQ ID NO: 52994 - protein, 475 aa, Desulfovibrio vulgaris subsp. vulgaris str. Hildenborough
MSRTIAETPRPAVASMSSGCIPPHHRPDTLKQRWGTPAAVCLLVTCLFAMTLLTTGCKPPRRTPPTLPDRPDMATVEQPVVPPATVDGKDLDAPQTPKERIALALRLLDDGGDGADPTQAVQLIEQDATTGYAPAQDLLARLSLEGYGTAKDPARAFALAIEAARQGLPDAQRLAGTMYTLGLGTARDLEQGMRWLREAADAGDGEAAAMVADYYRQGLGVERNDTEAFLWTHRAAERGVKRAALWLGLHYHYGVGTPADQKQAFALLRPFADEGDAEALTIIALLLHKGEGVAQDRKAALRYFEKGAAAGDPVAQLDLGVLYHQGDGVTRDMDKARGLFRQCAEGGNARCMTLYASMLEEGEGGPSDPAEALAWYMVASMAGDDDATPFLDDLRSRITAEQAAQGKVRATAIIRSLTASPAADEASRQSSGQTAGQASGHASGQTPESTSARTSAPVPSALPREAAGKRPTVLP

SEQ ID NO: 52995 - DNA, 1179 bp, Acinetobacter sp. ADP1
  CDS (1)..(1179): transl_table=11
atgggtaccaatatatctggaatgatttttaaatgttctagcgaccaagatgatattgaaaatttagttcataaatggataaaagatgaagattcattttttgatcaacaatcaactatacatattgaatttttaaataataatttaattcttattcataatcatgagatttttgagtctgcaaaaaataatcctaaattatgggaaaaactactactcaatttaaaggaatcggagtggacagttttctttaaatgtgtcgatagctttgaatcatttagttatatcatatatcaaaatcgtaaagaaatacgtaaagtaatccaatatcagggatcaaatctttatcaaactggccaacctttgaattgcgaaaaatcttggctgaattttactattttttatgaacgagaaagttacactgatggttcttataaaattgaaagatatgagattccagatctaaatgatgagagcaatccagatattcaatatcacaagtactattatattatagaaaaaagcttatctttttatcatcattaccttgctcgtgcacttttagtagaagtgcttcaatatcacttaggttttgatattattgatagcgactacaatacatctcaatctttaattatcaactgtgaagatattccaaactttaaacgaacattaaaacaagctcaagaaggatgtatcaaggctcaaaatcaattagcatctatgtatctaaatggtttagatgttactcaaaatatgtctttagcgcttttttggtatgaaaaaacggcgtctcaaaatgatcctgaaggagaactaaatctaggtaaactctatttgaacggcctagggatagaaaaaaattatgagttaggattaacttggattaaaaaatcagtaaagcagaattatccagatgcctattttaccttggcggagttgtatgaaaaaggtcatattgttcaaaaagatattcaacaagctttaatattttataaaaaggctgcaaatcttagacatgcaacttccgcttatagattaggccaaatatttgaattaggtcaaggagttaccctagatttaaaattagctaaaaggttttatcatcaagcagcaagtaactttagctcagaggccaaaaatcgtttagatattttagatcagttgataaataagtag

SEQ ID NO: 52996 - protein, 392 aa, Acinetobacter sp. ADP1
MGTNISGMIFKCSSDQDDIENLVHKWIKDEDSFFDQQSTIHIEFLNNNLILIHNHEIFESAKNNPKLWEKLLLNLKESEWTVFFKCVDSFESFSYIIYQNRKEIRKVIQYQGSNLYQTGQPLNCEKSWLNFTIFYERESYTDGSYKIERYEIPDLNDESNPDIQYHKYYYIIEKSLSFYHHYLARALLVEVLQYHLGFDIIDSDYNTSQSLIINCEDIPNFKRTLKQAQEGCIKAQNQLASMYLNGLDVTQNMSLALFWYEKTASQNDPEGELNLGKLYLNGLGIEKNYELGLTWIKKSVKQNYPDAYFTLAELYEKGHIVQKDIQQALIFYKKAANLRHATSAYRLGQIFELGQGVTLDLKLAKRFYHQAASNFSSEAKNRLDILDQLINK

SEQ ID NO: 52997 - DNA, 723 bp, Acinetobacter sp. ADP1
  CDS (1)..(723): transl_table=11
ttgcagatcattgtgaccatcattatgcgcaaaagaatgtttccaattacactgatcatatctctaagcattgggttgatcagctttcaaacttacgccgagcctaccctcagcgacatcaaacaaatggcggcacaaggcaaatctacggcacaatatcatcttggcatgatgtatttaagtggtgaacaaggcgtcaccaaagatacaactcaggcgcttaaatggctcacgcttgccgatcaaaatggtagcgtaggtgctaaatatagcttgggtttgatgtatatgacaggaacgggggtatctcaaaatcaatccactgcatttgaatggttcagtaaagctgcaaagtttggacatgctcaagcacaatataccgtcggacgcatgtacagtgaaggtgtaggcgttgaaaaaaatatgcctcaagcatttgaatggattcaaaaagcagcgttgcagggttatcctcctgcggaatttagtctgggcttaatgtacaacgatggccgtggtgttgcccagaataaacagcaagccatcaagtggtatactcaagccgcagaacatcagcaaagtaatgctcaatataaccttggcatcatgtatctgaacggcgaagggacttctaaaaacccacctctagccaaaaaatggttacaacgcgctgccaatgcaggcgatcaagatgcaaaagatgtattaaaaggattaaaatga

SEQ ID NO: 52998 - protein, 240 aa, Acinetobacter sp. ADP1
MQIIVTIIMRKRMFPITLIISLSIGLISFQTYAEPTLSDIKQMAAQGKSTAQYHLGMMYLSGEQGVTKDTTQALKWLTLADQNGSVGAKYSLGLMYMTGTGVSQNQSTAFEWFSKAAKFGHAQAQYTVGRMYSEGVGVEKNMPQAFEWIQKAALQGYPPAEFSLGLMYNDGRGVAQNKQQAIKWYTQAAEHQQSNAQYNLGIMYLNGEGTSKNPPLAKKWLQRAANAGDQDAKDVLKGLK

SEQ ID NO: 52999 - DNA, 1068 bp, Desulfotalea psychrophila LSv54
  CDS (1)..(1068): transl_table=11
ttgtattattttccaacgagagtcttttgtatgaaacataaaatttttatcattgtttggcttttattattttattcaacctcttcccatgcaagcgaaatagcacaagaaattcaagccgtaaacgccgaaactcaatttcgactgggatcgctctaccacaaaagcacagcagattcaaaagatcagcaaaaggcattttcctggttccaaaagagtgcccgactgggacatgccggtgcccagtaccaactggcagtcatgtattaccaaggtaaaggaactctaaaagacctaaaaaaggcatttacctggctgaagaagagcgcccaacaaggagatgcttcggctcaatatcaactgggaattatgtattaccagggtaaaggaatgataaaagacccaaagagagcattttactggcttgaaaaaagtgcccagcagggagatggcaatgctcaatatcaactggcagccatgtaccacaacggtgagggaacgccaagaagcccgatacaagaactttcctgggtggaaaagagtgctcgacaaggacacagggctgctcaatttcgactgggagtcatgtattacagaggtgagggaacgccaaaagacccgaagagggcattgccctgggtagagaagagtgcccggcagggaaatgccatggctcaatatcaactggcagccatgtatcacactggtaagggaactctaaaggatgctaagagagcatttttctggttcaagaagagtgcacgacagggacatagggccgcccaataccaactgggagacatgtactacaggggtgagggaactctaaaggatcaggagagggcattttcctgggtggagaagagtgcccggcaaggagatagggctgctcaatatcaactggcagtcatgtactatctgggcaagggcacagcaaaagacctgaagagggcattttcctggtttgagaaaagtgccaagcagggacatagggctgcccaacgtcaactaagagtcatgtcttacaagggtgaaggacaagtaactacagaagatggcgggctgtga

SEQ ID NO: 53000 - protein, 355 aa, Desulfotalea psychrophila LSv54
MYYFPTRVFCMKHKIFIIVWLLLFYSTSSHASEIAQEIQAVNAETQFRLGSLYHKSTADSKDQQKAFSWFQKSARLGHAGAQYQLAVMYYQGKGTLKDLKKAFTWLKKSAQQGDASAQYQLGIMYYQGKGMIKDPKRAFYWLEKSAQQGDGNAQYQLAAMYHNGEGTPRSPIQELSWVEKSARQGHRAAQFRLGVMYYRGEGTPKDPKRALPWVEKSARQGNAMAQYQLAAMYHTGKGTLKDAKRAFFWFKKSARQGHRAAQYQLGDMYYRGEGTLKDQERAFSWVEKSARQGDRAAQYQLAVMYYLGKGTAKDLKRAFSWFEKSAKQGHRAAQRQLRVMSYKGEGQVTTEDGGL

SEQ ID NO: 53001 - DNA, 798 bp, Desulfotalea psychrophila LSv54
  CDS (1)..(798): transl_table=11
atgaaaggctttaggatgaaatataaaattcttattactgtttggacgttacttttttttgcaacattttgccatggaagcgaaataatggaaaaggctcaacagggaaacgccatagctcaatctcggttaggattaatgtactacactggtgagggtgtgtcgaaagacttgaaggaagcatttatctggtttgaaaagagcgctcagcagggatattccacagctcaatacaatatgggagatatgtattataatggaaagggaactacgaaaaacttgaaggaagcatttgcctggtttgaaaggagtgccctgcagggagctgctttagctcaaatgcggttaggattaatgtactacactggcgagggtactgcgaaagacttgaaggaagcatttatctggtttgaaaggagtgctctgcaggggcaggctttatctcagtttcaactaggagtaatgcactatactggtaaaggtaccccgaaaaacttaaagcaatctcttgtttggcttgaaaagagtgctctacaagaaaatagtaatgctcagtataatttaggttacatgtattataaggggcaagggactgcgaaagacttgaagaaagcattcagctggtttgaaaagagtgctctactaggggatgctgtcgctcaatatcggctaggattaatgtattataagggccaggggactgtaaaagatctgaataagacatttttctggcttgataagagcgcccaacaagggaatgctcgtgctcaggctatcatggaaggtcttgaggggtga

SEQ ID NO: 53002 - protein, 265 aa, Desulfotalea psychrophila LSv54
MKGFRMKYKILITVWTLLFFATFCHGSEIMEKAQQGNAIAQSRLGLMYYTGEGVSKDLKEAFIWFEKSAQQGYSTAQYNMGDMYYNGKGTTKNLKEAFAWFERSALQGAALAQMRLGLMYYTGEGTAKDLKEAFIWFERSALQGQALSQFQLGVMHYTGKGTPKNLKQSLVWLEKSALQENSNAQYNLGYMYYKGQGTAKDLKKAFSWFEKSALLGDAVAQYRLGLMYYKGQGTVKDLNKTFFWLDKSAQQGNARAQAIMEGLEG

SEQ ID NO: 53003 - DNA, 2163 bp, Yersinia pseudotuberculosis IP 32953
  CDS (1)..(2163): transl_table=11
ttgaaaaaaaaactggtggcactcttaatactctcttatccgtctgttgcatatctaaagcaaccccctccggcagtacctaaacccattacctttgttgctaaaattgataacattgattttaacaaaacggccattgatagtgatatgaaattactgctggccgatcggttccactttaaaaccaaaaccccctgtaacaagaatacgctttcaggccggccagaatcatttggtttaacgtcagaagtatacgcggaaaaaatcaagagtttgctcgttgagatcttaagtgaacgttacctttttctgacaatagatcaatgtgaccgcggtggcacaccgatgctcaccaatatagaagtttgcactgaagcactgtgcggtgctgaattcatgaaaaaagaatcttatctttggttaaatcaagacttaaaggccacggtgaaacgccaggcgacatcggtgatccctatgccattaacctttgataaagaaaagcagctgtggaaagtggccgggtggtttattgagtcatcagaagaaactgaagaacttataccgagcaaactgctggcctttgaaggttatactgacgatgaaacattcaaaacacaaaaattcgtctctaccttcaaatcctattactccagtggaaatattcaacatattctcacttataataaagagggaaaagaggatgggaaatacgactcatattatgatgaaaaaggaaaattagctgagacgttggtatttaaaaatggcttgatcaatggtgagtatattatctaccatgaaaatggtgctattgaaagcaaacgacattttattgacagcaaaatagccgatggagagtgccctcattattacgacaatggaaacattaaagagaaccatagctatttgaataataaactcgaagggaaatactttgagtattttcctgatggtaaaattaaagatgaaagaacctaccatgctggcaaagtcgttggtaaatacacagtctactttgaatcaggtaaaattagagctatttataataaaaacaataaagatcagtaccatggaactaacgaggaatacagccccgaagggcagttagtgtctaaatcaacgtataaagaaggaaaaaaactctctagccagacttggtataaaaatggaaaaatgcgacaggaagaaatctacgataacgaaggtcgcaaaaatggcgtatcaagagagtggtttgataatggacaacttaatacatcaaccagctataaaaatgacatcttagatggtgatagccagaaatggaacgaacagggtgaaatagtatcactctcaccgtataaagacggcaaacttcagggtgaacataaatattatgattcaggaaaactactttataccacaatgtataagaacgataaaaaagatggtccggatagacgatggagtatcaatacagggaagttaattgaagaaatgccctatgttgaaggcataagaagcggcatcaaaaaagagtttaatgatcgtaccggtagactgttaacaaccaccccttatgtgaataatgaaatacagggcaccggagaaacatataatgccgatggtgttagcattattcactgctatatcaataataaaagtattgactcgctatacaatcctattgaaatacgcaaaaaagcctcacagagtgatgataatgcacagtatgaactgggtaagtatcattatacttgtcaagactatgatagaggtcttaagtggctagaaaaatcagcagaccataaaaatattaaggcgttatttcttttagctcaaatgtataatgaaggtgacggcgttaaagaagatcaaacccaatatttctcctatttactcaaagcagcgcagttagggctaagtgatgctcaagtggaaattggctatctgtatctcgtcggtgaaggggtagaaaagaacttaccagaagcctatcagtggcacataaaagctgccgaacaaggaaacgtgcacgcccattataaccttggttggatatatcaaaatggagacggcaccgagaaaaatttggataaggcaaaattccactttaccgttgcagctaaaagtgggatgagagaagcctatgaagaattaaaaaaattagaatccaacaagtaa

SEQ ID NO: 53004 - protein, 720 aa, Yersinia pseudotuberculosis IP 32953
MKKKLVALLILSYPSVAYLKQPPPAVPKPITFVAKIDNIDFNKTAIDSDMKLLLADRFHFKTKTPCNKNTLSGRPESFGLTSEVYAEKIKSLLVEILSERYLFLTIDQCDRGGTPMLTNIEVCTEALCGAEFMKKESYLWLNQDLKATVKRQATSVIPMPLTFDKEKQLWKVAGWFIESSEETEELIPSKLLAFEGYTDDETFKTQKFVSTFKSYYSSGNIQHILTYNKEGKEDGKYDSYYDEKGKLAETLVFKNGLINGEYIIYHENGAIESKRHFIDSKIADGECPHYYDNGNIKENHSYLNNKLEGKYFEYFPDGKIKDERTYHAGKVVGKYTVYFESGKIRAIYNKNNKDQYHGTNEEYSPEGQLVSKSTYKEGKKLSSQTWYKNGKMRQEEIYDNEGRKNGVSREWFDNGQLNTSTSYKNDILDGDSQKWNEQGEIVSLSPYKDGKLQGEHKYYDSGKLLYTTMYKNDKKDGPDRRWSINTGKLIEEMPYVEGIRSGIKKEFNDRTGRLLTTTPYVNNEIQGTGETYNADGVSIIHCYINNKSIDSLYNPIEIRKKASQSDDNAQYELGKYHYTCQDYDRGLKWLEKSADHKNIKALFLLAQMYNEGDGVKEDQTQYFSYLLKAAQLGLSDAQVEIGYLYLVGEGVEKNLPEAYQWHIKAAEQGNVHAHYNLGWIYQNGDGTEKNLDKAKFHFTVAAKSGMREAYEELKKLESNK

SEQ ID NO: 53005 - DNA, 1029 bp, Legionella pneumophila subsp. pneumophila str. Philadelphia 1
  CDS (1)..(1029): transl_table=11
atgcgtttacgtcttgtcatcttagttttagccgcaattattattggtgtgggaagttattctgggatagtgaatgtcattaaagagcccatagaaaatgtgataatagggtataaaagcccatcagcctggaataatcgtggtgtagattatgtgattggcaaaagagtagcacaaaatgactctgaagctgtaaaatggttttgcaaggcagcgaaacaaggcgaagccatggcccagcgcaaccttggcttgatgtatgctgcaggcaaaggggtccctcaggataatggcaaggctatgcaatggtttcgtaaagccgctcttcaaaatgatgccgtgtcacaattaaatcttggtgtcatgtatcaaaaaggtatgggtactcagcaaaacgatagggaagcaatcaagtggattcataaagcagccgcacaaggatttccagaggctgaacgtagtcttggcatcctatattccactgctgaaaatgggcaacaaaattatgtcgaagcttttaaatggcttcacaaggcagctgagaaagaagatgccatagcccaatataatcttgcagttatgtatgtcacaggcaagggggttcggcaaaatgatacggaagcagttaagtggtttcgtaaagcaggcaaacatggcgatctcatggctcaacgaacacttggattaatgtacgcaacggggagcaatgttcaacaggatgattttcaagcgatgaaatggtttcgtctggccgcgaaacaaggagatgctgtggctcaatataatataggtatgggctttcttaacggcaaaggggtgattcgaaatcacacaaaagctctgaaatggtttcatttagctgctagtcaaggattgccccaagctcaatatgtgcttgctgcactttatcatgatggagtgagtcttcctcaaaatagtatggaagcaataaagtggctccgaaaggctgctgcgcaaggtcacttgcaagctcaagagcgcctgcaggctctggttagacaggattag

SEQ ID NO: 53006 - protein, 342 aa, Legionella pneumophila subsp. pneumophila str. Philadelphia 1
MRLRLVILVLAAIIIGVGSYSGIVNVIKEPIENVIIGYKSPSAWNNRGVDYVIGKRVAQNDSEAVKWFCKAAKQGEAMAQRNLGLMYAAGKGVPQDNGKAMQWFRKAALQNDAVSQLNLGVMYQKGMGTQQNDREAIKWIHKAAAQGFPEAERSLGILYSTAENGQQNYVEAFKWLHKAAEKEDAIAQYNLAVMYVTGKGVRQNDTEAVKWFRKAGKHGDLMAQRTLGLMYATGSNVQQDDFQAMKWFRLAAKQGDAVAQYNIGMGFLNGKGVIRNHTKALKWFHLAASQGLPQAQYVLAALYHDGVSLPQNSMEAIKWLRKAAAQGHLQAQERLQALVRQD

SEQ ID NO: 53007 - DNA, 1131 bp, Legionella pneumophila subsp. pneumophila str. Philadelphia 1
  CDS (1)..(1131): transl_table=11
atgagaagttttttgttagctctattattggcgattaacaccgttgttttggccgatgagttagttggttttgcagcatttgaaaatggcgactacaccacagcctatccacatttaatgcaggcagccaaagaaggtaatgaggaagccatgtatttattggggcgcatgtatcaatacggatatggtgtgacaactaattacgaagaagccagaaattggtatcaaaaggcagctgataaaaataatgcattggctcaattaagtttgggatttatgtacgatacaggtaagggggtatctcaggattttactgaggccttcaaatggtatatgaaggcagcagagcaaggaaatccgatagcacaaagaaatatcggattaatgtatgccacaggggatggcgtagctgccagtgatgataaagcattcaactggtttaaaaaggcggcagaacaaggctatagcaaggcacaagtgaatttgggttatcaatacatgatgggtaaaggaactccaaaagatgtaaaaaaagcatttgaatggtatcaaaaagcggcagagcagggggatgaaaagggcgaatacagtctaggtctattgtatacaggccaggaaggtgggattggtgcggatgataaagccgctttttactggttttcacaagcagccaatcatggacatgtcaacgcacaaacctatttagcttactactatcttaaagggtatggtgtagatgctgatcctgtgaaagcagcttattggtatcaatctgcagcagaaaaggggcaacctgaagcacaggcacaattaggacaattgttattgactggtacaggtgttgataaagattaccaacaggcagcttactggtttggtaagtcagcacatcagggaaatcctattggacaagccaagttggggtacatgtatttagcaggattaggagtcaacaagagcttggttaaagcttacgcctggttaaaaattgctgctgaaaataaaaatgaggaagcggcaaagcaacttaaatctttggaagccaagttgaccgaacctgaaaaattggaagcagagaaaatgatcaaggatttgggcccattagaaagcaaagagaattatgaggactaa

SEQ ID NO: 53008 - protein, 376 aa, Legionella pneumophila subsp. pneumophila str. Philadelphia 1
MRSFLLALLLAINTVVLADELVGFAAFENGDYTTAYPHLMQAAKEGNEEAMYLLGRMYQYGYGVTTNYEEARNWYQKAADKNNALAQLSLGFMYDTGKGVSQDFTEAFKWYMKAAEQGNPIAQRNIGLMYATGDGVAASDDKAFNWFKKAAEQGYSKAQVNLGYQYMMGKGTPKDVKKAFEWYQKAAEQGDEKGEYSLGLLYTGQEGGIGADDKAAFYWFSQAANHGHVNAQTYLAYYYLKGYGVDADPVKAAYWYQSAAEKGQPEAQAQLGQLLLTGTGVDKDYQQAAYWFGKSAHQGNPIGQAKLGYMYLAGLGVNKSLVKAYAWLKIAAENKNEEAAKQLKSLEAKLTEPEKLEAEKMIKDLGPLESKENYED

SEQ ID NO: 53009 - DNA, 1128 bp, Legionella pneumophila subsp. pneumophila str. Philadelphia 1
  CDS (1)..(1128): transl_table=11
atggacatgaaaaaatatattttatctctttctctactgacggtgattaactcttcagctatcgctacgactcaggaaggtgaggaggcctataacaaggggtattacgaaaaagcatttattttgttgtctcctgaagcggataaaggagatgccaaggctcaatatttgctgggtaagatgtattataatgcccaaggtgtaacttataatccggaaaaaacagagcaattattacttgcctcagcgaatcaaggcaatgtcgatgcccaggtattgttagccggtttctattggtaccttaatacaccagagggctataaaaaggcgttcgaatggtatcagaaagcagcggatcaaaataatgcggatggtcaatatggcttgggctatatgtatgatacaggaactggtgtacctcagaattccgatacagccatggtatggtataaaaaagcagcagagcaaggcaactctaatgcggctttggctattggttataattatgataccggtacaggggtgaaaaaggataagactcaagctctcaactggtatgcaaaagcagctgacttaggtaatgccagcgcacaatataatcttggtttgatgtatgagcaaggggatggtgttcctaaagattatcagaaagcagcagagtatttcgagaaagcagcgaatcaaggtcatgccaaatcgcaattggagttaggttatttatatgattctggaaaattaggtaaatcggatctgcaaaaggctgctttttggtatcaaaaaagcgcagatctggggaatgccaatgcgcaatttaatttagctgatatgtatttttacggtgatggggtcggtaaaagccttgagcaatccgtatactggatgcaaaaagcagctgagcaagggtatggtaaggctcaaaatcaattaggtatctattacagagacggtattggtgttgctgctgatcctgtaaaagcttatgcttggtttacagcagccaagaataatggctttgaaaaagcggcgagcaatgccagtgatcttgagaaatctatgaacccagaggatctgagtaaggcgagaattttaggacaacaatatacggataattacaaggccaaaaaataa

SEQ ID NO: 53010 - protein, 375 aa, Legionella pneumophila subsp. pneumophila str. Philadelphia 1
MDMKKYILSLSLLTVINSSAIATTQEGEEAYNKGYYEKAFILLSPEADKGDAKAQYLLGKMYYNAQGVTYNPEKTEQLLLASANQGNVDAQVLLAGFYWYLNTPEGYKKAFEWYQKAADQNNADGQYGLGYMYDTGTGVPQNSDTAMVWYKKAAEQGNSNAALAIGYNYDTGTGVKKDKTQALNWYAKAADLGNASAQYNLGLMYEQGDGVPKDYQKAAEYFEKAANQGHAKSQLELGYLYDSGKLGKSDLQKAAFWYQKSADLGNANAQFNLADMYFYGDGVGKSLEQSVYWMQKAAEQGYGKAQNQLGIYYRDGIGVAADPVKAYAWFTAAKNNGFEKAASNASDLEKSMNPEDLSKARILGQQYTDNYKAKK

SEQ ID NO: 53011 - DNA, 3603 bp, Legionella pneumophila subsp. pneumophila str. Philadelphia 1
  CDS (1)..(3603): transl_table=11
atgaaatcactagtaccttgggtgtgtgttttagtcgcgtcagctggccaacaggcttttgccaatgaggcgttcaatgcttatagattaggcaattataatgaagcagctgagcccctaatcattaaatcaggtcaggatgctgttgccgaatactatttagggcgactttatctctatggatatgggcagttaaaaaacaatcgtgttgcgatgcgctactttaccaaatcagcggaaaaaggatatttacctgctgtcctgctcatggccaaatacagtttgctccatgaaaaaaatccggaagaagctgctcgttggtttaagcaggcagccgcagtgggagatatgagcgcacaaatgtttatggcggcagcttatttatatggtgttggcgtcaagaaaaatacagatatcgcgagacgttattatattgatgcagcaaaaaatggtaatcctattgctcaatacaccttagcaaagtatttcttagagagtaagcatgcgggtaataaaaaattagggatcatttggctgaataaagcagcagaaaatggagatccaaaagctttaacagaattgggcagattttatgtggccggacaaatggttaccaaagatactgccaaaggtgttgaattattaaataaagcagcgtcagaacaatatgctccagccatgcttgagttgggtaagttggctttaatgcaaaatcaatacgatgaggctattcaatggcttaataaggccgcgaaacaaagtacagaagctactcttgagttagcccatatttatttacaagataaaagtccagtttatgatccaaaaacaggttttttatttgtactaaaagcagcccagaatggttcggttcaagctcaaaaagaattagccaatttatatcaaaaagggattggcgtagcggctgatgaggaattgtctaaacaatggactcttaaagcagcagaaaatgagaagaaaaatgcagagcctcctcttcttgcccaagctgcattatggctaagtaatgacagaacggataaattggaagagacggcttaccagatgaatggtatatttagcccatggaataatccgtctgccttgagaaataatagctataatcaagcacctaagcttgaaaccatctctcgtcaggatattttcaaaccacaatttgagttgactcagcctaacagtattcctataagcaattactatgatgctttaatcagtaaacaagtagagtttcaatcaaatcaatgggcttatccaacttacagacttaacccattcgtagaagctctagagaggactaatagtcctgttgtacaaaagctcaacttgccagttccttataccgacgcgaattatgatgatagcgaagttggcagttttgatttgatggacatttggacaggagattggaagcggactgtcaattatatgtctgtggtcaattatttgtatttcagggcaatacttggaaatgcccaaactcaatttgaaattggtcaattgtttcaatatggcattggtttaatgcaagatgatgcttcggctattattttttatgagaatgccgcagaacaaaagcacttaggtgctgaatataatttgggaatactttatctgaaacgcggtaaagacgaaaatgattaccaacaagcattaaattggctgactgattccgcattcaaagggaataagagagcacaatatgtattggcacggatattgcgccaggggatcgttggtcctgatggaaaagagtatattaaagcaaatgatgagcaagctatggccatgctttatctttcagcggccaatgattatggtccggcagaatatgagttggcagaatatttggcaagagactacaacaatggtttaagtgtagatgtcagaaaacaaaaaattgccttaataagaaagttataccaaggtgctgtgaagaataaagtggcagaggcattgttgccattggcattttataatgcgatggatgataacaggcaaaagcaggaacaagcatttaaagtagctgaagagcaagctgaaacaggtaatgagaacgctgctcttttactgggaatgctctatgaccgtggtataggcataacagctgatccagccaaggccatgtactggtatcaacaagccggacaaaatcccgtaagtcagtttatattgggtacttacataacagaaggaaaaggggtcgcacaggataaggaaaaaggattggatttgctgaggcaatctgcaaactcccaattttcctatgccgactttaatctggcagtacttaagcaacaatcaggggaagactttttacccaatttaattgaatcttataaattagggaatagtcatgcggggatagtattggcagattattatttatctcaaagcagtgctcctgaacaaatgaatcaagctaaggaaatttataagggcttagctgataaaggcgatcaatatgcacaattaaagttggcttatatgctacaaaaaggattgggtgccgcaccggatcttgctggcgcgcaacattggtatactgcttcggcagaacaaggcaatcctgaagcacaatacttattaggtcaattttatcaactaggtgaaacaggggagcctgattataatttagccaaatattggtatcaaaaagcagcgaaacatttatctaaagccgatgtagcattaggttttatttatgaaacggtagatgatgattatgctcaagcactaaaagcctatgaaaatgcagcagcaaaaggagatatgttaggcgcttataatttggctttaatgtatgagtatggcaagggtgtgcccgtcacttactccaaagcgttatctttgtttaaagaagcatcagagaaaggtgctcctgaagcgatgagtcaattggctggaatgtatttttatggtttggggcaaccaagaaacgaacaacaagctttggtctggtataaaaaggctgcaagcttaggtaatgggaatgccttgtatgccctcggtttattatccgaaactggtgttggtgttaaattggattttccagatgctttacggtattaccaggatgcatctgataaaggtaatgaaaaagcaatgctggctttggcaagaatgtatcattatggtcttggtgtcgaaaaggatcataaaagatcagcgagtatttatcaaaaattggcacaaaagcaaaatgcttatgctcaatatcaattaggtacttattatattgagggaacggcaggcgaacgactacccgaaaaaggccgtgagctattacaacaagcgagtgaaaatggaagtttacaggcccgtagagtattgcaaagattagatgcacaaacccagggtaaagtaagttatgtcgagcccgtgttatttaataatgttcccaaatttgatggccaaagcgctgatatgatttattttgatgcattaaatgaatggaatcatggggaggaggttttgtccagaatgatcttgcaacgtctggtgacgcaatatcccaattttattcctgcaaagcgagcttatgagcagttgaatcaagccaaattaatgaataacttgggttaa

SEQ ID NO: 53012 - protein, 1200 aa, Legionella pneumophila subsp. pneumophila str. Philadelphia 1
MKSLVPWVCVLVASAGQQAFANEAFNAYRLGNYNEAAEPLIIKSGQDAVAEYYLGRLYLYGYGQLKNNRVAMRYFTKSAEKGYLPAVLLMAKYSLLHEKNPEEAARWFKQAAAVGDMSAQMFMAAAYLYGVGVKKNTDIARRYYIDAAKNGNPIAQYTLAKYFLESKHAGNKKLGIIWLNKAAENGDPKALTELGRFYVAGQMVTKDTAKGVELLNKAASEQYAPAMLELGKLALMQNQYDEAIQWLNKAAKQSTEATLELAHIYLQDKSPVYDPKTGFLFVLKAAQNGSVQAQKELANLYQKGIGVAADEELSKQWTLKAAENEKKNAEPPLLAQAALWLSNDRTDKLEETAYQMNGIFSPWNNPSALRNNSYNQAPKLETISRQDIFKPQFELTQPNSIPISNYYDALISKQVEFQSNQWAYPTYRLNPFVEALERTNSPVVQKLNLPVPYTDANYDDSEVGSFDLMDIWTGDWKRTVNYMSVVNYLYFRAILGNAQTQFEIGQLFQYGIGLMQDDASAIIFYENAAEQKHLGAEYNLGILYLKRGKDENDYQQALNWLTDSAFKGNKRAQYVLARILRQGIVGPDGKEYIKANDEQAMAMLYLSAANDYGPAEYELAEYLARDYNNGLSVDVRKQKIALIRKLYQGAVKNKVAEALLPLAFYNAMDDNRQKQEQAFKVAEEQAETGNENAALLLGMLYDRGIGITADPAKAMYWYQQAGQNPVSQFILGTYITEGKGVAQDKEKGLDLLRQSANSQFSYADFNLAVLKQQSGEDFLPNLIESYKLGNSHAGIVLADYYLSQSSAPEQMNQAKEIYKGLADKGDQYAQLKLAYMLQKGLGAAPDLAGAQHWYTASAEQGNPEAQYLLGQFYQLGETGEPDYNLAKYWYQKAAKHLSKADVALGFIYETVDDDYAQALKAYENAAAKGDMLGAYNLALMYEYGKGVPVTYSKALSLFKEASEKGAPEAMSQLAGMYFYGLGQPRNEQQALVWYKKAASLGNGNALYALGLLSETGVGVKLDFPDALRYYQDASDKGNEKAMLALARMYHYGLGVEKDHKRSASIYQKLAQKQNAYAQYQLGTYYIEGTAGERLPEKGRELLQQASENGSLQARRVLQRLDAQTQGKVSYVEPVLFNNVPKFDGQSADMIYFDALNEWNHGEEVLSRMILQRLVTQYPNFIPAKRAYEQLNQAKLMNNLG

SEQ ID NO: 53013 - DNA, 2499 bp, Bacteroides fragilis YCH46
  CDS (1)..(2499): transl_table=11
atggaaactttaaaagagaaattcgaagccctggcccatcgtatccaatcatccggaaaaccggctgccgcatggttccctcaatttacacctgttactttgttgaacgccgaaaattggtgggaagcacttgctgtgtgcgaatatgccttggacacccatgaggacgaagcactgacagccggattttttgaattaatattcagtgcatacgattgtaacgtagaagtggatcttaatgaggaagagtatgcctactggtgggagaaagtgatcagtgtatgcgatcgtgtggctgtattcaacggtgccgggtggtcacagaaaggtgcacaatattcggaagcccgttatgggaaacgtgatctcagcctgttattcccttgctatgaaaaagcggcggaaatgggaagcccggaagcagaggcaaccgttgcttattggcgttatatgggtttctactgcgaacaggatagggcagaaggagagcgtcgatttgcagctttatcctcacccgaagctttgctatggggaaaatattaccgggcttatgccgagcagcacaccggcagtaaagagaaagccctgcttatgcgaaaagagctgcttgacgaacttccccaaggccatcgcctgcgtgcccatgtatatgccgcgatgggcgacgcacttgatatagaagaaggaagtgtggctgaagaagcggcatgctatgagaagtcgctggaacttgttcctaatctatattctttaaaaaatctggcaactctctattttcgctatccggaactagggaagcaaaaagagctggcgtttgagttgtgggagaaagcctggcatgcaggtgtatggtctgcagctaatttccttggatataactatcaggaagaagagtggctcgatatgcctaaagccattgaatggctggagaaagggatgctttattgtgaatcatattgtgcctatgaattagcattgatctatctttataatgatgagtataagaatgtggaacgtgggttgatgtgcctgcagcgctgtgtcgacgacaattatgtagaagctatcgagacgcttgccaatgtttatttcaacggtgaattggtggaagagaatatctcgtatgcctgtcagttgttggagagagctatcgagctggggtccggtagtgcagcctatcgtatcggctggatgtatgagcgtggattgctttctgaagaaccggaatatcagaaggctatggagtattatgaaaaagctgtgtctatggacaatgctgacgggtatgcacgggcggctctttatttggctaatggttattccggagttacggatgccgggaagtcaaaggcctattatgaaaaagcagcagagctgggttcatgttttgcaatggtagaattggcattcttatacgaaaatggtgaggtggtggaacaaagttatgagaaagctttcgacttgctccaaaaagctgccggacaggagtatccttatgcgatgtatcgtgtaggactttatttggataggggagtcatcggtgagccacggcccgaagaagcgtttgcatggtatgcaaaggcagccgaacggggagacggagatgcgatcttcgctcttgggcgttgctataagaatggaattggtacggaagagaatccggataaggctcttgaatggtttactaagggtgcagagaataacgaaccccgttgtcttacagaaatggggttggcttatgaatacggtagtgggatagaagagaatcctcatcaagctgttgaatatatgacaaaggctgccgaacaaaattatggttatgcccaatttaaaatgggagactactttttctttggttacggtgcctgccccgaagataacaaacaagctgtggaatggtacgagaaggctgttgcaaatgatatacctttggctatgttgcgtatgggtgaatattacctttacgattatgacaaactgaacgagtcggagaaagctttcagctacttcaagaaagcagctgaagcagaatgttataatgaaggactgggaatctgctacgagatgggtatcggtgtggaagacaatgaaacagaggcattcaaatattatactttggctgcgggcagtggcaatgttatgagtatgtatcgcaccggattgtgttattacaacggagtaggtgtaaaacagaattatacagaagcttaccgatggtttaatgatgccgccggaaatgacaatgtggcttcgtattattatttaggtaagatgctgatgtatggcgaaggctgtgtgcccgatgcggaagcagggcttcaatggttgatgaaagctgctgagcataatagtgacaaggcgcagttcgaattgggcaatgcctatttgatgggcaatggagtagaggagaatgatgagatcgctatggagtggtttgagaaagcagccgaaaacggaaacgcgaaagccttgaaaattactggaagaagacaacgataa

SEQ ID NO: 53014 - protein, 832 aa, Bacteroides fragilis YCH46
METLKEKFEALAHRIQSSGKPAAAWFPQFTPVTLLNAENWWEALAVCEYALDTHEDEALTAGFFELIFSAYDCNVEVDLNEEEYAYWWEKVISVCDRVAVFNGAGWSQKGAQYSEARYGKRDLSLLFPCYEKAAEMGSPEAEATVAYWRYMGFYCEQDRAEGERRFAALSSPEALLWGKYYRAYAEQHTGSKEKALLMRKELLDELPQGHRLRAHVYAAMGDALDIEEGSVAEEAACYEKSLELVPNLYSLKNLATLYFRYPELGKQKELAFELWEKAWHAGVWSAANFLGYNYQEEEWLDMPKAIEWLEKGMLYCESYCAYELALIYLYNDEYKNVERGLMCLQRCVDDNYVEAIETLANVYFNGELVEENISYACQLLERAIELGSGSAAYRIGWMYERGLLSEEPEYQKAMEYYEKAVSMDNADGYARAALYLANGYSGVTDAGKSKAYYEKAAELGSCFAMVELAFLYENGEVVEQSYEKAFDLLQKAAGQEYPYAMYRVGLYLDRGVIGEPRPEEAFAWYAKAAERGDGDAIFALGRCYKNGIGTEENPDKALEWFTKGAENNEPRCLTEMGLAYEYGSGIEENPHQAVEYMTKAAEQNYGYAQFKMGDYFFFGYGACPEDNKQAVEWYEKAVANDIPLAMLRMGEYYLYDYDKLNESEKAFSYFKKAAEAECYNEGLGICYEMGIGVEDNETEAFKYYTLAAGSGNVMSMYRTGLCYYNGVGVKQNYTEAYRWFNDAAGNDNVASYYYLGKMLMYGEGCVPDAEAGLQWLMKAAEHNSDKAQFELGNAYLMGNGVEENDEIAMEWFEKAAENGNAKALKITGRRQR

SEQ ID NO: 53015 - DNA, 777 bp, Burkholderia pseudomallei K96243
  CDS (1)..(777): transl_table=11
atgagcgggaaacgccgcggcgcgccgctctccacgcgcacgccgcgtgtgctgctcggcgcggtaatcggttcgctcgccgcggcggcgctcggtgcggcggcgggcggcgcgcttgcgcaggcgccgggcgcgccgagccggcccgacccgcagcgcgagaccgaagcggcggtggccgactacaacgcgggcaatctgcgcgcggcgctcgtgcagtttcacgatgcggcggcgcgcggcaaccgtctcgccgcgttcgattacgcgatgatgctgatcaacggtgagggcgtgacggcgaacgtgccggaaggattgcgctggctgcggcgcgcggccgatgcggggatgacgcaggcgcagtacgtgtacggccggatgctcgacgacggcgaattcgtcgcgcgcgatccggcggccgcgcacgactggttcctgaaggccgcgcagcaagggcacgtgcaggccgagctcgcgctcgcgaaccagtttctcgacgggcgcggcacgccgcgcgacaaccggcaggcgtttgcctggtacaagcgcgcggccgacgcgggcgagccggtttcgcaatacgtgaccgcgtcgttctacgagcgcggcggcgacggcgtcgtgcgcaatctcgacatcgcccgcgcgtactatgcggccgccgccgcgcagggcgacgacgcggcggcgctcaagtatcgcgagctcacggccgcgcagaaggcggggccgggcggcgcgtcggcgccgaaggcgaccgggccgtcgtactga

SEQ ID NO: 53016 - protein, 258 aa, Burkholderia pseudomallei K96243
MSGKRRGAPLSTRTPRVLLGAVIGSLAAAALGAAAGGALAQAPGAPSRPDPQRETEAAVADYNAGNLRAALVQFHDAAARGNRLAAFDYAMMLINGEGVTANVPEGLRWLRRAADAGMTQAQYVYGRMLDDGEFVARDPAAAHDWFLKAAQQGHVQAELALANQFLDGRGTPRDNRQAFAWYKRAADAGEPVSQYVTASFYERGGDGVVRNLDIARAYYAAAAAQGDDAAALKYRELTAAQKAGPGGASAPKATGPSY

SEQ ID NO: 53017 - DNA, 747 bp, Burkholderia pseudomallei K96243
  CDS (1)..(747): transl_table=11
gtggggcgcgcggtatcgttgaaggcgctcgcggcggcgtcgcgcgaggatctcgccgggattctcgcgggcgcgcccgagcgggcggccgcatgggtcgcggcggccgcgcagaacggcatcgtcgaggcgcaggccgtctacgggcagtacctgctcgacggccacggcgtcgcgcgcgacgctgccgccgcgctcgaatggttcaagcacgcggcgcgcgccgaccatccgatggcgatgaacatggtcggccgctgctacgaattcggctggggcacggccgcgagcgcggccgtcgccgtgtactggtaccgcgaggccgcgcgcgcggggctcgactgggggatgtacaactacgcgacgatgctcgcgctcggcaacggcgtggacgaagatcgcgcggccgcgctcgcatggttcgagaaggcggcggcgctcggccacgcgaaatcgatcaacctgatcggcggcttccacgaagacggctgggtcgtcgcggccgaccgcgacgccgcgttcgactgctaccggcgcgcggccgccgcgggcgactttcgcggccagttcaactatgcgcggctgctcgccgaacgcgggcgcgtcgcggaagcgctcgaatggctcgcgcgcgtgccgcgcaccgcgacgcccgcgttcgtcgcgaagatgcgcgcgtatctcgcggcgtcgccgatcgacgcgtttcgcgcgctcgccgcgcgacaggagaaatcggcaacatga

SEQ ID NO: 53018 - protein, 248 aa, Burkholderia pseudomallei K96243
MGRAVSLKALAAASREDLAGILAGAPERAAAWVAAAAQNGIVEAQAVYGQYLLDGHGVARDAAAALEWFKHAARADHPMAMNMVGRCYEFGWGTAASAAVAVYWYREAARAGLDWGMYNYATMLALGNGVDEDRAAALAWFEKAAALGHAKSINLIGGFHEDGWVVAADRDAAFDCYRRAAAAGDFRGQFNYARLLAERGRVAEALEWLARVPRTATPAFVAKMRAYLAASPIDAFRALAARQEKSAT

SEQ ID NO: 53019 - DNA, 609 bp, Methylococcus capsulatus str. Bath
  CDS (1)..(609): transl_table=11
gtgaaggccgtcgagcgcggcgactaccctgccgcattgcgggagttcaagcaggcggccgagcggggtgagtccgcggcccaggtgaatctcggcaatctctacatgaaggggctgggcgtcgagcaggactatgcggccgccgagcgttggtatcgccaggccgccgagcacggcgatcccatggggcagagcaagctgggcatcctttactactacggtctcggcgtggacaagaacaccgacgaagccgcccgctggtttgtcaaggctgcggagcagggtgagcccggcgcggcggcggtgctgggttccatgtatgccgaaggcgagggcgtgatccgcgacaacgtgaaggcctattactggtacacgctggctgcagacgggggacagaccgatgcgctgcaagcgcgtgccaccctcgtggacgaaatgacgcccggcgagatcgccgaagccttgcagcgggtcggcgaatggcgggaggcgcagctcgaggcggccaagtcctcggcacaggatatagcggacaagccttctggcgtgaagggaaaaaagcgcaacggaagtggcggtgctcgaaaaaaatctcgaaataggggataa

SEQ ID NO: 53020 - protein, 202 aa, Methylococcus capsulatus str. Bath
MKAVERGDYPAALREFKQAAERGESAAQVNLGNLYMKGLGVEQDYAAAERWYRQAAEHGDPMGQSKLGILYYYGLGVDKNTDEAARWFVKAAEQGEPGAAAVLGSMYAEGEGVIRDNVKAYYWYTLAADGGQTDALQARATLVDEMTPGEIAEALQRVGEWREAQLEAAKSSAQDIADKPSGVKGKKRNGSGGARKKSRNRG

SEQ ID NO: 53021 - DNA, 1200 bp, Methylococcus capsulatus str. Bath
  CDS (1)..(1200): transl_table=11
gtgccgaacgggcctacttgtgcagcccggcgggctcgggcaagatcggcgttggtgggcggcgagggatttcggatggagtggagcggaaaacgggtttcggatgggagcgcaacgcgtcctacggtggccgcttgggtgtcaggcggattcgggagcggcgagtccgtggcggccttcaaggcgttggcaacggaggccgaggccggggatgcttcggcccagcggcgcctcggcctgtgtttccgtgacgggctcggcacggaccgggacatccaccgggcgaaggcgtggtaccagcgctccgcggctcaaaacgacccgatggcggcgctcgagctggggctcatgctcgaatcgggccttggaatctcctccgatcacggcgaggcggggaaatggtaccgcgtggcgctggacctgtggcgggaccgtgcggaaggcggtgatgccctggggcagttcgttctcggtctttgccatgaggtgggagcgggcgtccccgccgcccaccgggaggcactcaaatggtacggccgttcggcggagcgaggttgcgcccatgcccagtgggccttggggcgtttgcacgaggacggattgggtgtcgtccgcgattattccgaagcggttcgttgctatcgggccgctgcattccagggacatgcccgtgcctgcttcaatctgggcctgatggccgaattggggctggggatggtgcgggatgcagactgctccgccagttggtacggcaaggcgctggaagtctggcggcggtgggcggagctaggcgatcctgcggctgcaacggcgctcgcggccatgtatgaggccggccatggcgtggcaaaggactatgccgtggcggtatgctggtaccggcgggccgccaggcagggtaatccgctggcccagttcgaactggggcggttgagcatggaaggccggggggtggaacgcaacgatgtcgaagcggtaggctggttccggctcgcggccgagcgcggccatgcggacgcgcagttccacctggggctgatgcacgagcatggccggggagtgacgcgccgattcgaagaggcgttccgctggtatgacaaggcagccgatgaagggccggcgagacgttgggacgcgttccaccgtctcgtccccgcagcgggcgaggttccggaaggttgcggtctgggcgcgtggtga

SEQ ID NO: 53022 - protein, 399 aa, Methylococcus capsulatus str. Bath
MPNGPTCAARRARARSALVGGEGFRMEWSGKRVSDGSATRPTVAAWVSGGFGSGESVAAFKALATEAEAGDASAQRRLGLCFRDGLGTDRDIHRAKAWYQRSAAQNDPMAALELGLMLESGLGISSDHGEAGKWYRVALDLWRDRAEGGDALGQFVLGLCHEVGAGVPAAHREALKWYGRSAERGCAHAQWALGRLHEDGLGVVRDYSEAVRCYRAAAFQGHARACFNLGLMAELGLGMVRDADCSASWYGKALEVWRRWAELGDPAAATALAAMYEAGHGVAKDYAVAVCWYRRAARQGNPLAQFELGRLSMEGRGVERNDVEAVGWFRLAAERGHADAQFHLGLMHEHGRGVTRRFEEAFRWYDKAADEGPARRWDAFHRLVPAAGEVPEGCGLGAW

SEQ ID NO: 53023 - DNA, 1473 bp, Legionella pneumophila str. Paris
  CDS (1)..(1473): transl_table=11
atgatgaaacaattggttgttgcaggatttttcttattacttctaacttcccctttatcagcgctggatgttgatacctatcgtagttcacaaaaacaattcaatacagaggataaggcggaacagggtgatgctcaagcacagtttgaattagggctcaaatatgaaaagggtgatggagtaaataaagatttaaaaaaagcgatttattggtatcagaaagctgcagatcaaggacaagctgaggcacaaaataatctcggtgtattgtatcttaaaggagagggtgtgccccaaaacagtcagcaagcaatgtattggtttaagaaggcttcggaacagggtttggcaattggtcaaaataatataggaattctatatgaaaatggcctgggtgttaaaaaagatctgggccaggcttttatctggtatcaaaaggctgcagaaggcggaaattcagacggacaatataaccttgcagtcatgtatatgtatgggaatggtataccaaaagatatcaagaaggcgattcactggtatatcaaagcagcagagcaaggagatcttgatgctcaaaataatcttggtgttctttatgagcgaggcgaagaggttccaagagatttaaaagcagctattagttggtataccagagcagcaaatgaaggttcactgattgctcaaactaaccttggtgtattgtatatgactggtgatccttctattcaagatggcaagaaagcaatatattggtatgaaaaagcagcggcacaaggtggggaaaaagcacaaaataatcttgggtatatttacgaacaaggaattggtacagaaaaggatatgaaaaaggctatttactggtacgaaaaagccgcagagaatggatttactctggctcaaaataatttaggtgttctctattcaaatgatggcgagctgcaagattacaaaaaggcttatttatggttcaaaaaagccgcagatcaaggatttgccgaagcccaaaataacttgggtttaatgtatatgaaaggcaatggactgtcagttaattatcacgaagcagtcttgtggtacaagagagcggcagaacaaggattacctttagcgcaacataatctggcgattatgtatatgaaagggctggggataaagaaagacaataaactggccattaaatggtaccaaaaagctgctgaaaaaggattggatttggcgcaaaacaatttggcggttatgtatatacgtggtgaaggagtaaaaagagattttaagaaagccatgtattggtatcaaaaggcagctgaacaaggtttggatttggcacaaattaatctgggtattatgtatcttgatggcatgggtgttaataaagatttcgctaaagcaaagtactggattggaaaagccaaggacagtggttctcaagatgcgctgactatatggaataaaaataaattgtggaaatattag

SEQ ID NO: 53024 - protein, 490 aa, Legionella pneumophila str. Paris
MMKQLVVAGFFLLLLTSPLSALDVDTYRSSQKQFNTEDKAEQGDAQAQFELGLKYEKGDGVNKDLKKAIYWYQKAADQGQAEAQNNLGVLYLKGEGVPQNSQQAMYWFKKASEQGLAIGQNNIGILYENGLGVKKDLGQAFIWYQKAAEGGNSDGQYNLAVMYMYGNGIPKDIKKAIHWYIKAAEQGDLDAQNNLGVLYERGEEVPRDLKAAISWYTRAANEGSLIAQTNLGVLYMTGDPSIQDGKKAIYWYEKAAAQGGEKAQNNLGYIYEQGIGTEKDMKKAIYWYEKAAENGFTLAQNNLGVLYSNDGELQDYKKAYLWFKKAADQGFAEAQNNLGLMYMKGNGLSVNYHEAVLWYKRAAEQGLPLAQHNLAIMYMKGLGIKKDNKLAIKWYQKAAEKGLDLAQNNLAVMYIRGEGVKRDFKKAMYWYQKAAEQGLDLAQINLGIMYLDGMGVNKDFAKAKYWIGKAKDSGSQDALTIWNKNKLWKY

SEQ ID NO: 53025 - DNA, 1131 bp, Legionella pneumophila str. Paris
  CDS (1)..(1131): transl_table=11
atgcaaggttttgtcttggctctgttattagcaattagcagtagtgtttttgctgatgaattagtaggttttgcagcatttgaaaatggcgactacaccacagcctatccacatttaatgcaggctgccaaagaaggtaatgaggaagccatgtatttattggggcgcatgtatcaatacggatatggtgtgacaactaattacgaagaagccagaaactggtatcaaaaggcagctgataaaaataatgcattggctcaattaagtttgggatttatgtacgatacaggtaagggggtatctcaggattttgctgaggccttcaaatggtatatgaaggcagcagagcaaggaaatccgatagcacaaagaaatattggattaatgtatgccacaggagatggtgtagctgccagtgatgacaaagcattcacctggtttaaaaaggccgcagaacaaggctatagcaaggcacaagtgaatttgggttatcagtacatgatgggtaaaggaactccaaaagatgtaaaaaaagcatttgaatggtatcaaaaggcggcagagcagggggatgaaaagggcgaatacagtctaggtctattgtatacaggccaggaaggtgggattagtgcggatgataaagccgctttttactggttttcacaagcagccaatcatggacatgtcaacgcacaaacctatttagcttactattatcttaaagggtatggtgtagatgctgatcctgtgaaagcagcttattggtaccaatctgcagcagaaaagggacaacctgaagcacaggcacaattaggacaattgttattaactggtacaggtgttgataaagattaccaacaggcagcttactggtttggtaagtcagcacatcagggaaatcctgttggacaagccaaattggggtatatgtatttagcaggattaggagtcaacaagagcttggttaaagcttacgcctggttaaaaattgctgctgaaaataaaaatgaggaagcagcaaagcaacttaaatctttggaagccaagttgaccgaacctgaaaaattggaagcagagaaaatgatcaaggatttgggcccattagaaagcaaagagaattatgaggactaa

SEQ ID NO: 53026 - protein, 376 aa, Legionella pneumophila str. Paris
MQGFVLALLLAISSSVFADELVGFAAFENGDYTTAYPHLMQAAKEGNEEAMYLLGRMYQYGYGVTTNYEEARNWYQKAADKNNALAQLSLGFMYDTGKGVSQDFAEAFKWYMKAAEQGNPIAQRNIGLMYATGDGVAASDDKAFTWFKKAAEQGYSKAQVNLGYQYMMGKGTPKDVKKAFEWYQKAAEQGDEKGEYSLGLLYTGQEGGISADDKAAFYWFSQAANHGHVNAQTYLAYYYLKGYGVDADPVKAAYWYQSAAEKGQPEAQAQLGQLLLTGTGVDKDYQQAAYWFGKSAHQGNPVGQAKLGYMYLAGLGVNKSLVKAYAWLKIAAENKNEEAAKQLKSLEAKLTEPEKLEAEKMIKDLGPLESKENYED

SEQ ID NO: 53027 - DNA, 1122 bp, Legionella pneumophila str. Paris
  CDS (1)..(1122): transl_table=11
atgaaaaaatatattttatctctttctctactgacggtgattaactcttcagctatcgctacgactcaggaaggtgaggaggcctataacaaggggtattacgaaaaagcatttattttgttgtctcctgaagcggataaaggagatgccaaggctcaatatttgctgggtaagatgtattataatgcccaaggtgtaacttataatccggaaaaaacagagcaattattacttgcctcagcgaatcaaggcaatgtcgatgcccaggtattgttagctggtttctattggtaccttaatacacctgagggctataaaaaggcgtttgaatggtatcagaaagcagcggatcaaaataatgcagatggtcaatatggcttgggctatatgtatgatacaggaactggtgtacctcagaattccgatacagccatggtatggtataaaaaagcagcagagcaaggcaactctaatgcggctttggctattggttataattatgataccggtacaggggtgaaaaaagataagactcaggctctcaactggtatgcaaaagcagctgacttaggtaatgccagcgcacaatataatcttggtttgatgtatgagcaaggggatggtgttcctaaagattatcagaaagcagcagagtatttcgagaaagcagcgaatcaaggtcatgccaaatcgcaattggagttaggttatttatatgattctggaaaattaggtaaatcggatctgcaaaaggctgctttttggtatcaaaaaagcgcagatctggggaatgccaatgcgcaatttaatttagctgatatgtatttttacggtgatggggtcggtaaaagccttgagcaatccgtatactggatgcaaaaagcagctgagcaagggtatggtaaggctcaaaatcaattaggtatctattacagagacggtattggtgttgctgctgatcctgtaaaagcttatgcctggtttacagcagccaagaataatggctttgaaaaagcgacgagcaatgccagtgatcttgagaaatctatgaacccagaggatctgagtaaggcgagaactttaggacaacaatatacggataattacaaggccaaaaaataa

SEQ ID NO: 53028 - protein, 373 aa, Legionella pneumophila str. Paris
MKKYILSLSLLTVINSSAIATTQEGEEAYNKGYYEKAFILLSPEADKGDAKAQYLLGKMYYNAQGVTYNPEKTEQLLLASANQGNVDAQVLLAGFYWYLNTPEGYKKAFEWYQKAADQNNADGQYGLGYMYDTGTGVPQNSDTAMVWYKKAAEQGNSNAALAIGYNYDTGTGVKKDKTQALNWYAKAADLGNASAQYNLGLMYEQGDGVPKDYQKAAEYFEKAANQGHAKSQLELGYLYDSGKLGKSDLQKAAFWYQKSADLGNANAQFNLADMYFYGDGVGKSLEQSVYWMQKAAEQGYGKAQNQLGIYYRDGIGVAADPVKAYAWFTAAKNNGFEKATSNASDLEKSMNPEDLSKARTLGQQYTDNYKAKK

SEQ ID NO: 53029 - DNA, 3603 bp, Legionella pneumophila str. Paris
  CDS (1)..(3603): transl_table=11
atgaaatcactagtaccttgggtgtgtgttttagtcgcgtcagctggccaacaggcttttgccaatgatgcgttcaatgcttatagattaggcaattataatgaagcagctgaacccctaatcattaaatcaggtcaggatgctgttgccgaatattatttagggcgactttatctctatggatatggacagttaaaaaacaatcgtgttgcgatgcgctactttaccaaatcagcggaaaaaggctatttacctgctgtcctgcttatggccaaatacagtttgctccatgaaaaaaatccggaagaagctgctcgttggtttaagcaagcagccgcggtgggagatgtaagcgcacaaatgtttatggcggcagcttatttatatggagttggcgtcaagaaaaatacagatatcgcgagacgttattatattgatgcagcaaaaaatggtaatcctattgctcaatacaccttagcagagtatttcttagagagtaagcatgcgggtaataaaaaattaggaatcatttggctgaataaagcagcagaaaatggagatccaaaagctttaacagaattgggcagattttatgtggccggacaaatggttgccaaggatacttccaagggcgtcgaattattaaataaagcagcttcagaacaatatgccccagctatgcttgagttgggtaaattggctttaatgcaaaatcaatacgatgaggctattcaatggcttaataaggccgcgaaacagagtacagaagctactcttgaattagcccatatttatttacaagataaaagtccagtttatgatccaaaaacaggttttttattggtactaaaagcagctcagaatggttctgttcaagcccaaaaagaattagccaatttatatcaaaaagggattggcgtagcggctgatgaggaattgtctaaacaatggactcttaaagcagcagaaaatgagaagaaaaatgcagagcctcctgttcttgcccaagctgcattatggctaagtaatgacagaacggataaattggaagagacggcttaccagatgaatggtatatttagcccatggaataatccgtctgccttgagaaataatagctataatcaagcacctaagcttgaaaccatctctcgtcaggatattttcaaaccgcaatttgagttgactcagcctaataatattcctataagcaattactatgatgctttaatcagtaaacaagtggagtttcaatcaaatcaatgggcttatccaacttacagacttaacccatttgtagaagctttagagagagccaatagtcctgttgtacaaaagctcaacttgccagttccttatgccgacgcgaattatgatgatagcgaagttggcagttttgatttgatggacatttggacaggagattggaaacggactgtcaattatatgtctgtggttaattatttgtatttcagggcaatacttggaaatgcccaaactcaatttgaaattggtcaattgtttcaatatgggattggtttaatgcaagatgatgcttcggctattattttttatgagaatgccgcagaacaaaagcacttaggtgctgaatataatttgggaatactttatctgaaacgcggtaaagacgaaaatgattaccaacaagcattaaattggctgactgattccgcattcaaagggaataagagagcacaatacgtattggcaaggatattgcgccaggggatcgttggtcctgatggaaaagagtatattaaagcaaatgatgagcaagctatggccatgctttatctttcagctgccaatgattatgggccggcagaatatgagttggcagaatatttggcaagagactacaacaatggtttaagtgtagatgtcagaaaacaaaaaattgccttaataagaaaattataccaaggtgctgtgaagaataaagtggcagaggcattgttgccattggcattttataatgcgatggatgataacaggcaaaagcaggaacaagcatttaaagtagccgaagagcaagctgaaacaggtaatgagaacgccgctcttttactcggtatgctatatgaccgtggtataggaataacagctgatccagccaaggccatgtactggtatcaacaagccggacaaaatcccgtaagtcagtttatattgggtacttacataacagaaggaaaaggggtcgcacaggataaggaaaaaggattggatttgctgaagcaatcagcagactcccaattttcctatgccgactttaatctggcagtactcaagcaacaatccggggaagactttttacccaatttaattgaatcctataaattagggaatagtcatgcggggatagtgttggcagattattatttatctcaaagcagtgttcctgaacaaatgaatcaagctaaggaaatttatcagggcttagctgataaaggcgatcaatatgcacaattaaaattggcttatatgctacaaaaaggattgggtgccgcaccggatcttgctggcgcgcaacattggtatactgcttcggcagaacaaggcaatcctgaggcacaatacttattaggccaattttatcaactaggtgaaacaggagaacctgattataatttggccaaacattggtatcaaaaagcagcgaaacatttatctaaagccgatgtagcattaggttttatttatgaaacggtagatgataattatgctcaagcactaaaagcttatgaaaatgctgcagcaaaaggagatatgctaggcgcttataatttggctttaatgtatgagtatggcaagggcgtgcccgtcaattactccaaagcgttatctttgtttaaagaagcatcagagaaaggtgctcctgaagcgatgagtcaattggctggaatgtatttttatggtttggggcaaccaagaaacgaacaacaagctttggtctggtataaaaaggctgcaagcttaggtaatgggaatgctttgtatgccctcggtttattatccgaaactggtgttggtgttaaattggattttccagatgctttacggtattaccaggatgcatctgataaaggtaatgaaaaagcaatgctggctttggcaagaatgtatcattatggtcttggtgttgaaaaggatcataaaaggtcagcgagtatttatcaaaaattggcacaaaagcaaaatgcttatgctcaatatcaattaggtacttattatattgagggaacggcaggcgaacgactacccgaaaaaggccgtgagctattacaacaagcgagtgaaaacggaagtttacaggcccgtagagtattgcaaagattagatgcacaaacccagggtaaagtaagttatgtcgagcccgtgttatttaataatgttcccaaatttgatggtcaaagtgctgatatgatttattttgatgcattaaatgaatggaatcatggggaggaggttttgtccagaatgatcttgcaacgtctggtgacgcaatatcccaatttcatccctgcaaagcgagcttatgagcagttgaatcaagccaaattaatgaataacttgggttaa

SEQ ID NO: 53030 - protein, 1200 aa, Legionella pneumophila str. Paris
MKSLVPWVCVLVASAGQQAFANDAFNAYRLGNYNEAAEPLIIKSGQDAVAEYYLGRLYLYGYGQLKNNRVAMRYFTKSAEKGYLPAVLLMAKYSLLHEKNPEEAARWFKQAAAVGDVSAQMFMAAAYLYGVGVKKNTDIARRYYIDAAKNGNPIAQYTLAEYFLESKHAGNKKLGIIWLNKAAENGDPKALTELGRFYVAGQMVAKDTSKGVELLNKAASEQYAPAMLELGKLALMQNQYDEAIQWLNKAAKQSTEATLELAHIYLQDKSPVYDPKTGFLLVLKAAQNGSVQAQKELANLYQKGIGVAADEELSKQWTLKAAENEKKNAEPPVLAQAALWLSNDRTDKLEETAYQMNGIFSPWNNPSALRNNSYNQAPKLETISRQDIFKPQFELTQPNNIPISNYYDALISKQVEFQSNQWAYPTYRLNPFVEALERANSPVVQKLNLPVPYADANYDDSEVGSFDLMDIWTGDWKRTVNYMSVVNYLYFRAILGNAQTQFEIGQLFQYGIGLMQDDASAIIFYENAAEQKHLGAEYNLGILYLKRGKDENDYQQALNWLTDSAFKGNKRAQYVLARILRQGIVGPDGKEYIKANDEQAMAMLYLSAANDYGPAEYELAEYLARDYNNGLSVDVRKQKIALIRKLYQGAVKNKVAEALLPLAFYNAMDDNRQKQEQAFKVAEEQAETGNENAALLLGMLYDRGIGITADPAKAMYWYQQAGQNPVSQFILGTYITEGKGVAQDKEKGLDLLKQSADSQFSYADFNLAVLKQQSGEDFLPNLIESYKLGNSHAGIVLADYYLSQSSVPEQMNQAKEIYQGLADKGDQYAQLKLAYMLQKGLGAAPDLAGAQHWYTASAEQGNPEAQYLLGQFYQLGETGEPDYNLAKHWYQKAAKHLSKADVALGFIYETVDDNYAQALKAYENAAAKGDMLGAYNLALMYEYGKGVPVNYSKALSLFKEASEKGAPEAMSQLAGMYFYGLGQPRNEQQALVWYKKAASLGNGNALYALGLLSETGVGVKLDFPDALRYYQDASDKGNEKAMLALARMYHYGLGVEKDHKRSASIYQKLAQKQNAYAQYQLGTYYIEGTAGERLPEKGRELLQQASENGSLQARRVLQRLDAQTQGKVSYVEPVLFNNVPKFDGQSADMIYFDALNEWNHGEEVLSRMILQRLVTQYPNFIPAKRAYEQLNQAKLMNNLG

SEQ ID NO: 53031 - DNA, 1029 bp, Legionella pneumophila str. Lens
  CDS (1)..(1029): transl_table=11
atgcgtttacgtcttgtcatcttagttttagccgcaattattattggtgtgggaagttattctgggatagtgaatgtcattaaagaacccatagaaaatatgataatagggtataaaagcccatcagcctggaataatcgtggtgtagattatgtgattggcaaaagagtagcacaaaatgactctgaagctgtaaaatggttttgcaaggcagcgaaacaaggcgaagccatggcccagcgcaaccttggcttgatgtatgctgcaggcaaaggggtccctcaggataatggcaaggctatgcaatggtttcgtaaagccgctcttcaaaatgatgccgtgtcacaattaaatcttggtgtcatgtatcaaaaaggtatgggtactcagcaaaacgatagggaagcaatcaagtggattcataaagcagccgcacaaggatttccagaggctgaacgtagtcttggcatcctatattccactgctgaaaatgggcaacaaaattatgtcgaagcttttaaatggcttcacaaggcagctgagaaagaagatgccatagcccaatataatcttgcagttatgtatgtcacaggcaagggggttcggcaaaatgatacggaagcagttaagtggtttcgtaaagcaggcaaacatggcgatctcatggctcaacgaacacttggattaatgtacgcaacggggagcaatgttcaacaggatgattttcaagcgatgaaatggtttcgtctggccgcgaaacaaggagatgctgtggctcaatataatataggtataggctttcttaacggcaaaggggtgattcgaaatcacacaaaagctctgaaatggtttcatttagctgctagtcaaggattgccccaagctcaatatgtgcttgctgcactttatcatgatggagtgagtcttcctcaaaatagcatggaagcaataaagtggctccgaaaggctgctgcgcaaggtcacttgcaagctcaagagcgcctgcaggctctggttagacaggattag

SEQ ID NO: 53032 - protein, 342 aa, Legionella pneumophila str. Lens
MRLRLVILVLAAIIIGVGSYSGIVNVIKEPIENMIIGYKSPSAWNNRGVDYVIGKRVAQNDSEAVKWFCKAAKQGEAMAQRNLGLMYAAGKGVPQDNGKAMQWFRKAALQNDAVSQLNLGVMYQKGMGTQQNDREAIKWIHKAAAQGFPEAERSLGILYSTAENGQQNYVEAFKWLHKAAEKEDAIAQYNLAVMYVTGKGVRQNDTEAVKWFRKAGKHGDLMAQRTLGLMYATGSNVQQDDFQAMKWFRLAAKQGDAVAQYNIGIGFLNGKGVIRNHTKALKWFHLAASQGLPQAQYVLAALYHDGVSLPQNSMEAIKWLRKAAAQGHLQAQERLQALVRQD

SEQ ID NO: 53033 - DNA, 1131 bp, Legionella pneumophila str. Lens
  CDS (1)..(1131): transl_table=11
atgcgaggttttttgttagctctattattgtcgattaacactgctgttttggccgatgagttagttggttttgcagcatttgaaaatggcgactacaccacagcctatccacatttaatgcaggctgccaaagatggtaatgaggaagccatgtatttattggggcgcatgtatcaatacggatatggtgtgacaactaactacgaagaagccagaaattggtatcaaaaggcagctgataaaaatgatgcattagcccaattaagtttgggatttatgtacgatacaggtaagggggtatctcaggattttgctgaggccttcaaatggtatatgaaggcagcagagcaaggaaatccgatagcacaaagaaatatcggattaatgtatgccacaggagatggtgtaactgccagtgatgataaagcattcacctggtttaaaaaggcggcagaacaaggctatagcaaggcacaagtgaatttgggttatcaatacatgatgggtaaaggaactccaaaagatgtaaaaaaagcatttgaatggtatcaaaaagcggcagagcagggggatgaaaagggcgaatacagtttaggtctattgtatacaggccaggaaggtgggattagtgcggatgataaagccgctttttactggttttcgcaagcagccaatcatggacatgtcaacgcacaaacctatttagcttactactatcttaaagggtatggtgtagatgctgatcctgtgaaagcagcttattggtatcaatctgcagcagaaaaggggcaacctgaagcacaggcacaattgggacaattgttattgacaggtacaggtgttgataaagattaccaacaggcagcttactggtttggtaagtcagcgcatcagggtaatcctgttggacaagccaaattggggtacatgtatttagcaggattaggagtcaacaagagcttggttaaagcttacgcctggttaaaaattgctgctgaaaataaaaatgaggaagcggcaaagcaacttaaatctttggaagtcaagttggccgaacctgaaaaattggaagcagagaaaatgatcaaggatttgggcccattagaaagcaaagagaattatgaggactaa

SEQ ID NO: 53034 - protein, 376 aa, Legionella pneumophila str. Lens
MRGFLLALLLSINTAVLADELVGFAAFENGDYTTAYPHLMQAAKDGNEEAMYLLGRMYQYGYGVTTNYEEARNWYQKAADKNDALAQLSLGFMYDTGKGVSQDFAEAFKWYMKAAEQGNPIAQRNIGLMYATGDGVTASDDKAFTWFKKAAEQGYSKAQVNLGYQYMMGKGTPKDVKKAFEWYQKAAEQGDEKGEYSLGLLYTGQEGGISADDKAAFYWFSQAANHGHVNAQTYLAYYYLKGYGVDADPVKAAYWYQSAAEKGQPEAQAQLGQLLLTGTGVDKDYQQAAYWFGKSAHQGNPVGQAKLGYMYLAGLGVNKSLVKAYAWLKIAAENKNEEAAKQLKSLEVKLAEPEKLEAEKMIKDLGPLESKENYED

SEQ ID NO: 53035 - DNA, 1122 bp, Legionella pneumophila str. Lens
  CDS (1)..(1122): transl_table=11
atgaaaaaatatattttatctctttctctactgacggtgattaactcttcagctatcgctacgactcaggaaggtgaggaggcctataacaagggatattacgaaaaagcatttattttgttgtctcctgaagcagataaaggagatgccaaggctcaatatttgctgggtaagatgtattataatgcccaaggtgtaacttataatccggaaaaaacagagcaattattacttgcctcagcgaatcaaggcaatgtcgatgcccaggtattgttagccggtttctattggtaccttaatacaccagagggctataaaaaggcgtttgaatggtatcagaaagcagcggatcaaaataatgcagatggtcaatatggcttgggctatatgtatgatacaggaactggtgtacctcagaattccgatacagctatggtatggtataaaaaagcagcagagcaaggcaactctaatgcggctttagctattggttataattatgataccggtacaggggtgaaaaaggataagactcaggctcttaactggtatgcaaaagccgctgacttaggtaatgccagcgcacaatataaccttggtttgatgtatgagcaaggggatggtgttcctaaagattttcagaaggctgctgagtattttgagaaagcagcaaatcaggatcatgccaaatcgcaattggagttaggttatttatatgattcaggaaaattaggtaaatcggatctgcaaaaggctgctttttggtatcaaaaaagcgcagatctggggaatgccaatgcgcaatttaatttagctgatatgtatttttacggtgatggggtcggtaaaagccttgagcaatccgtatactggatgcaaaaagcagctgagcaagggtatggtaaggctcaaaatcaattaggtatctattacagagacggtattggtgttgctgctgatcctgtaaaagcttatgcctggtttacagcagccaagagtaatggctttgaaaaagcggcgagcaatgccagtgatcttgagaaatctatgaacccagaggatctgagtaaggcgagaactttaggacaacaatatacggataattacaaggccaaaaaataa

SEQ ID NO: 53036 - protein, 373 aa, Legionella pneumophila str. Lens
MKKYILSLSLLTVINSSAIATTQEGEEAYNKGYYEKAFILLSPEADKGDAKAQYLLGKMYYNAQGVTYNPEKTEQLLLASANQGNVDAQVLLAGFYWYLNTPEGYKKAFEWYQKAADQNNADGQYGLGYMYDTGTGVPQNSDTAMVWYKKAAEQGNSNAALAIGYNYDTGTGVKKDKTQALNWYAKAADLGNASAQYNLGLMYEQGDGVPKDFQKAAEYFEKAANQDHAKSQLELGYLYDSGKLGKSDLQKAAFWYQKSADLGNANAQFNLADMYFYGDGVGKSLEQSVYWMQKAAEQGYGKAQNQLGIYYRDGIGVAADPVKAYAWFTAAKSNGFEKAASNASDLEKSMNPEDLSKARTLGQQYTDNYKAKK

SEQ ID NO: 53037 - DNA, 3603 bp, Legionella pneumophila str. Lens
  CDS (1)..(3603): transl_table=11
atgaaatcactagtaccttgggtgtgtgttttagtcgcgtcagctggccaacaggcttttgccaatgatgcgttcaatgcttatagattaggcaattataatgaagcagctgagcccctaatcattaaatcaggtcaggatgctgttgccgaatactatttagggcgactttatctctatggatatgggcagttaaaaaacaatcgtgttgcgatgcgctactttaccaaatcggcggaaaaaggctatttacctgctgtcttgctcatggccaaatacagtttgctccatgaaaaaaatccggaagaagctgcccgttggtttaagcaagcagctgcggtgggagatgtgagcgcacaaatgtatatggcggcagcttatttatatggtgttggcgtcaagaaaaatacagatatcgcaagacgttattatattgatgcagcaaaaaatggtaatcctattgctcaatacaccttagcagagtatttcttagagagtaagcatgcggctaataaaaaattagggatcatttggctgaataaagcagcagaaaatggagatccaaaagctttaacagaattgggcagattttatgtcgccggacaaatggttgccaaggatactgccaagggcgtcgaattattaaataaagcagcctcagaacaatatactccagccatgcttgagttgggtaaattggctttaatgcaaaatcaatacgatgaggctattcaatggcttaataaggccgaggaacagagtacagaagctactcttgagttagcccatatttatttacaagataaaagtccagtttatgatccaaaaacaggttttttattggtattaaaagcagctcagaacggttctgttcaagcccaaaaagaattagccaatttatatcaaaaagggattggcgtagcggctgatgaagaattgtctaaacaatggactcttaaagcagcagaaaacgagaagaaaaatgcagagccccctgttcttgcccaagccgcattatggctaagtaatgacaaaacggataaattggaagagacggcttaccagatgaatggtatatttagcccatggaataatccgtctgctctgagaaataatagctataatcaagcacctaagcttgaaaccatctctcgtcaggatattttcaaaccacaatttgagttgactcagcctaatagtattcctataagcaattactatgatgctttaatcagtaaacaagtggagtttcaatcaaatcaatgggcttatccaacttacagacttaacccattcgtagaggctctagagagagccaatagtcctgttgtgcaaaagctcaacttgccagttccttatgccgacgcgaattatgatgatagcgaagttggcagttttgatttgatggacatttggacaggggattggaaacggactgtcaattatatgtctgtggtcaattatttgtatttcagggcaatactcggaaatgctcaaactcaatttgaaattggtcaattgtttcaatatgggattggtttaatgcaagatgatgcttcggctattattttttatgagaatgccgcagaacaaaagcacttgggtgctgaatataatttgggaatactttatctgaaacgcggtaaagacgaaaatgattaccaacaagcattaaattggctgactgactccgcattcaaaggcaatcaaagagcacaatacgtattggcaaggatattgcgccaggggatcgttggtcctgatggaaaagagtatattaaagcaaatgatgagcaagctatggccatgctttatctttcagctgccaatgattatgggccggcagaatatgagttggcagaatatttggcaagagactacaacaatggtttaagtgtagatgtcagaaaacaaaaaattgccttaataagaaagttataccaaggtgctgtgaagaataaagtggcagaggcattgttgccattggcattttataatgcgatggatgataacaggcaaaagcaggaacaagcatttaaagtagccgaagagcaagctgaaacaggtaatgcgaatgccgctcttttactcggaatgctctatgaccgtggtataggaataaccgctgatccagccaaggccatgtactggtatcaacaagccggacaaaatcccgtaagtcagtttatattgggtacttacatcacagaaggaaaaggggtggcacaggataaggaaaaaggattggatttgcttaagcaatcagcagactcccaattttcctatgccgactttaatctggcagtactcaagcaacaatcaggggaagactttttacccaacttaattgaatcttataaattagggaatagtcatgcggggatagtattggcagattattatttatctcaaagcagcgttcctgaacaaatgaatcaagctaaggaaatttataagggcttagctgataaaggcgatcaatatgcacaattaaaattggcttatatgctacaaaaaggattgggtgccgcgcctgatcttgctggcgcgcaacattggtatactgcttcggcagaacaaggcaatcctgaggcacaatacttattaggccaattttatcaactaggtgaaacaggagaacctgattataatttggccaaatactggtatcaaaaagcagcgaaacatttatctaaagccgatgtagcattaggttttatttatgaaacggtagatgataattatgctcaagcactaaaagcctatgaaaatgctgcagcaaaaggagatatgctaggcgcttataatttggctttaatgtatgagtatggcaagggcgtgcccgtcaattactccaaagcgttatctttgtttaaagaagcatcagagaaaggtgctcctgaagcgatgagtcaattggctggaatgtatttttatggtttggggcaaccaagaaacgaacaacaagctttggtctggtataagaaagctgcaagcttaggtaatgggaatgcgttgtatgccctcggtttattatccgaaactggtgttggtgttaaattggattttccagatgctttacggtattaccaggatgcatctgataaaggtaatgaaaaagcaatgctggctttggcaagaatgtatcattatggtcttggtgtcgaaaaggatcataaaagatcagcgagtatttatcaaaaattggcacaaaagcaaaatgcttatgctcaatatcaattaggtacttattatattgagggaacggcaggcgaacgactacccgaaaaaggccgtgagctattacaacaagcgagtgaaaacggaagtttacaggcccgtagagtattgcaaagattagatgcacaaacccagggtaaagtaagttatgtcgagcccgtgttatttaataatgttcccaaatttgatggtcaaagtgctgatatgatttattttgatgcattaaatgaatggaatcatggggaggaggttttgtccagaatgatcttgcaacgtctggtgacgcaatatcccaattttatccctgcaaagcgagcttatgagcagttgaatcaagccaaattaatgaataacttgggttaa

SEQ ID NO: 53038 - protein, 1200 aa, Legionella pneumophila str. Lens
MKSLVPWVCVLVASAGQQAFANDAFNAYRLGNYNEAAEPLIIKSGQDAVAEYYLGRLYLYGYGQLKNNRVAMRYFTKSAEKGYLPAVLLMAKYSLLHEKNPEEAARWFKQAAAVGDVSAQMYMAAAYLYGVGVKKNTDIARRYYIDAAKNGNPIAQYTLAEYFLESKHAANKKLGIIWLNKAAENGDPKALTELGRFYVAGQMVAKDTAKGVELLNKAASEQYTPAMLELGKLALMQNQYDEAIQWLNKAEEQSTEATLELAHIYLQDKSPVYDPKTGFLLVLKAAQNGSVQAQKELANLYQKGIGVAADEELSKQWTLKAAENEKKNAEPPVLAQAALWLSNDKTDKLEETAYQMNGIFSPWNNPSALRNNSYNQAPKLETISRQDIFKPQFELTQPNSIPISNYYDALISKQVEFQSNQWAYPTYRLNPFVEALERANSPVVQKLNLPVPYADANYDDSEVGSFDLMDIWTGDWKRTVNYMSVVNYLYFRAILGNAQTQFEIGQLFQYGIGLMQDDASAIIFYENAAEQKHLGAEYNLGILYLKRGKDENDYQQALNWLTDSAFKGNQRAQYVLARILRQGIVGPDGKEYIKANDEQAMAMLYLSAANDYGPAEYELAEYLARDYNNGLSVDVRKQKIALIRKLYQGAVKNKVAEALLPLAFYNAMDDNRQKQEQAFKVAEEQAETGNANAALLLGMLYDRGIGITADPAKAMYWYQQAGQNPVSQFILGTYITEGKGVAQDKEKGLDLLKQSADSQFSYADFNLAVLKQQSGEDFLPNLIESYKLGNSHAGIVLADYYLSQSSVPEQMNQAKEIYKGLADKGDQYAQLKLAYMLQKGLGAAPDLAGAQHWYTASAEQGNPEAQYLLGQFYQLGETGEPDYNLAKYWYQKAAKHLSKADVALGFIYETVDDNYAQALKAYENAAAKGDMLGAYNLALMYEYGKGVPVNYSKALSLFKEASEKGAPEAMSQLAGMYFYGLGQPRNEQQALVWYKKAASLGNGNALYALGLLSETGVGVKLDFPDALRYYQDASDKGNEKAMLALARMYHYGLGVEKDHKRSASIYQKLAQKQNAYAQYQLGTYYIEGTAGERLPEKGRELLQQASENGSLQARRVLQRLDAQTQGKVSYVEPVLFNNVPKFDGQSADMIYFDALNEWNHGEEVLSRMILQRLVTQYPNFIPAKRAYEQLNQAKLMNNLG

SEQ ID NO: 53039 - DNA, 1530 bp, Salmonella enterica subsp. enterica serovar Paratyphi A str. ATCC
  CDS (1)..(1530): transl_table=11
atgcgtttttcatcaattttcaaaataataatattaaatatatttatttcaaaaatggctcacgctgctgtctgcgaggagcgctatcccgccgactcagaagaatgccagtacgttcaggaattagagcaaaaagcggaacaaggagatgaaagcgcgcagttcgcgcttggaagctggtatgcggaggggcgatacgttaagcctgattataaactagccataaaatggctggagaaagcgggtaaacaaggttcggatttttcctatttcatccttggctatcattacaactatggtgaaaattttccacttagtcgacaaaaagcgctggagtggtatcgcaaggcggcagagctaggggatagtagtacgcaagaaattctcggtgacgcctatatgtatggcgatgggtttccccaaaatacccagctagcgctggagtggtatcgaaaagccgcctctccaaccaatgatgcgggcgttgtccgcggacagggttcagcttcgtcagcacaatttaagcttggagtaatgtacgcccacggtcagggcgttcctcaggattatcagcaaacggcgatcttgatgcgtaaagcggcggaaaatatgtactaccccgcgcaactttatctcggtgttgcctatttttatggtgaaggcgtgcctcaggattatcgtcaggcagtttactggcttaatgaaggtataccaggcagctatacgccaggccacattccgctgagtgcgctctatgataaagcgcatcccgctgaccgggttcactctcagacgtggtatcgaaaaacagcgcaacgcgtgatggcaaaggtacagtacaattttggcgtatggtattacaacggttatcacttattgaaagatcacaacctggcgctggagtggtatcgcagagccgcagcgcaaggattggccgaggcgcaggatgcgatcggcgtgatgtttatgcagggtgagggcgtttctcaggactaccaacaggcgctggcgtggtatcgcaaagccgcacgccagggactgcctgctgcgcaaacgcatctgggcatcatgtctgcttttggtcgcgacgtcgcgcaaagcgacagacaggctatcgcatggtatcgaaaagcagcaaaacaggattttgcgaaagcgcaatatcagcttggcgtagcatatagcacgggaagaggcgtgcctgaaaatagccggaatgcgctgaagtggtaccttaaagcggcagagcaggggtttactcctgcacaatcagcgcttggggaaatttatgctcatgggcgccagggtgtgcctaaagataataagcaggcctatatttggtattacatggcaagtatgtatacggaaaaatctaaggatgattgttcagcgctcattgccgaaagaaaccgactcaagggaacgctcaccccagatcaacttagcgagacatatgccgcctttaatctcatctggcgaaaaattgaccagtcaaaggaggcgaaaaagattgccaggaagaagtattga

SEQ ID NO: 53040 - protein, 509 aa, Salmonella enterica subsp. enterica serovar Paratyphi A str. ATCC
MRFSSIFKIIILNIFISKMAHAAVCEERYPADSEECQYVQELEQKAEQGDESAQFALGSWYAEGRYVKPDYKLAIKWLEKAGKQGSDFSYFILGYHYNYGENFPLSRQKALEWYRKAAELGDSSTQEILGDAYMYGDGFPQNTQLALEWYRKAASPTNDAGVVRGQGSASSAQFKLGVMYAHGQGVPQDYQQTAILMRKAAENMYYPAQLYLGVAYFYGEGVPQDYRQAVYWLNEGIPGSYTPGHIPLSALYDKAHPADRVHSQTWYRKTAQRVMAKVQYNFGVWYYNGYHLLKDHNLALEWYRRAAAQGLAEAQDAIGVMFMQGEGVSQDYQQALAWYRKAARQGLPAAQTHLGIMSAFGRDVAQSDRQAIAWYRKAAKQDFAKAQYQLGVAYSTGRGVPENSRNALKWYLKAAEQGFTPAQSALGEIYAHGRQGVPKDNKQAYIWYYMASMYTEKSKDDCSALIAERNRLKGTLTPDQLSETYAAFNLIWRKIDQSKEAKKIARKKY

SEQ ID NO: 53041 - DNA, 666 bp, Azoarcus sp. EbN1
  CDS (1)..(666): transl_table=11
atgcatcgaccgctatgccgggcactgttctgcatcacgctgacgttcgggtgcgcgcaggcggtggcggacattccggcagcggccctcgtgcagaacgcgatcggcgcctacgaggcggggcgccacgacgaagcggcgcggctgttcgaacgcgccgcgcgcgccggcaaccggctcgcccagttcaattacgcaatgatgctgtatcgcaacgaagcgcagtcgcacgacgcgaacgccgcgtggcgctggctgcgacgggctgcgggggccggtctgccacaggcgcagttcacgctggcgcgatcgtacgaacgtggcgacggcgtcccgaagtcgctgtcgaccgcggcggagtggtatcggcgcgctgccgcgcaggggcacgtcgaggcgcaggtgagcctcgcgtcgatgtatttcgtcggaggcggcgtcccgctcgatgctgcggctggggcacgctggtatcttgccgctgcgcgcgccggtcacgtcggcgcgcaacacatcatcgcgggcctgtacgagaccggcaacggcgttgccgcggatcggcgactggcggcgcactggtacctgcaggcggcccagcagggtgacacgctcgcgcgggagaagcatgctgcactgatgtcgcagatcgaggcccccacgccttga

SEQ ID NO: 53042 - protein, 221 aa, Azoarcus sp. EbN1
MHRPLCRALFCITLTFGCAQAVADIPAAALVQNAIGAYEAGRHDEAARLFERAARAGNRLAQFNYAMMLYRNEAQSHDANAAWRWLRRAAGAGLPQAQFTLARSYERGDGVPKSLSTAAEWYRRAAAQGHVEAQVSLASMYFVGGGVPLDAAAGARWYLAAARAGHVGAQHIIAGLYETGNGVAADRRLAAHWYLQAAQQGDTLAREKHAALMSQIEAPTP

SEQ ID NO: 53043 - DNA, 948 bp, Zymomonas mobilis subsp. mobilis ZM4
  CDS (1)..(948): transl_table=11
atgaagaaaattttatcttttaccaccgttcttttcccttttattttgagtgcagcgcaagcgcagcctgccgcgcaggccaaaagccaatcgataacggtaagattgcagagcgactatacgcctgctttgcaaaaagcggccgatcaaggcaatgctgatgccgaggcaaaagtgggttttggctattttagaggcaaaactttgccccatgattatgccaaaggcattttctggctgcaaaaagcggctgaccaaggacattctgatgccgagacccttttgggcaatgcctatcagcaaggcgtgggtctgcctaaaaatcaggaaaaggctatcttctggtatcaaaaggctgccgatcaggggaatttggatgctcaaaccttattaggtgccgcctatcatatggggcagggcgttcccaaaaatgaccaaaaggctattttttggttacaaaaagcagcggatcaggctttccctcaagctcaaaatttcttgggtgaagtttatgaaacgggcgatcctgctgtcagaaatattgaaaaagccatttcttggtatcagagggcagccgaaggaaattcggtcacggcgcaagcccatttgggtatggcctatcacgaaggcacaaaactgccgaaaaactacgagaaatcgactttttggtttaaaaaagccgctcttcaaggcgatgatcaggggcagttcttttatggcttagcctgcctgaaaggcgagggcgttgccaaaaatccgagagaggctgtctcttggtttcagaaagcggccgatcaaggcaatctccaagcgacgacccgtttaggcttggcttatgccagtggagagggtgtgcctgccagcaaagaaaaagcggttttctggttgagaaaagcggctggacagggtgaacctaatgcccagagaatattatcaatgatgcgctag

SEQ ID NO: 53044 - protein, 315 aa, Zymomonas mobilis subsp. mobilis ZM4
MKKILSFTTVLFPFILSAAQAQPAAQAKSQSITVRLQSDYTPALQKAADQGNADAEAKVGFGYFRGKTLPHDYAKGIFWLQKAADQGHSDAETLLGNAYQQGVGLPKNQEKAIFWYQKAADQGNLDAQTLLGAAYHMGQGVPKNDQKAIFWLQKAADQAFPQAQNFLGEVYETGDPAVRNIEKAISWYQRAAEGNSVTAQAHLGMAYHEGTKLPKNYEKSTFWFKKAALQGDDQGQFFYGLACLKGEGVAKNPREAVSWFQKAADQGNLQATTRLGLAYASGEGVPASKEKAVFWLRKAAGQGEPNAQRILSMMR

SEQ ID NO: 53045 - DNA, 1899 bp, Zymomonas mobilis subsp. mobilis ZM4
  CDS (1)..(1899): transl_table=11
atgaagcgctccctttcctatgcctcttttttgagaagatcgctcgcgatactgccttttcttctgccctgctcttcaaaaacgcatgctctaaccactatgcaaagataccagatagaggatattaaacgcatagcatcacggggagatcataaggtagaatatatcttggggactttctattctaaaggcgatgttgaaggtattccgaaagattttcatttagctctacattggtatcaagaggccgctaaagacggagataaagaagcggcccaaatgatcggcctcctttactataatggtgacggtgtcccaatagatatcgcgaaagcagcctactggtttgaaaaagcggcgaatgctggcaattgggacgcggccagacgtttggcaacactctatatcaatggagaaggtgttcctaaaaatgtcgaaaaaggcatttcgtggtataagaaagcgatccaatcaggggatattgattctgcccgtcgcctaggcatgctttattggatgggcgatgatgtgccccgcgatcaagaaaaggcactccattggctcgaaaattcagccaataacggggattgggatgcctcacaaatgctttcccgattttatattttgggagaaaatatacccttcgacaaagaaaaaggactctattggctcgaaaaatcagcaaaacagggaggtgtcatttcgcaagaaatattagcaaatctctattattcgggtcagatgcttcctcttgataaaaaaaaggcggcctactggtatgagcaagcggccaaagagcataacggctcagcagcaaaaatgctgggggctatttattacaatggtgaagatgtcaaacaaaataaggaattaggccgctattggatagaacaggccgcaaaatggggagagcccgaagcccaaagaattaccagcatgttttatcaggaatcggatacgttagaggataaggaaaaagccgaattttggcttaaaacggcagctctggcaggcgataaagaagctcaaaaacaagtaagcattctctacacgaataaagacccgaaaatttcagaaatacatccacagattataaagcttctccgcgaaaaggctgaaaaaggcgataaagaagcccaatatgatttcgctttgaaatattatgaaggcaaagaaatctctcaagatttcaaacaagcggtctattggtttcaaaaagcagcggatcaaggcgatcctagtgctactctcaatttaggcgcgctttattatgatggaaagctaggaaaaacagatttttcgaaagcggcgactctttttcaaaaaacggctgaccaaaactatcccaaagcccagctctttctagggattctctatgaaagaggtgaaggcgttcctcaagacacccaaaaagccctttctttatacaaacaggccgctaacctaggggaagctgaagcacaattcattctcggttatcactatggcacaggaaaaattgtgccactcaatttaaaaaaggcagcctcttggtataccaaagccgctcatacaggtagcttacgcggtcaaatcaatttaggcattgcctatatgctcggagcaggggttcctaaaaatattctggtagctatttactggttacaacaggcagcaaaatcagacgacatcaaagccgaaatcaatcttggcaagatttacgccgacccaaaaaatcaagaaattttcgcactggatacagcgaaagactggttcaaaaaagccgccgatcaaggttcggaagacgctaaaaactatcttgccagccttacccctgtagaagctccaaatgggacactctcaaaaacggaaattctgccacagatcaccgaagagagtcaggcaaagccagaatcctaa

SEQ ID NO: 53046 - protein, 632 aa, Zymomonas mobilis subsp. mobilis ZM4
MKRSLSYASFLRRSLAILPFLLPCSSKTHALTTMQRYQIEDIKRIASRGDHKVEYILGTFYSKGDVEGIPKDFHLALHWYQEAAKDGDKEAAQMIGLLYYNGDGVPIDIAKAAYWFEKAANAGNWDAARRLATLYINGEGVPKNVEKGISWYKKAIQSGDIDSARRLGMLYWMGDDVPRDQEKALHWLENSANNGDWDASQMLSRFYILGENIPFDKEKGLYWLEKSAKQGGVISQEILANLYYSGQMLPLDKKKAAYWYEQAAKEHNGSAAKMLGAIYYNGEDVKQNKELGRYWIEQAAKWGEPEAQRITSMFYQESDTLEDKEKAEFWLKTAALAGDKEAQKQVSILYTNKDPKISEIHPQIIKLLREKAEKGDKEAQYDFALKYYEGKEISQDFKQAVYWFQKAADQGDPSATLNLGALYYDGKLGKTDFSKAATLFQKTADQNYPKAQLFLGILYERGEGVPQDTQKALSLYKQAANLGEAEAQFILGYHYGTGKIVPLNLKKAASWYTKAAHTGSLRGQINLGIAYMLGAGVPKNILVAIYWLQQAAKSDDIKAEINLGKIYADPKNQEIFALDTAKDWFKKAADQGSEDAKNYLASLTPVEAPNGTLSKTEILPQITEESQAKPES

SEQ ID NO: 53047 - DNA, 1758 bp, Zymomonas mobilis subsp. mobilis ZM4
  CDS (1)..(1758): transl_table=11
atgaaagccgctggttcttggatgatgaagctctcgatgattttgtctgcgccgctggtgataaccccgctttgggcagaggcaaacccgcctgcggttatgacagctcctcaagcctttacgcaggcaatacataatttgaaaagtcagaataaggacgatcaagcccgcggttttatgaaaatgcagcaagctgtttctggtggcaatccaaaggcagaatataatttgggggctttatatcatgaaggcttgggaacaacgcagaattttgttcaggcgcgttactggatagagaaatcggcggaacaaggctatcctgcggccgaagccttgctaggaaatatctatcatttcggaagaaagggtatccctgaagatcttgaaaaggctttttactggacagaaaaagccgccaatcacggcgtgacctcggcgcaaagagatttagctttaatctactatcaacaagccttagcgcataaaatatcaccctcagaagggcagcaaaaagccctttattggatggaaaaggccgctgatcggggtgatttagaggctaaattccaaatggccaatgtctatttgtctggtatcccgaatttgccacaatatgcagcggataacaaaaaggccttttctttatgtaaggatgcggccgagaaggggaatctaaaagcggccgctcttttgggaaaaatatattatagcggcgatagcggcaaggtggatcaaaaagctagcttttattggacagaaaaagccgctcgtctgggtgatcctttcgcagaatataatatggctcgtttttataacccccaaaatggcagtaaaagggtcgatccagacactgctttttactggatggagaagtcagccaatcagggtttccatcctgcggagagtgcattagggcgcttttatcgtgacggtcagggcacaggaaaagacctccaaaaagccgttttctggtataatcgagcggccgaaggaggcaatattcaagggcagattgatctggctatggcctattatcatggtgatgccactgaaaaagacagcaaaaaggctttttattggtgtgaaaaagcggccaatcagggttctgaagaggctgaagagcaattggctgagatgtatcatcagggtgaaggcacccagaaagatgacgataaagcggccgaatattaccaaaaggcatgggcaaaacatcattttgacaatccagcgactgtgatgggtgacctttattttgaaggccagaaaatagaccggaattatccgaaagccttggcatggtatcagaaagcggctgcccaaaatgatagtcgcgccgaaaatgctatcgggaatatctattatagtggcttggcagtgccgcaggatttcaaacaggctctggtttggtatcgcaaggcaacggctgatttttatcatacccaagcctatgatgctgaaatgaaattgggcgatatgtattccaaggggcaggttgtcccgcaggatcttaagcaagccttttcatggtatgaaagatcggcacgccatcattacaaacccgccgagattaaattatcaaccctttatgaaaaagggatcggggttgagaaaaacaaagaacaggccgtttattggcatcgtaaggcctttgataaagcctttgccgagatagacgacaggctggacgatcatgcccaaggcatggcgatgctctatcaggccgctgaagacgccaagaaagacgcggtttctgattaa

SEQ ID NO: 53048 - protein, 585 aa, Zymomonas mobilis subsp. mobilis ZM4
MKAAGSWMMKLSMILSAPLVITPLWAEANPPAVMTAPQAFTQAIHNLKSQNKDDQARGFMKMQQAVSGGNPKAEYNLGALYHEGLGTTQNFVQARYWIEKSAEQGYPAAEALLGNIYHFGRKGIPEDLEKAFYWTEKAANHGVTSAQRDLALIYYQQALAHKISPSEGQQKALYWMEKAADRGDLEAKFQMANVYLSGIPNLPQYAADNKKAFSLCKDAAEKGNLKAAALLGKIYYSGDSGKVDQKASFYWTEKAARLGDPFAEYNMARFYNPQNGSKRVDPDTAFYWMEKSANQGFHPAESALGRFYRDGQGTGKDLQKAVFWYNRAAEGGNIQGQIDLAMAYYHGDATEKDSKKAFYWCEKAANQGSEEAEEQLAEMYHQGEGTQKDDDKAAEYYQKAWAKHHFDNPATVMGDLYFEGQKIDRNYPKALAWYQKAAAQNDSRAENAIGNIYYSGLAVPQDFKQALVWYRKATADFYHTQAYDAEMKLGDMYSKGQVVPQDLKQAFSWYERSARHHYKPAEIKLSTLYEKGIGVEKNKEQAVYWHRKAFDKAFAEIDDRLDDHAQGMAMLYQAAEDAKKDAVSD

SEQ ID NO: 53049 - DNA, 1128 bp, Zymomonas mobilis subsp. mobilis ZM4
  CDS (1)..(1128): transl_table=11
gtgatactgacgacaagaagcttgttttttcagaaaaatatctggttgccattattggtggctttaacgccggtgacatctttcccgctttatgcagcggtgaaaacggcagatgtcaaaaaggcaaatgacaattttgaatctggtcttcgctattatcacggacataatgttgcccagagctacagccaagccagagagtattttcagaaggctgcggatctcggtcatgccgaagcccaattttatttgggggcattgtatgagcggggaaagggcgtggctagaaattataaaaccgctttttcatggtatcagaaagccgccgatcagggttttgtgaaggctgaaaacaatgtgggcagcatgtatcaatatggtgtcggcgttccccagaattttcaggccgctttgacttggttacagcgtgcggcagggcaaggcgacaaagttgcccaaaccaatttgggcgatatgtattatcaaggccttggcaccccccaagagtataaaacagccgctatctggtatcaaaaggcggctgcccaaggctatgctttggctgaatataatttgggcgtgatgtatagtcaggggcagggcgtaacccaagatatggcgactgctgcgacttggtatcagaaggccgccgatcagaaatttccggctgccgaatataatatcgcctatctttatgaaaaaggccaaggcgttgttcaggatcagaaggtcgctttggcttggtatcagaaggccgccgatcaaggctttgtgaaagcgcagttgaatttggcaagcctcctttaccatcaggccaaaggcaaatcccagaattataaagaggccgccctctggtatcagaaagcggcagcgcagggtgatgtcgttgccttgtttatgttgggtaaaatggcgcatttgggcgagggggctgctcgaaatgatgtggatgcctatatgtggttcagtctggcagccggtctgggtctgaaaaatgccgaaaataattgtcaggttttaagtaaaatgatgacccctgcccagattgccgaggccaaaaaagaggcacaatcttggttggataagcatcctagctttccggtgaaaaaactgaattcggcgggatag

SEQ ID NO: 53050 - protein, 375 aa, Zymomonas mobilis subsp. mobilis ZM4
MILTTRSLFFQKNIWLPLLVALTPVTSFPLYAAVKTADVKKANDNFESGLRYYHGHNVAQSYSQAREYFQKAADLGHAEAQFYLGALYERGKGVARNYKTAFSWYQKAADQGFVKAENNVGSMYQYGVGVPQNFQAALTWLQRAAGQGDKVAQTNLGDMYYQGLGTPQEYKTAAIWYQKAAAQGYALAEYNLGVMYSQGQGVTQDMATAATWYQKAADQKFPAAEYNIAYLYEKGQGVVQDQKVALAWYQKAADQGFVKAQLNLASLLYHQAKGKSQNYKEAALWYQKAAAQGDVVALFMLGKMAHLGEGAARNDVDAYMWFSLAAGLGLKNAENNCQVLSKMMTPAQIAEAKKEAQSWLDKHPSFPVKKLNSAG

SEQ ID NO: 53051 - DNA, 741 bp, Zymomonas mobilis subsp. mobilis ZM4
  CDS (1)..(741): transl_table=11
atgacccgtgatggtttgaaatcgccgcttcaaaaagcggctgaacgaggagatgccaaagcgcaatatgctttgggtaatgcctattccaaaggccaagatgtttccaaaagtgacgaacaagctgtctcttggtatcagaaatctgccagccaaggctatgcaccggctcaggcagccttgggatatgcttattcctctggattgggtgtgacccatgatgatcaacaggcggtttctttttttcaaaaagcggccaatcagggtttggctgaggctcaatatagtttggctatcgcctattatactgggcgcggtgtgacgcagaattatgagcaggcttctttctggtttcagcgttctgccaatcaaggctttgttcctgcccaattttatcttggtgttatgtatcggaatggagcgggcataccagaggatgatgaccgcgctttattctggtttcataaggccgccgataaaggctatgccgatgcccaatataatttggggctgatttatcacgagggcaaagtcgtcaaaaaagacgagaaacaggcgaccttctggtatcagcaagccgctaatcagggacttgtcgaggctgaattcaatttgggtatcgcctatttgaaaggccaaggggtgcagaaagataaggataaagcgactttctggctcgaaaaagcggcagataaaggcgacagccatgcccaagatgtattggaaatgatgaataaatag

SEQ ID NO: 53052 - protein, 246 aa, Zymomonas mobilis subsp. mobilis ZM4
MTRDGLKSPLQKAAERGDAKAQYALGNAYSKGQDVSKSDEQAVSWYQKSASQGYAPAQAALGYAYSSGLGVTHDDQQAVSFFQKAANQGLAEAQYSLAIAYYTGRGVTQNYEQASFWFQRSANQGFVPAQFYLGVMYRNGAGIPEDDDRALFWFHKAADKGYADAQYNLGLIYHEGKVVKKDEKQATFWYQQAANQGLVEAEFNLGIAYLKGQGVQKDKDKATFWLEKAADKGDSHAQDVLEMMNK

SEQ ID NO: 53053 - DNA, 501 bp, Zymomonas mobilis subsp. mobilis ZM4
  CDS (1)..(501): transl_table=11
atgaagaaaagaattattctgttagggctgcttttgtctatcggcggccagattgtttattcgcaggtgcgtaaaacgccgtccattttttcccaaaaaaaactgcatgaattaaaactggctgccgatcagggcgatgccgaggcagaagctgccttgggagaggcctttgattttggaaaaataacgccgcaggactaccaaaaggcttttttctggtatcaaaaagcggccgatcaatctgtcgctgaggcccaatataatttaggcgggctttattataagggggcaggaaggcctaaagatggggagaaagctgtctattggtaccgaaaggcggcggatcaaggctatatagacgcgcaacggaatttagctcttttatatgctaaaggggagctggtgccccagagcgatgagcaggccgtttattggtatcaaaaagccgctgaccaaggggatgctgaagcgcaaaagttactggcaatgttggcgcgataa

SEQ ID NO: 53054 - protein, 166 aa, Zymomonas mobilis subsp. mobilis ZM4
MKKRIILLGLLLSIGGQIVYSQVRKTPSIFSQKKLHELKLAADQGDAEAEAALGEAFDFGKITPQDYQKAFFWYQKAADQSVAEAQYNLGGLYYKGAGRPKDGEKAVYWYRKAADQGYIDAQRNLALLYAKGELVPQSDEQAVYWYQKAADQGDAEAQKLLAMLAR

SEQ ID NO: 53055 - DNA, 651 bp, Zymomonas mobilis subsp. mobilis ZM4
  CDS (1)..(651): transl_table=11
atgcaagcggataaggaacgctatgaccgtgagatgatctcttctttggaagtgcgggcgaaggccggtaacagtttggcagaagaggttctgggcgaggcttatgcgcatggcagagggcggccgcaggatgatgaaaaggctgtttactggtatcagaaggcggccgataaaggcatgaaggaatcccagtataatttgggggatgcctatcttcatgggcgaggtgtcggggtagattatgaaaaagccgccttttggtatcggaaagcggctgatcagaattttatacaagcgcaatataatctcgggcttttatacgtcaaaggccaaggtctgccaaaaagtgatgaacatgcagccttttggtggcagaaggccgctgaacaaggtgaggctaaggctcaatttaatctcggtgttttttatcataatgggcgggctgtgccgaaaaatgacgcacgggctatcttctggatggagcaggccgcgcatcagggcttggtagaggctcaaatgttattagctatggcttatgccagtggtcagggcgcgccaaaggataaggaaaaggcagtctattggtatcagaaggctgcggatcagggaaatgcagcggcgcaaaaggccttacaagcattgtcttattag

SEQ ID NO: 53056 - protein, 216 aa, Zymomonas mobilis subsp. mobilis ZM4
MQADKERYDREMISSLEVRAKAGNSLAEEVLGEAYAHGRGRPQDDEKAVYWYQKAADKGMKESQYNLGDAYLHGRGVGVDYEKAAFWYRKAADQNFIQAQYNLGLLYVKGQGLPKSDEHAAFWWQKAAEQGEAKAQFNLGVFYHNGRAVPKNDARAIFWMEQAAHQGLVEAQMLLAMAYASGQGAPKDKEKAVYWYQKAADQGNAAAQKALQALSY

SEQ ID NO: 53057 - DNA, 717 bp, Zymomonas mobilis subsp. mobilis ZM4
  CDS (1)..(717): transl_table=11
atgaaaataatattatggatagtggcgctttcctttttggctgttcgccctgttcttgcaggaaatgacaggacggttaggctgctatccgatggttattcaatagtcgagattcagaaaaacgccaatgctggcgatagccaagctcaattttctttgggctatgcttatgcctttggaaaaaatctgccgcaggattatgaaaaagccgccttttggtatcggaaggcggccgaacagggctttgcacctgctcaatgtcaaatagctgtggcttatgtttctggcgcaggcgtatcccagaattataagcgggctgctttctggtttgataagtccgcccgtcaaggtgatagttcggcgcaatattatctaggtcttttatatacgcaaggtatcggcgtgccgcaaaatgacgaaaccgctgtattttggttacaaaaagctgctcatcaaaaatatcgagccgctgaatatgatttaggtaatgcctattacgatggaaaaggtgttcttagaaacggtgaaaaggcgatgttttggtggcagaaatcggctgatcaaggtttcgccgcggctcaatttagattggggcgtgcttattattggggcgacgttgttgcacaagatcaaaaggtcgctcaggcatggattaagcgggctgctgatcaaggctatgtggcagcgatagtctggcttcaaaacgcgcaacattaa

SEQ ID NO: 53058 - protein, 238 aa, Zymomonas mobilis subsp. mobilis ZM4
MKIILWIVALSFLAVRPVLAGNDRTVRLLSDGYSIVEIQKNANAGDSQAQFSLGYAYAFGKNLPQDYEKAAFWYRKAAEQGFAPAQCQIAVAYVSGAGVSQNYKRAAFWFDKSARQGDSSAQYYLGLLYTQGIGVPQNDETAVFWLQKAAHQKYRAAEYDLGNAYYDGKGVLRNGEKAMFWWQKSADQGFAAAQFRLGRAYYWGDVVAQDQKVAQAWIKRAADQGYVAAIVWLQNAQH

SEQ ID NO: 53059 - DNA, 1257 bp, Zymomonas mobilis subsp. mobilis ZM4
  CDS (1)..(1257): transl_table=11
atgaaaagaatattattgttaggggtattttttcctttgtttgtagagcctgttcaggcggcgaaggtagcgcagacgggtcatctgtcccgtggcaatgctatcatcgagcttcaggaaaaggccgaaacgggtgatgccgatgctcaatatgctttaggtggtgcgtattatcaaggtaagggtgttcagcgagattatgagaaggcggcgttttggtatcaaaaggcagccgatcaaggaaaggctgaggctcaatatgatttaggtagtgcgtattatcaagggaagggtgttccgcagggttatgagaaggcggcgctttggtggcagaaggcggctggtcaaggaaataccgctgctcaatatgttttaggtagtgcgtattatcaagggaagggtattccgcgagattatgagaaggcggcgctttggtggcagaaggctgctggtcaaggagatgccgctgctcaatatgatttaggtaatgcgtattatcaaggtgcgggtgttccgcgagattatgcgaaagcgttatcttggtatcagaaggctgctgatcaaggacatgccgctgctcaatatgatttaggtagtgcgtattatcaaggtgcgggtgttccgcagggttatgagaaagcggtgttttggtggcagaaggctgctgatcaagggtatgccgctgctcaatttaatttaggtaatgcgtattatcaaggtgcgggtgttcctcaggattatgcgaaggccgtgttttggtatcagaaagcggcagatcaagggtatgccgatgctcaatttaatttaggtgatgcttatcatgatgaagagggtgttcctcaggattatgcgaaagcggtgttttggtatcaaaaagcggctgatcaaggagacgccgctgctcaaaataatttaggggtggcgtatgctcgcggggcgggtgttcctcaggatcgtgcgaaagcggtgttttggtatcagaaggcggctgatcaaggcgatgccaatgctcaatatgctttaggtaatgcgtattatcaaggtgcgggtgttccgcagagtcatgaaaaggcggtgttttggtggcagaaggcggctgatcaaggctttgtcgctgctgaatataatttaggtgtagcgtatctgaaaggtcaaggtatcgcgcaagataaggggcgtgggcaattctggcttcagaaagccgctgataaagatgatgaagcggctaaagaggctttacaaaaattgtctcattag

SEQ ID NO: 53060 - protein, 418 aa, Zymomonas mobilis subsp. mobilis ZM4
MKRILLLGVFFPLFVEPVQAAKVAQTGHLSRGNAIIELQEKAETGDADAQYALGGAYYQGKGVQRDYEKAAFWYQKAADQGKAEAQYDLGSAYYQGKGVPQGYEKAALWWQKAAGQGNTAAQYVLGSAYYQGKGIPRDYEKAALWWQKAAGQGDAAAQYDLGNAYYQGAGVPRDYAKALSWYQKAADQGHAAAQYDLGSAYYQGAGVPQGYEKAVFWWQKAADQGYAAAQFNLGNAYYQGAGVPQDYAKAVFWYQKAADQGYADAQFNLGDAYHDEEGVPQDYAKAVFWYQKAADQGDAAAQNNLGVAYARGAGVPQDRAKAVFWYQKAADQGDANAQYALGNAYYQGAGVPQSHEKAVFWWQKAADQGFVAAEYNLGVAYLKGQGIAQDKGRGQFWLQKAADKDDEAAKEALQKLSH

SEQ ID NO: 53061 - DNA, 1011 bp, Zymomonas mobilis subsp. mobilis ZM4
  CDS (1)..(1011): transl_table=11
gtgaaaaaaacaggatggaaagcggcgatcattttggccgcgattgcgctgggtgctttgcttttttggggtgccttcaagctgaataggccaacagccaaaacgccacaggaagaattaaagctcgcgctgaaatatgcgcatggcgatagctcgaatattgataaaagcaaggctttgaccctgatccagcaagccgccaataaaggctttgctccggctgaatatgcgcttggcactttttactataaaggcgaagcggtcgcggcggataaatccaaagccctctattggtatcaacaggcggttacgcatggggatgccgatgccgcccttgctttgggtaatatgtattataatggcgacagtattgcgcccgacaaatccaaatctgttgacctttatcaacaggcggccaatcagggcaatgcccaagcgcagttaaatcttggcctgatgttttctcgtggggatgccgtttctctcgataaaaccaaagcactttactggtatcagcaagccgctgataaaggtaatccacaggctgaacttattcttggtaatatgtattataatggggaaactgtcccgcttgataaaaccaaagcttttgaatggtatcaaaaggcagccaaccaaggcaatgctgcggcagaattaaatcttggtctgatgtatgcgcatggcgatggcgtgccgctcgataagaataaaagcctttcttggtatcagaaagccgctgaacaaggcgatgcccaagccgaatacagccttggtaatatgtattataatggtgacggcgttgccgttgataaagccaaagcgctttcttggtatcaacaagcggccaatcatggcctcgctcaagctgaacttgctcttggcattatgttctataatggcgaaggcgttactgttgataaaaacaacgccgcttattggctgaaacaagccgctaatcatgggaatgatacagcaaaataccaactgaaattatggtttaattcttag

SEQ ID NO: 53062 - protein, 336 aa, Zymomonas mobilis subsp. mobilis ZM4
MKKTGWKAAIILAAIALGALLFWGAFKLNRPTAKTPQEELKLALKYAHGDSSNIDKSKALTLIQQAANKGFAPAEYALGTFYYKGEAVAADKSKALYWYQQAVTHGDADAALALGNMYYNGDSIAPDKSKSVDLYQQAANQGNAQAQLNLGLMFSRGDAVSLDKTKALYWYQQAADKGNPQAELILGNMYYNGETVPLDKTKAFEWYQKAANQGNAAAELNLGLMYAHGDGVPLDKNKSLSWYQKAAEQGDAQAEYSLGNMYYNGDGVAVDKAKALSWYQQAANHGLAQAELALGIMFYNGEGVTVDKNNAAYWLKQAANHGNDTAKYQLKLWFNS

SEQ ID NO: 53063 - DNA, 1773 bp, Gluconobacter oxydans 621H
  CDS (1)..(1773): transl_table=11
atgtcgttcaaacgtcgcctttccgctcttctttcctcccggggcaagctggaatatgcgatccatctcacggaaaccggtcaggctgttcaggggttcgcgcttctcagccgcatcgccgccacaggagacgcggaggccgcgttccgggtcgggcgcgcctatctggacgggcttggggttccacccagtctcgaagatggcgcccggtggatctatcaggccgccgaggcagggcatattgaagcggccttcgtgctggccacgctttatacagtgggcctgcccgaaggatttgaaatccgcacggccagcgaggggctggatctctcgcatgtgccgcaggcaggcccaagacatccggatttccatcttggtctgcgctgggccaaaatcgctgcggatgccggttccccggatgcacaggcccttctgggatatatcctgaccaatggaccggaagacctgcgcgatctgacgcaggcccggtcctggtacgaccgttccgcggccgcagggtgttcgcagggccatcttggtgtggcgctttccattctccatgaggcccattcagacgaggacctgtctgccgccgccaggcatctgaccgcagcgacgaaaggcggtctcggcacggctttcgatattctgggcaggatgtacgagtcaggctcgggtgtgccccgggatctcggaaaggctgccagttatttccatcaggcggcggaacgcaacatcgtaacggcccaggcgcgctatgggctgatgctgctggaaggaacgggcacgccccggcattacggccgggctgaaacctggctgaagcgcgccgcagcgaatggcgatacgcagtccgccgccctgcttggtgatctgtgtgccaatggcggcgatctgcctcccaatcttgtggaatccgccaaatggtaccgtctggcggccgagcagaaacatgccggcgccgcacgggccctcgggctgctctatctgacaggaaatggtgtccatcaggaccccgatgtcgcggcgcactggttcaaggtcgcgtcggaagcgggagacgcccatgcggatgcggatttcgggaacctgattctcgccggagcgtccgcaacccctgatgaaaaacaggccctgcatgcccgtttcgaaaaagccgccgaaaaaggcgatctggtcggggcctataatctgggtgtgtgctttgccgaaggcgtgactggcacgaaggacgggcgtgaagcggcccgctggatgcagaaagccgccgatggtgtcgtcaacgcgcagtactggtatggcaggatgctgctagaaggacggggcgtgcagcccgatcccacacaggcgctctactggatggaaaaggccgccgatgcgggcatggccgaggcacaggtcactgtggcggggctgctcgtggacgggagcatcaacggccgtcaggatcatgaaaaagccctgacgctgtaccggaaggccgccgagagcggcaacgtggacgccatgttctcgctggccgcgatgtatggcggcggccatgacgtccccgagaaccgcccgcaggcgcagctgtggttccgcaaggccgcccagcgaggaaacggcctcgcccagatgatgcttggtcgttatctcgtgcgcggactggccggtgtgacggacccggtggaaggtcgcatctggctggagcgggcaaaagcgcagaatatcagggacgctgaagcggaactcgcccttctggacgaagcgcagccggacggcgatgactga

SEQ ID NO: 53064 - protein, 590 aa, Gluconobacter oxydans 621H
MSFKRRLSALLSSRGKLEYAIHLTETGQAVQGFALLSRIAATGDAEAAFRVGRAYLDGLGVPPSLEDGARWIYQAAEAGHIEAAFVLATLYTVGLPEGFEIRTASEGLDLSHVPQAGPRHPDFHLGLRWAKIAADAGSPDAQALLGYILTNGPEDLRDLTQARSWYDRSAAAGCSQGHLGVALSILHEAHSDEDLSAAARHLTAATKGGLGTAFDILGRMYESGSGVPRDLGKAASYFHQAAERNIVTAQARYGLMLLEGTGTPRHYGRAETWLKRAAANGDTQSAALLGDLCANGGDLPPNLVESAKWYRLAAEQKHAGAARALGLLYLTGNGVHQDPDVAAHWFKVASEAGDAHADADFGNLILAGASATPDEKQALHARFEKAAEKGDLVGAYNLGVCFAEGVTGTKDGREAARWMQKAADGVVNAQYWYGRMLLEGRGVQPDPTQALYWMEKAADAGMAEAQVTVAGLLVDGSINGRQDHEKALTLYRKAAESGNVDAMFSLAAMYGGGHDVPENRPQAQLWFRKAAQRGNGLAQMMLGRYLVRGLAGVTDPVEGRIWLERAKAQNIRDAEAELALLDEAQPDGDD

SEQ ID NO: 53065 - DNA, 696 bp, Vibrio fischeri ES114
  CDS (1)..(696): transl_table=11
atgaaaatacttttaaaatcgttagttatatctgcttcattatgctcaccttttgttctagctaacagtgaagctcatagtgattatctaaaaggcacggcttatttaaatcaagataactataaagaagcaattacttggttaaccagtgctgctaataatggttctattgaagcacaaaacaaaattggaactatttatgcgaaagggatcggtactgaagcaaacacacaacttgctacccagtattttttgaaagccgcagcaaaccaaagttctatggcttactataaccttggtaaaatctacgaatcagaagaaaaatattcaacatctattgattggtataacaaagcaattgaagaaaataacagtaatgcaatgaataaccttgctgacttatatcttcatggcaaagggcttgttcaaaatactcaccaagcagaattactttatattcaagctgctgaattaggtaatgctacagcgatgcgtaatcttggtttcttatacactaacaataaagaagttaaacaagacatgagcaaagcgtatttttggtttaaccttgctgctgaaaaagacttcccagatgcagataagtaccgtgactatacagggaaaaagctaagtaaaagtaaacgcattaaagttcaaaatgaagcacttgaatggttagaacagcataatagttaa

SEQ ID NO: 53066 - protein, 231 aa, Vibrio fischeri ES114
MKILLKSLVISASLCSPFVLANSEAHSDYLKGTAYLNQDNYKEAITWLTSAANNGSIEAQNKIGTIYAKGIGTEANTQLATQYFLKAAANQSSMAYYNLGKIYESEEKYSTSIDWYNKAIEENNSNAMNNLADLYLHGKGLVQNTHQAELLYIQAAELGNATAMRNLGFLYTNNKEVKQDMSKAYFWFNLAAEKDFPDADKYRDYTGKKLSKSKRIKVQNEALEWLEQHNS

SEQ ID NO: 53067 - DNA, 2499 bp, Bacteroides fragilis NCTC 9343
  CDS (1)..(2499): transl_table=11
atggaaactttaaaagagaaattcgaagccctggcccatcgtatccaatcatccggaaaaccggctgccgcatggttccctcaatttacacctgtcactttgttgaacgccgaaaattggtgggaagcacttgctgtgtgcgaatatgccttggacacccatgaggacgaagcactgacagccggattttttgaattaatattcagtgcatacgattgtaacgtagaagtggatcttaatgaggaagagtatgcctactggtgggagaaagtgatcagtgtatgcgatcgtgtggctgtattcaacggtgccgggtggtcacagaaaggtgcacaatattcggaagcccgttatgggaaacgtgatctcagcctgttattcccttgctatgaaaaagcggcggaaatgggaagcccggaagcagaggcaaccgttgcttattggcgttatatgggtttctactgcgaacaggatagggcagaaggagagcgtcgatttgcagctttatcctcacccgaagctttgctatggggaaaatattaccgggcttatgccgagcagcacaccggcagtaaagagaaagccctgcttatgcgaaaagagttgcttgacgaacttcccgaaggccatcgcctgcgtgcccatgtatatgccgcgatgggcgacgcacttgatatagaagaaggaagtgtggctgaagaagcggcatgctatgagaagtcgctggaacttgttcctaatctatattctttaaaaaatctggcaactctctatttccgctatccggaactagggaagcaaaaagagctggcgtttgagttgtgggagaaagcctggcatgcaggtgtatggtctgcagctaatttccttggatataactatcaggaagaagagtggctcgatatgcctaaagccattgaatggctggagaaagggatgctttattgtgaatcatattgtgcctatgaattagcattgatctatctttataatgatgagtataagaatgtggaacgtgggttgatgtgcctgcagcgctgtgtcgacgacaattatgtagaagctatcgagacgcttgccaatgtttatttcaacggtgaattggtggaagagaatatctcgtatgcctgtcagttgttggagagagctatcgagctggggtccggtagtgcagcctatcgtatcggctggatgtatgagcgtggattgctttctgaagaaccggattatcagaaggctatggagtattatgaaaaagctgtgtctatggacagtgctgacgggtatgcacgggcggctctttatttggctaatggttattccggagttacggatgccgggaagtcaaaggcctattatgaaaaagcggcagagctgggttcatgttttgcaatggtagaattggcattcttatacgaaaatggtgaggtggtagaacaaagttatgagaaagctttcgacttgctccaaaaagctgccggacaggagtatccttatgcgatgtatcgtgtaggactttatttggataggggagtcatcggtgagccacggcccgaagaagcgtttgcatggtatgcaaaggcagccgaacggggagatggagatgcgatcttcgctcttgggcgttgctataagaatggaattggtacggaagagaatccggataaggctcttgaatggtttactaagggtgcagagaataacgaaccccgttgtcttacagaaatggggttggcttatgaatacggtagtgggatagaagagaatcctcatcaagctgttgaatatatgacaaaggctgccgaacaaaattatggttatgcccaatttaaaatgggagactactttttctttggttacggtgcctgtcccgaagataacaaacaagctgtggaatggtacgagaaggctgttgcaaatgatatacctttggctatgttgcgtatgggtgaatattacctttacgattatgacaaactgaatgagtcggagaaagctttcagctacttcaagaaagcggctgaagcagaatgttataatgaagggctgggaatctgctacgagatgggtatcggtgtggaagacaatgaaacagaggcattcaaatattatactttggctgcgggcagtggcaatgttatgagtatgtatcgcaccggattgtgttattacaacggagtaggtgtaaaacagaattatacagaagcttaccgatggtttaatgatgccgccggaaatgacaatgtggcttcgtattattatttaggtaagatgctgatgtatggcgaaggctgtgtgcccgatgcggaagcagggcttcaatggttgatgaaagctgctgagcataatagtgacaaggcgcagttcgaattgggcaatgcctatttgatgggtaatggagtagaggagaatgatgagatcgctatggagtggtttgagaaagcagccgaaaacggaaacgcgaaagccttgaaaattactggaagaagacaacgataa

SEQ ID NO: 53068 - protein, 832 aa, Bacteroides fragilis NCTC 9343
METLKEKFEALAHRIQSSGKPAAAWFPQFTPVTLLNAENWWEALAVCEYALDTHEDEALTAGFFELIFSAYDCNVEVDLNEEEYAYWWEKVISVCDRVAVFNGAGWSQKGAQYSEARYGKRDLSLLFPCYEKAAEMGSPEAEATVAYWRYMGFYCEQDRAEGERRFAALSSPEALLWGKYYRAYAEQHTGSKEKALLMRKELLDELPEGHRLRAHVYAAMGDALDIEEGSVAEEAACYEKSLELVPNLYSLKNLATLYFRYPELGKQKELAFELWEKAWHAGVWSAANFLGYNYQEEEWLDMPKAIEWLEKGMLYCESYCAYELALIYLYNDEYKNVERGLMCLQRCVDDNYVEAIETLANVYFNGELVEENISYACQLLERAIELGSGSAAYRIGWMYERGLLSEEPDYQKAMEYYEKAVSMDSADGYARAALYLANGYSGVTDAGKSKAYYEKAAELGSCFAMVELAFLYENGEVVEQSYEKAFDLLQKAAGQEYPYAMYRVGLYLDRGVIGEPRPEEAFAWYAKAAERGDGDAIFALGRCYKNGIGTEENPDKALEWFTKGAENNEPRCLTEMGLAYEYGSGIEENPHQAVEYMTKAAEQNYGYAQFKMGDYFFFGYGACPEDNKQAVEWYEKAVANDIPLAMLRMGEYYLYDYDKLNESEKAFSYFKKAAEAECYNEGLGICYEMGIGVEDNETEAFKYYTLAAGSGNVMSMYRTGLCYYNGVGVKQNYTEAYRWFNDAAGNDNVASYYYLGKMLMYGEGCVPDAEAGLQWLMKAAEHNSDKAQFELGNAYLMGNGVEENDEIAMEWFEKAAENGNAKALKITGRRQR

SEQ ID NO: 53069 - DNA, 996 bp, Salmonella enterica subsp. enterica serovar Choleraesuis str
  CDS (1)..(996): transl_table=11
atgaatcattccataaccagtcatccctgcgacaacgtatctttagcacaattaaccgaactggcgcagtcaggaaatagtgaagctcaatatatattaggccgtttatataatgacgaacgtatagatggcagcgaagaggataagctctctttttattggttgcagcaggcagctgaacaaggacactgcgaggcacaatattggctcggcttacgatacaaagacacgcctaccgacatgaaagataatacgctggctttattctggtcagaaaaagccgcacagcaaggacaccgccacgctttcaacacattaggctgggttcaggaaggagaaaccgggatggcgccagattatgcccaggccgttgcctggtatcgcaaaggagcagaacagagccacaaccttgcgcaatataatctcgggagaatgtatcgttcaggaactggcgtagagcaaaatgatacacaggcactctactggtttaaacaggcagcattacaaggccattgcgccagccaggaaagactggcgtatatgtatggcaatgggaaaggatgtcggaaaaatttatcccttgccgctctttggtacaagaagagcgcgctacaagagagcagctactcgcaatatcagatgggctattgttattacatcggagaaggtatcaaacaagattaccagcaggcaatatactggtttcgaaaagcggcagaccagggtgacgatggtgcctataacagtatcggctggatgtacaaatgcggtcatggcgtcgagcaaaattattcgctagcactggaatggttccacaaatcagcagaatgtaacaattcatcgggctggtacaacctcggatgcatgtacagagatggacacggtaccgcacaagacctacaacaagcgctctactggttcaaaaaagcacagcccacgggcaaatggaacgtcgatgaagagatccgcaaactggaagcccaactgcacgcttaa

SEQ ID NO: 53070 - protein, 331 aa, Salmonella enterica subsp. enterica serovar Choleraesuis str
MNHSITSHPCDNVSLAQLTELAQSGNSEAQYILGRLYNDERIDGSEEDKLSFYWLQQAAEQGHCEAQYWLGLRYKDTPTDMKDNTLALFWSEKAAQQGHRHAFNTLGWVQEGETGMAPDYAQAVAWYRKGAEQSHNLAQYNLGRMYRSGTGVEQNDTQALYWFKQAALQGHCASQERLAYMYGNGKGCRKNLSLAALWYKKSALQESSYSQYQMGYCYYIGEGIKQDYQQAIYWFRKAADQGDDGAYNSIGWMYKCGHGVEQNYSLALEWFHKSAECNNSSGWYNLGCMYRDGHGTAQDLQQALYWFKKAQPTGKWNVDEEIRKLEAQLHA

SEQ ID NO: 53071 - DNA, 1530 bp, Salmonella enterica subsp. enterica serovar Choleraesuis str
  CDS (1)..(1530): transl_table=11
atgcgtttttcatcaattttcaaaataataatattaaatatatttatttcaaaaatggctcacgctgctgtctgcgaggagcgctatcccgccgactcagaagaatgccagtacgttcaggaattagagcaaaaagcggaacaaggagatgaaagcgcgcagttctcgcttggaagctggtatgcggaggggcgatacgttaagcctgattataaactagccataaaatggctggagaaagcgggtaaacaaggttcggatttttcctatttcatccttggctatcattacaactatggtgaaaattttccacttagtcgacaaaaagcgctggagtggtatcgcaaggcggcagagctaggggatagtagtacgcaagaaatcctcggtgacgcctatatgtatggcgatgggtttccccaaaatacccagctagcgctggagtggtatcgaaaagccgcctctccaaccaatgatgcgggcgttgtccgcggccagggttcagcttcgtcagcacaatttaagcttggagtaatgtacgcccacggtcagggcgttcctcaggattatcagcaaacggcgatcttgatgcgtaaagcggcggaaaatatgtacgaccccgcgcaactttatctcggtgttgcctatttttatggtgaaggcgtgcctcaggattatcgtcaggcagtttactggcttaatgaaggtataccaggcagctatacgccaggccacattccgctgaatgcgctctatgataaagcgcatcccgctgaccgggttcactctcagacgtggtatcgaaaaacagcgcaacgcgtgatggcaaaggtacagtacaattttggcgtatggtattacaacggttatcacttattgaaagatcacaacctggcgctggagtggtatcgcagagccgcagcgcaaggattggccgaggcgcaggatgcgatcggcgtgatgtttatgcagggtgagggcgtttctcaggactaccaacaggcgctggcgtggtatcgcaaagccgcacgccagggactgcctgctgcgcaaacgcatctgggcatcatgtctgcatttggtcgcggcgtcgcgcaaagcgacagacaggctattgcatggtatcgaaaagcagcaaaacaggattttgcgaaagcgcaatatcagcttggcgtggcatatagcacgggaagaggcgtgcctgaaaatagccggaatgcgctgaagtggtaccttaaagcggcagagcaggggtttactccggcacaattagcgcttggggaaatttatgctcatgggcgccagggtgtgcctaaagataataagcaggcctatatttggtattacatggcaagtatatatacggaaaaatctaaggatgattgttcagcgctcattgccgaaagaaaccgactcaagggaacgcttaccccagatcaacttagcgagacatatgccgcctttgatctcatcaggcgaaaaatcaaccagtcaaaggaggcgaaaaagattgccaggaagaagtattga

SEQ ID NO: 53072 - protein, 509 aa, Salmonella enterica subsp. enterica serovar Choleraesuis str
MRFSSIFKIIILNIFISKMAHAAVCEERYPADSEECQYVQELEQKAEQGDESAQFSLGSWYAEGRYVKPDYKLAIKWLEKAGKQGSDFSYFILGYHYNYGENFPLSRQKALEWYRKAAELGDSSTQEILGDAYMYGDGFPQNTQLALEWYRKAASPTNDAGVVRGQGSASSAQFKLGVMYAHGQGVPQDYQQTAILMRKAAENMYDPAQLYLGVAYFYGEGVPQDYRQAVYWLNEGIPGSYTPGHIPLNALYDKAHPADRVHSQTWYRKTAQRVMAKVQYNFGVWYYNGYHLLKDHNLALEWYRRAAAQGLAEAQDAIGVMFMQGEGVSQDYQQALAWYRKAARQGLPAAQTHLGIMSAFGRGVAQSDRQAIAWYRKAAKQDFAKAQYQLGVAYSTGRGVPENSRNALKWYLKAAEQGFTPAQLALGEIYAHGRQGVPKDNKQAYIWYYMASIYTEKSKDDCSALIAERNRLKGTLTPDQLSETYAAFDLIRRKINQSKEAKKIARKKY

SEQ ID NO: 53073 - DNA, 1938 bp, Salmonella enterica subsp. enterica serovar Choleraesuis str
  CDS (1)..(1938): transl_table=11
atgggactgacgacagaagaatatattaataaaatacgcagtttaagaccggctattctcgatgaccgttatttttacctgacggtcgatcagtgcgatgctggcggcacgcccatgctgactggaatcgagctatgtaccgaagcgctgtgcggtgccgaatacatgaaaagatcgtctgacttgtggctggatgatgaactgcaaccgacggttaaacgtcaggcaacaacagtagtccatatgcccctcccctatgacaaagagaaaaaattatggaaagtcaccggcttgtatctggaatcctcagaagaaacaggggaggtgatgcaaagtaaacagatagcctttgaaggctataccaacgaagaaaacttcgctaaccgacaacgtgtttctgtatttaaatctttctatgaaagcggcaatctcaaaagtatttatcattataatgcgcaaaataagcgtgacggaaaagctgaaacttactttgatgaaaaagacaaaatagcggaaacgctgacgtttaaagatggtcaacccgaaggggaatacatcgtataccatgaaaacggagccgttgaaagtaaacgttactttgcccaaggtaaaattaaagatggcgaatgcccacatttttatgataacggcgttttaaaacaaaaacacagctatttaaatcagaaactggaaggcccggcatttgaatatttccctgatgggaaaataaaggggaaatattcatacagtaaaggcaccattgtcggcaccagtacggaatattattctaccggtaaaattcgtggtgtttaccacagaaataaccaaggtgaaaacgacggaacgttcgaacaatacagtgaagagggcaaactcctttctaaagcgacctataaaaatggcaaacagctttctgctcagagctggtatgaaaatgggcatcccaaagaagaatcctcttttgatagtgaaggccgtaaacatggtgcggtcaaagaatggttcagcaacggaaagcctgcctcatccaaaatgtataaacatgatgtgttagacggggatttcgaaaagtggtacgaaaatggtcaccgcgaatcagtctatccctataaaaacggtatgctaaatggggacgctaagcactggaatgaacagggcaaactcacctataccaccgaatataaagacgataaaaagcagggagccgatcgccgctggagcgaacgtaccggtaaacttgttgaagaggttatgtttgctaatgatgaaagaaacggcctgaaaagagagtttaacgatcgtacgggtaaggtcttaagtgcgctgccctatgtcgatggcgacaaggaaggtacagaagaagcctatgatgaagacggcataaaatacatccgttgttaccacaacgatgaagagctttcagagctatatgcgccgactgacgtcaccaataaggcaaagcagggtgacagcactgcgcaatatcatttaggtaagtacgagtttgaatgcacaaactacgatgcggcgatgaaatggttaactcagtccgcagagcaaaatcatcccggcgcgcttctctttttggcctatgcgtacaacgacggtgatggcgtagcgcaagacagcaaaaaatatctctcctatttattcaaagcggcagagcttggcgaaagtgatgcgcagttagaagtgggatatttaaatcttatcggcgaaggaatgccgaaaaacctgccggaagcctataagtggattaaaaaatccgctgaccagggaaatgctcaggcgcactataaccttggactcatgtacaggaatggtgatggcgttgagaaagacctcaacaaagccaaacttcatcttacagcggcggtaaaaggcggcgtcaaacctgcactggcagccttaaaggaattaacgcctcaaactaagtaa

SEQ ID NO: 53074 - protein, 645 aa, Salmonella enterica subsp. enterica serovar Choleraesuis str
MGLTTEEYINKIRSLRPAILDDRYFYLTVDQCDAGGTPMLTGIELCTEALCGAEYMKRSSDLWLDDELQPTVKRQATTVVHMPLPYDKEKKLWKVTGLYLESSEETGEVMQSKQIAFEGYTNEENFANRQRVSVFKSFYESGNLKSIYHYNAQNKRDGKAETYFDEKDKIAETLTFKDGQPEGEYIVYHENGAVESKRYFAQGKIKDGECPHFYDNGVLKQKHSYLNQKLEGPAFEYFPDGKIKGKYSYSKGTIVGTSTEYYSTGKIRGVYHRNNQGENDGTFEQYSEEGKLLSKATYKNGKQLSAQSWYENGHPKEESSFDSEGRKHGAVKEWFSNGKPASSKMYKHDVLDGDFEKWYENGHRESVYPYKNGMLNGDAKHWNEQGKLTYTTEYKDDKKQGADRRWSERTGKLVEEVMFANDERNGLKREFNDRTGKVLSALPYVDGDKEGTEEAYDEDGIKYIRCYHNDEELSELYAPTDVTNKAKQGDSTAQYHLGKYEFECTNYDAAMKWLTQSAEQNHPGALLFLAYAYNDGDGVAQDSKKYLSYLFKAAELGESDAQLEVGYLNLIGEGMPKNLPEAYKWIKKSADQGNAQAHYNLGLMYRNGDGVEKDLNKAKLHLTAAVKGGVKPALAALKELTPQTK

SEQ ID NO: 53075 - DNA, 759 bp, Xanthomonas campestris pv. campestris str. 8004
  CDS (1)..(759): transl_table=11
atgtctgagccggtgctggacaccgcgcaggtgatcgccgcactgcgcacgcagcccgcgcaggcggtggcgttgctacgcaaggcggccgatcgccaggatgtggccgcacagcttctgctcgcacaactctacgcagaaggccgcggcgtcgcggccgatccgatccaggcgatgctgtggtacgaagtggccgccaatgcagggcacccggaagcgatgaaccagctcgggcgctgccacgaactgggcttcggcacgccctgcaatctggagctggcggcgctgtggtttcgccgcgccgccgcgcatggcctggactggggcatgtacaacctggcccacctgtacgcctccggccgcggcgtcgcgcaggaccacacccaggcgttggcgctgtatcgccgcgctgccgaacacgggcacgccaagtcgatgaatttcgtggcgcgctatctggagcaaggcctggccggcgctgcagatccgcacgccgcccgcgcctggtaccgccgctccgccgaggccggcgatttccgcgggcaagccggttttgcgacggtgctggccgacgacggcgacatcgatcaggccgaagtctggatgcgccgcgccatcgctggcgggcatgccgggttcctgcgccaactcaccccgctgctggccgccgctccacaaccccgcctgcgcgcattgctgagcgaagtgcgtgcgcggcagtcgcctgcgccgcccgccacctccacggcggcggcctga

SEQ ID NO: 53076 - protein, 252 aa, Xanthomonas campestris pv. campestris str. 8004
MSEPVLDTAQVIAALRTQPAQAVALLRKAADRQDVAAQLLLAQLYAEGRGVAADPIQAMLWYEVAANAGHPEAMNQLGRCHELGFGTPCNLELAALWFRRAAAHGLDWGMYNLAHLYASGRGVAQDHTQALALYRRAAEHGHAKSMNFVARYLEQGLAGAADPHAARAWYRRSAEAGDFRGQAGFATVLADDGDIDQAEVWMRRAIAGGHAGFLRQLTPLLAAAPQPRLRALLSEVRARQSPAPPATSTAAA

SEQ ID NO: 53077 - DNA, 660 bp, Haemophilus influenzae 86-028NP
  CDS (1)..(660): transl_table=11
atgaaactcacaaaaacacttcttaccaccgcacttttcggtgcttctattttttcttttcaatccaccgcttgggcggatacgccggaacagcaattccaacaaggtttaaccgcttatgagcaaagcaactatcaaaccgcctttaaactttggttacctctggcggagcagggagatgcacaggctcaaggtggtttgggcatgatgtatgaaagaggacttggcgtaaaacaagatgatttcaaagcagtgaactggtatcgcaaagcggcggagcagggggatgcagatgctcaattaaatttgggtgcgatgtatgcaatcggacgtggcgtaaaacaagatggtgttgaagcggtgaagtggtttcgcaaagcggcagagcagggaaatgcaaaggctcaaaatggtttgggcatgatgtatgacggaggacttggcataaaacaagattatttcaaagcggtgaaatggcatcgcaaagcggcggagcagggatatggaggtgctcaagttatgttgggattctcatatctttcgggaaaaggtgttcaagtaaataaatctttagccaaagaatggtttggtaaggcttgtgataatggtgaacaagtgggttgtgaatattatggcaagctaaatagaggggaacgctaa

SEQ ID NO: 53078 - protein, 219 aa, Haemophilus influenzae 86-028NP
MKLTKTLLTTALFGASIFSFQSTAWADTPEQQFQQGLTAYEQSNYQTAFKLWLPLAEQGDAQAQGGLGMMYERGLGVKQDDFKAVNWYRKAAEQGDADAQLNLGAMYAIGRGVKQDGVEAVKWFRKAAEQGNAKAQNGLGMMYDGGLGIKQDYFKAVKWHRKAAEQGYGGAQVMLGFSYLSGKGVQVNKSLAKEWFGKACDNGEQVGCEYYGKLNRGER

SEQ ID NO: 53079 - DNA, 555 bp, Haemophilus influenzae 86-028NP
  CDS (1)..(555): transl_table=11
atgaaactcacaaaaacacttcttaccaccgcacttttcggtgcttctgtattttcttttcaatccaccgcttgggcggatacgctggaacagcaattccaacaaggtttaaccgcttatgagcaaagcaactatcaaaccgcctttaaactttggttacctatggcagagcagggatatgcaaaggctcaatttaatttgggcgtgatgtatgctaaggggcaaggcgtcaaacaagatgattttgaagcggtgaagtggtttcgcaaagcggcggagcagggatatgcagaggctaaatttaatttgggccatatgtattctaagggacgaggcgtcaaacaagatgattttgaagcagtgaactggtatcgcaaagcggcggagcagggagatgcagatgctcaagctatattgggattcttatatcttttaggagaaagaggtgttcaagtaaataaatctttagccaaagaatggtttggtaaggcttgtgataatggtaatcaaaatggctgcgaatattatggcaagctaaatagaggggagctctaa

SEQ ID NO: 53080 - protein, 184 aa, Haemophilus influenzae 86-028NP
MKLTKTLLTTALFGASVFSFQSTAWADTLEQQFQQGLTAYEQSNYQTAFKLWLPMAEQGYAKAQFNLGVMYAKGQGVKQDDFEAVKWFRKAAEQGYAEAKFNLGHMYSKGRGVKQDDFEAVNWYRKAAEQGDADAQAILGFLYLLGERGVQVNKSLAKEWFGKACDNGNQNGCEYYGKLNRGEL

SEQ ID NO: 53081 - DNA, 552 bp, Haemophilus influenzae 86-028NP
  CDS (1)..(552): transl_table=11
atgaaactcacaaaaacacttcttaccaccgcacttttaggtgcttctgtattttcttttcaatccaccgcttgggcggatacgctggaacagcaattccaacaaggtttaaccgcttatgagcaaagcaactatcaaaccgcctttaaactttggttacctctggcggagcagggagatgcaaatgttcaatttaatttgggcgtgatgtatgctgaggggcaaggcgtcaaacaagatgattttgaagcggtgaaatggtatcgcaaagcggcggagcagggagatgcaaatgctcaggcttatttaggtttggcttatactgaagggcgtggtgtaagacaagattataccgaagcggtgaagtggtttcgcaaagcggcggagcagggacatgcaaatgctcaagctatattgggattctcatatcttttaggaaaaggtgttcaagtaaataaatctttagctaaagaatggtttggtaaggcttgtgataatggtgatcaaggtggttgcaaatattatggcaagctaaatagaggggaacgctaa

SEQ ID NO: 53082 - protein, 183 aa, Haemophilus influenzae 86-028NP
MKLTKTLLTTALLGASVFSFQSTAWADTLEQQFQQGLTAYEQSNYQTAFKLWLPLAEQGDANVQFNLGVMYAEGQGVKQDDFEAVKWYRKAAEQGDANAQAYLGLAYTEGRGVRQDYTEAVKWFRKAAEQGHANAQAILGFSYLLGKGVQVNKSLAKEWFGKACDNGDQGGCKYYGKLNRGER

SEQ ID NO: 53083 - DNA, 918 bp, Psychrobacter arcticum 273-4
  CDS (1)..(918): transl_table=11
atgcccctgaaactactaaagcgtaagttggattctttaaaaaatccttcatatactgcacaacgtttaaatccgacaactaaattgtatcaaaaagcagcgcataacggtgatgctgaagcccagtttaaccttggattaacttacaaagacggtcaagatgttcagcaagataatagtatggcagttaaatggtatcaaaaggcagcagagcagggccatattgcttctcagtttaaccttgggtcgctgtaccgagacggcaaaggtgtccagcaggacttttctttagcagctgaatggtatcaaaaggcagcagagcagggccatattgcttctcagtttaaccttgggtcgctgtaccgagacggcaaaggtgtccagcaggacttttctttagcagctgaatggtatcaaaaggcagcagagcagggccatattgcttctcagtttaaccttgggtcgctgtaccaagatggcaaaggtatccagcaggactttgctttagcagttaaatggtatcaaaaggcagcagagcaaggccatattgcttctcagtttaaccttgggtcgctgtaccaagagggtaaagatgtccagcaagattttgctttagcagctaaatggtatcaaaaggcagcggagcagggccatattgcttctcagtttaaccttgggtcgctgtaccaagagggcaaagatgtccagcaagattttgctttagcagctaaatggtatcaaaaggcagcggagcagggccatattgcttctcagtttaaccttgggtcgctgtaccaagagggcaaaggtttgcgtcaagataagaatcaagcaaaagaatggttcggtaaagcttgtgataacggggatcaagctggctgtgataattatcgaatattaaatgaactaggatattaa

SEQ ID NO: 53084 - protein, 305 aa, Psychrobacter arcticum 273-4
MPLKLLKRKLDSLKNPSYTAQRLNPTTKLYQKAAHNGDAEAQFNLGLTYKDGQDVQQDNSMAVKWYQKAAEQGHIASQFNLGSLYRDGKGVQQDFSLAAEWYQKAAEQGHIASQFNLGSLYRDGKGVQQDFSLAAEWYQKAAEQGHIASQFNLGSLYQDGKGIQQDFALAVKWYQKAAEQGHIASQFNLGSLYQEGKDVQQDFALAAKWYQKAAEQGHIASQFNLGSLYQEGKDVQQDFALAAKWYQKAAEQGHIASQFNLGSLYQEGKGLRQDKNQAKEWFGKACDNGDQAGCDNYRILNELGY

SEQ ID NO: 53085 - DNA, 741 bp, Colwellia psychrerythraea 34H
  CDS (1)..(741): transl_table=11
atgcgtactaaaatattactgcttaccttcacactgctaagcagtttttcagtattgagccaaggtaatgaccttgagcagggaatgtatgaattaaaccgaggggaatttaaagcggctatcgagcagtttcgtccactggttaatgaaggttatgctccagcccaatatcaaatggccttggtatatcttcacggttattctgttcgtaaagatagtatgaaagcactggagttatttgaactttctgctgcacaaaactacccagatgcacaatttgaactggccttaatttattcagacggtaagttagtaaaacaaaaccttaaaaaagcgtttgagcttactcataaagcggcaaacaaagacttacctagtgcgcaatttaatttggcagtaatgtatgctaacggtacggggattaaacaagatgattttaaagcatcgcgttggtatcagcgtgctgcaaatcaaaattatgccctagctcaatttaatttggcgttactttatagtgaaggtaaaggtgtagagaaaagtactgaactgtcctatgtctggaataccatagcatcatggaacggctaccctaatgctgaaaaaagtcgtttaatggatgaaagagatttatctaagcttaaaattgaaaaaagtatcgaaaaagcgaatgatatctatcaaaaaataagagatcagcaggaaatgaaagcaaaaatggcagaaaagcagaacttctattga

SEQ ID NO: 53086 - protein, 246 aa, Colwellia psychrerythraea 34H
MRTKILLLTFTLLSSFSVLSQGNDLEQGMYELNRGEFKAAIEQFRPLVNEGYAPAQYQMALVYLHGYSVRKDSMKALELFELSAAQNYPDAQFELALIYSDGKLVKQNLKKAFELTHKAANKDLPSAQFNLAVMYANGTGIKQDDFKASRWYQRAANQNYALAQFNLALLYSEGKGVEKSTELSYVWNTIASWNGYPNAEKSRLMDERDLSKLKIEKSIEKANDIYQKIRDQQEMKAKMAEKQNFY

SEQ ID NO: 53087 - DNA, 708 bp, Colwellia psychrerythraea 34H
  CDS (1)..(708): transl_table=11
gtgcgtttattcccccactttttatttctacttgtatcgttttcttcaattgcaaatgatgattttgacaaaggaaaagaagcatataaaaataataattacccccaagctattactctctttaataaagctgctggccaagggagtgcaaaggctcaaagctatcttggttatatgtatacgaaaggaaaaggagtcaaacaagattacaccaaagccgttgactggtatcgaaaagccgctgaacaaggtaatgctagggatcaatatagcctagccatcatttatgaaaaagggagaggagttgctcaggattataaccaagctattgagtggcacactaaggcagccgaacaaggcaatcctagatctcaatatcaccttgcgcttatatattataatggtaaaggtgttacacaagattataaacaagcgttaaaatggtattccaaagccgctgaagacggtaatgcaggggttcagtatagtcttggagtaatgtatgaaaatgggcagggagttgctcaggattacaagcaagcatttgattggtacagcaaagcagcagaacaaggtgatgcaaaggctcagtataaccttggacttttgtatgccgatggcaaaggtattacagcggataaagaaaaggccattctctggtctaaaaaagcggaagaacaaggctattcaggcaagtcattaccgtga

SEQ ID NO: 53088 - protein, 235 aa, Colwellia psychrerythraea 34H
MRLFPHFLFLLVSFSSIANDDFDKGKEAYKNNNYPQAITLFNKAAGQGSAKAQSYLGYMYTKGKGVKQDYTKAVDWYRKAAEQGNARDQYSLAIIYEKGRGVAQDYNQAIEWHTKAAEQGNPRSQYHLALIYYNGKGVTQDYKQALKWYSKAAEDGNAGVQYSLGVMYENGQGVAQDYKQAFDWYSKAAEQGDAKAQYNLGLLYADGKGITADKEKAILWSKKAEEQGYSGKSLP

SEQ ID NO: 53089 - DNA, 750 bp, Ralstonia eutropha JMP134
  CDS (1)..(750): transl_table=11
atgcctcaagcccgccccccgctctggcccgccgcggcagccggcctggcctgtcgccgtccgttggccatcgccacgctggccttggcgctggcgctttgtcctgacccgctgattcacgcggcgcctgcccccgctcagccggcccaggcgcagacacgcgaggcactcgccgcctatgaggccggcgcgttcgataccgcactgcgcggcttcgccgccgccgcacgggaaggcaaccggctggcccagttcaactacgcgatgatgctgctgcgcggcgagggcacgcccgtcaagccgcaggaagcgctggtctggctgcgcaaggccgctgacaaccagatgacacatgcgcagttcacctttggtgacctgtacgagcgcggcgagttggtgccgcgctcgctcgaagaggccaaccgctggtatgaacgcgccgcgcagggcggccacattcaagcgcaggtggcgctggcgaccaactacttcaccggccgcggggtgccgcgagactatgccaaggccttcgagtggtacaaccgtgccgccgcggcgggcgacggtggtgcacagtacatcgttggcagttactacgaacgcggcgagcctggcgtggtcggcaaggacatcgaacaggccaagatctggtatgcgcgctcggcggcgcatggcgatccgggcgcgctggccaagctgcgttcgctgctggaggaatccgtacgcgcgaaggccggcagctcgatgtaa

SEQ ID NO: 53090 - protein, 249 aa, Ralstonia eutropha JMP134
MPQARPPLWPAAAAGLACRRPLAIATLALALALCPDPLIHAAPAPAQPAQAQTREALAAYEAGAFDTALRGFAAAAREGNRLAQFNYAMMLLRGEGTPVKPQEALVWLRKAADNQMTHAQFTFGDLYERGELVPRSLEEANRWYERAAQGGHIQAQVALATNYFTGRGVPRDYAKAFEWYNRAAAAGDGGAQYIVGSYYERGEPGVVGKDIEQAKIWYARSAAHGDPGALAKLRSLLEESVRAKAGSSM

SEQ ID NO: 53091 - DNA, 1047 bp, Haemophilus influenzae R2846
  CDS (1)..(1047)
ttgcttcttttcattctatctattgcctgggcggatacgctggaacagcaattccaacaaggtcttgaagctacaaaaaggggcgattatcaaaccgcctttaaactttggttacctctggcggagcagggaaatgcaagtattcaatttaatttgggcttgatgtataaaaaaggacaaggcatcaaacaagatgattttgaagcggtgaaatggtatcgcaaagcggcggagcagggagttgcagatgctcaattaaatttgggcaatatgtatgctaagggactaggcgtcaaacaagatgatgttgaagcggtgaaatggtatcgccaagcagcggagcagggaaatgcaaaggctcaatttaatttgggcttgatgtatgataatggacgaggcgtcaaacaagattattttgaagcagtgaaatggtttcgcaaagcggcggagcagggatatgcggatgctcaatttaatttgggcaatatgtattacaacgggcatggagtaaaacaagatgattttgaagcggtgaaatggtatcgcaaagcggcggagcagggatatgcggatgctcaatttaatttgggcaatatgtattacaacgggcatggagtaaaacaagatgattttgaagcggtgaaatggtatcgcaaagcggcggagcaaggacatgcaaaggctcaatataatttgggtaatatgtatgccaatggacgtggcgtaaaacaagattattttgaagcggtgaaatggtatcgcaaagcggcggagcagggatatgcagatgctcaggctaatttaggttcggcttatagtgcagggcatggcgtaagacaagattatatcgaagccgtgaagtggtttaagaaagcagcagaaaatggtagtgctgatggtcagtttaagttaggtctggtgtatcttattggacaaggtattcaaaaagatagaacactcgccaaagaatggcttggtaaggcttgtgataatggtaatcaaaatggctgcgaatattatggcgagctaaatagaggggaacgctaa

SEQ ID NO: 53092 - protein, 348 aa, Haemophilus influenzae R2846
MLLFILSIAWADTLEQQFQQGLEATKRGDYQTAFKLWLPLAEQGNASIQFNLGLMYKKGQGIKQDDFEAVKWYRKAAEQGVADAQLNLGNMYAKGLGVKQDDVEAVKWYRQAAEQGNAKAQFNLGLMYDNGRGVKQDYFEAVKWFRKAAEQGYADAQFNLGNMYYNGHGVKQDDFEAVKWYRKAAEQGYADAQFNLGNMYYNGHGVKQDDFEAVKWYRKAAEQGHAKAQYNLGNMYANGRGVKQDYFEAVKWYRKAAEQGYADAQANLGSAYSAGHGVRQDYIEAVKWFKKAAENGSADGQFKLGLVYLIGQGIQKDRTLAKEWLGKACDNGNQNGCEYYGELNRGER

SEQ ID NO: 53093 - DNA, 1026 bp, Chlorobium limicola DSM 245
  CDS (1)..(1026): transl_table=11
atgaaacgttatatcatcggattacttgcagcttgtatgctgatgcagccagccggagctcgttgtgaaattcccttgctggacaatatttctcagttgcagaaagaggctcaacagggaaatgcagtagcacagaacaagcttggactgctgtactacactggtcagggggtcaagcgggactatgtcgaagcgctgcgatggtatcgtatggctgccgagcaacaacgcgcatgggcgcaagtcagtcttggcgtaatgtactacactggtcagggagttaagcaggaccatgcggaagcggcaacctggtttcgcaaggctgccgagcaagggcttccaaagggggaatactatctgggagtagtatatgaaaaaggtcagggagtaaagcaggaccatgcagaagcggcaacctggtttcgaagggctgccgggcagggtcttgcagaggctcagaacaagctgggccttatgtactactcaggtcaaggcgttaaacaggactatgtggaagcggcaacctggtttcgaaaggctgcagttcaggaattcgcactggcacaaaacagccttggcgtcatgtactacactggtcagggagtaaagcaggaccatgcggaagcggcaacctggtttcgaaaggctgccgggcacggcctttctgtagcagaaaacaagctgggccttatgtactataccggccaaagtgttaaacaggactatacagaagccgcaggatggtttcgtaaagctgcagttaaaggactcgcagaagcgcaattaaatatcgggatgcagtactacgcaggacaaggagtaaatcaggactatacagaagctgcaggttggtatcgtaaggctgccgagcagggtcttgcagaggcacagtataatttaggagcagtttacctgaatgggagtggcataacgaaggacgaacaaaaagcaagagaatggtataaaaaagcctgtaacaatggatatcgaccagcttgcgatgactacctgaagattaacgagtga

SEQ ID NO: 53094 - protein, 341 aa, Chlorobium limicola DSM 245
MKRYIIGLLAACMLMQPAGARCEIPLLDNISQLQKEAQQGNAVAQNKLGLLYYTGQGVKRDYVEALRWYRMAAEQQRAWAQVSLGVMYYTGQGVKQDHAEAATWFRKAAEQGLPKGEYYLGVVYEKGQGVKQDHAEAATWFRRAAGQGLAEAQNKLGLMYYSGQGVKQDYVEAATWFRKAAVQEFALAQNSLGVMYYTGQGVKQDHAEAATWFRKAAGHGLSVAENKLGLMYYTGQSVKQDYTEAAGWFRKAAVKGLAEAQLNIGMQYYAGQGVNQDYTEAAGWYRKAAEQGLAEAQYNLGAVYLNGSGITKDEQKAREWYKKACNNGYRPACDDYLKINE

SEQ ID NO: 53095 - DNA, 2496 bp, Magnetococcus sp. MC-1
  CDS (1)..(2496): transl_table=11
atgaaaatccattgggcaaaagggttgggttttggcatattgcttgtgttggcgggtgggctatttgcgtggaattttttcttatcccatccaccaagggccaaaacagctgcccaacgagctgtggctgagatttttgcgccgatttaccgtgaaccgaggtgggatcacgtacggaccatcggattgcagccaaaatttacgggttgtgagacggtggacgaacaccattataagacggcattggtgccgatggctggtcctaaactctcgcttcgcgagcggggcggggatttgcaggccctttttgcggatgaagccatgattcgccgtctgtttaatcatgaagtaacatccgaaaagtcggcgcataccctaataaaaatagagcatgtacaagcgcttttgcttggacaatgtgtggagcagaagctttttttaaaattggtcacaacggcccatggagatattgtggcaaccgttgagatagccctgggagatgcagccgaagccgagcagcgtgccgccgagcaggccagagttaaagaggaggaggagcgcctaacccgtatacgggtcaaagcgcaagaggccgagcagcgtgccgccgagcaggccagagttaaagaggaggaagagcgcctaacccgtatacgggtcaaagcgcaagaggccgagcagcgtgccgagcaggccagagttaaagaggaggaggagcgcctagcccgtatacgggtcaaagcgcaagaggccgagcagcgtgccgccgagcaggccagagttaaagaggaggaagagcgcctaatccgtattcgggtcaaagcgcaagaggccgagcagcgtgccgagcaggcgcgtgaacatgcgaaggatgccgctaagatagccctgggggatgccgccaagctggccaatccctctgttcaattcaatcttggcgttatgtatgacaaaggacagggcgtcacgaaagacgccaaagaggcggtgaagtggtttaggaaatctgctgaacaggggtatgcccaagctcaacacaatcttggcgttatgtatgacaaaggagagggcgtcacgaaagacgccaaagaggcggtgaagtggtttaggaaatctgctgaacaggggcatgcccaagctcaacacaatcttggcgttatgtatgacaaaggacagggcgtcacgaaagacgccaaagaggcggtgaagtggtttaggaaatctgctgaacaggggcatgcccaagctcaacacaatcttggcgttatgtataacaatggagagggcgtcacgaaagacgccaaagaggcggtgaagtggtatcggaaagcggctgaacaggggcatgcccgagctcaaaacaatcttggcgttatgtataacaatggagagggcgtcacgaaagacgccaaagaggcggtgaagtggtatcggaaagcggctgaacaggggcaagctgaagctcaaaacgatcttggcgttatgtatgacaaaggagagggcgtcacgaaagacgccaaagaggcggtgaagtggtatcggaaagcggctgaacaggggcatgcccgagctcaaaacaatcttggcgttatgtataacaatggagagggcgtcacgaaagacgccaaagaggcggtgaagtggtatcggaaagcggctgaacaggggcaagctgaagctcaacacaatcttggctttatgtatgacaaaggagagggcgtcacgaaagacgccaaagaggcggtgaagtggtatcggaaagcggctgaacaggggcaagctaaagctcaacacaatcttggcgttatgtataacaatggagagggcgtcacgaaagacgccaaagaggcggtgaagtggtttaggaaatctgctgaacagggggaagctaaagctcaacacaatcttggcgttatgtataacaatggagagggcgtcacgaaagacgccaaagaggcggtgaagtggtttaggaaatctgctgaacagggggaagctgaagctcaaaacaatcttggctttatgtatgacaatggagagggcgtcacgaaagacgccaaagaggcggtgaagtggcttaggaaagcggctgaacaggggcacgctaacgctcaagcctttcttggacaaagctatgatgtaggatatggagtcacgaaagacgccaaagaggcggtgaagtggtataggaaatctgctgaacaggggcaagctgaagctcaaaacaatcttggcgttatgtatgacaaaggacagggcgtcacgaaagacgccaaagaggcggtgaagtggtatcggaaagctgctgaacagggagatgctcgagctcaattcaatcttggagataagtatgacaaaggagagggcgtcacgaaagacgccaaagaggcggtgaagtggtatcggaaagcggctgaacagggcttaacggaagcaagtaccaggctgaagcggctacgctttaacgttgttggacacgaaaatgagggaaaatga

SEQ ID NO: 53096 - protein, 831 aa, Magnetococcus sp. MC-1
MKIHWAKGLGFGILLVLAGGLFAWNFFLSHPPRAKTAAQRAVAEIFAPIYREPRWDHVRTIGLQPKFTGCETVDEHHYKTALVPMAGPKLSLRERGGDLQALFADEAMIRRLFNHEVTSEKSAHTLIKIEHVQALLLGQCVEQKLFLKLVTTAHGDIVATVEIALGDAAEAEQRAAEQARVKEEEERLTRIRVKAQEAEQRAAEQARVKEEEERLTRIRVKAQEAEQRAEQARVKEEEERLARIRVKAQEAEQRAAEQARVKEEEERLIRIRVKAQEAEQRAEQAREHAKDAAKIALGDAAKLANPSVQFNLGVMYDKGQGVTKDAKEAVKWFRKSAEQGYAQAQHNLGVMYDKGEGVTKDAKEAVKWFRKSAEQGHAQAQHNLGVMYDKGQGVTKDAKEAVKWFRKSAEQGHAQAQHNLGVMYNNGEGVTKDAKEAVKWYRKAAEQGHARAQNNLGVMYNNGEGVTKDAKEAVKWYRKAAEQGQAEAQNDLGVMYDKGEGVTKDAKEAVKWYRKAAEQGHARAQNNLGVMYNNGEGVTKDAKEAVKWYRKAAEQGQAEAQHNLGFMYDKGEGVTKDAKEAVKWYRKAAEQGQAKAQHNLGVMYNNGEGVTKDAKEAVKWFRKSAEQGEAKAQHNLGVMYNNGEGVTKDAKEAVKWFRKSAEQGEAEAQNNLGFMYDNGEGVTKDAKEAVKWLRKAAEQGHANAQAFLGQSYDVGYGVTKDAKEAVKWYRKSAEQGQAEAQNNLGVMYDKGQGVTKDAKEAVKWYRKAAEQGDARAQFNLGDKYDKGEGVTKDAKEAVKWYRKAAEQGLTEASTRLKRLRFNVVGHENEGK

SEQ ID NO: 53097 - DNA, 2931 bp, Magnetococcus sp. MC-1
  CDS (1)..(2931): transl_table=11
atggtaaaatgtagacacagcagggtaggtgtgagcagacgcgctgccctgtttttagcgctcatcgtggtgatgtcgtccggcctatctgctggcttggcagcgcccaatctggccgaggatgttctgttggctggcccgcagcgtaccgcgttgtggcctcatggggtcgcgcttccaacagaccgtgggagcctgttacaactggccaatcaaggctaccgtcgagcccagttttttatggggctttatctggattatggtatcggcggagaggctcaaccttttgaggcctttcaatggtatagccgcgcagcggggcagggcagtcgttgggcttggattaaattgggtgatctctatttccgtggccgtggcaccgcacgggatgccaaaaaagcgctgcaatggtacctgcatgccggggaaaatggcgagcctagtggctatctggctgccgcaatggtacagattcgtggtacgggcgatagcattgattggccaaccgttttacagcgtgtgcacaaggctgtgcaagcgggggtattggaggggcacacagcactctgtctcttaggggtgcgacatgtggtggcgacgcagctacccccagagcagacccgccaacagtgccaaatgagtgcggatggggggcagccctttgccgcgattttgatggcccaatggctggctgagcagcataacgagaacaatccccaactgcaaaaacaggtcgaacagtggtacgagcgggctgctgccatggaggtaggtaacttggccgttctgcccgaggcaccactggtgatggccgagcatttccccgttgtttggatagaggctctagaaccactggtcagtgccaaccgcgccagcgtgccgcgtgcggcctatcgtgctggggtggcgctgctcaagtcggggcagggttttgtggcgcgtagtcgcggcgtgcgctggttacagaagggcgcggagttgggcgatgccaatgctcaatttagactggggcttgcctatgcccagggtgaaggggtggtggttaatccagaacgcgccatttactggtatacccttgcgtcggagcagggtgaagtttcggcacagtttaatttggccttgctctactaccaagggcgtttggttgagcaggattttaccaaggcccgtttttggtttgagcatgcctcggaacagggtgacgtgcaggcgcgggatcatctgggggatatttatcgtcatggccggggcataccggtcaatatagccgaggccatgaagtggtaccgccacgctgccgagcagaaaaatgtctacgcgcttacctcaatgggggatatctaccaagcgggtgagggggttgccgaggatgccgcagaggccgcaaaatggtaccgcaaagcggcgctgctgggtcatgccccggcgcagggtaacttggccgacctttatcgacagggtaaaggggtagaaaaggatcttaatcaggccgcacagtggtatacaaaagctgctgaacagggggacatggtctctcaaaactggctgggcacgctctacctggatggggacggtgttgaaaaaaatccccagttggcgcagcaatggtacgaaaaatcagcggctcaagggtacgcttttgcccagaacaatttggcggttatgttgcgggatggcttggcgggcaaggctgattataagcgagccagacagctctttttgttagctgctcggcaaaacagtggtgatgcgcaaaatagtcttggcgtgctttatgaaaaggggttagggggcgaaaccgatcccattgaggctgctgcgtggtatcgtaaggccatccaatatggcaatgacagtgcccgttataaccttggcatgctctattatgccaaccgtcaatttggtagtatagaagaggccctgcggctgttgcaagatgcccaaagtgccggggtagcccaggctcaaaccgcactggctcggatctatcttagtaaagaaaacagccactataatcctgagttgggcgagcgctttttgcgtgaagccgcagaacagggtggggcggatgcacaggctttattaggggttttattaacctttaaaacccctcttaaacaggattatgagcaggctctaaggtggttaaaaaagggtgctgaaggggggagtccggaggcgcagtttcacttgggctatatgttacatttgggggtagggctggcccccaatgctcaccgtgcggtgcattggtaccgcaaagccgcagaacagggctttgctgaagcggccaacaatttggggaccctctatttccagggtaatggggttgatcgagacgtttttaaagcggtggaatggtacacgcgcggtgccaaacttggccatgtgcccgccttacataacttgggcaaccactaccgccatgggttgggggtggccgtcgatgcccgactggcaaggcactattttgaaaaagcgcaggccgccggctttatgccgtctaaattagccctcggtgagatgctggagaagggtgaaggcggggtggcctcccttaaacgggcagaagggctgtttggtgaggtggcccggtcgggcaatatggatggtaaataccggcttgcccgactctacttaacccatggcccagagggtaaacaagtttatgccatgcgtctgctccaacagacggctaaattggggcatcccgcagcgcagtatggtttagcggccctctacctaaaagaggccgatcttgaagccccgttgacggatcgggttaaacaggcttattcactgctgttggccagccgccacggcggtatgagcgaagccgaatccctgctagagcggctggaaaaacatttgcctgaaggcgtgcgtcaagaactacagcacgcttttgaaaaaacgaaggcaaagctgtag

SEQ ID NO: 53098 - protein, 976 aa, Magnetococcus sp. MC-1
MVKCRHSRVGVSRRAALFLALIVVMSSGLSAGLAAPNLAEDVLLAGPQRTALWPHGVALPTDRGSLLQLANQGYRRAQFFMGLYLDYGIGGEAQPFEAFQWYSRAAGQGSRWAWIKLGDLYFRGRGTARDAKKALQWYLHAGENGEPSGYLAAAMVQIRGTGDSIDWPTVLQRVHKAVQAGVLEGHTALCLLGVRHVVATQLPPEQTRQQCQMSADGGQPFAAILMAQWLAEQHNENNPQLQKQVEQWYERAAAMEVGNLAVLPEAPLVMAEHFPVVWIEALEPLVSANRASVPRAAYRAGVALLKSGQGFVARSRGVRWLQKGAELGDANAQFRLGLAYAQGEGVVVNPERAIYWYTLASEQGEVSAQFNLALLYYQGRLVEQDFTKARFWFEHASEQGDVQARDHLGDIYRHGRGIPVNIAEAMKWYRHAAEQKNVYALTSMGDIYQAGEGVAEDAAEAAKWYRKAALLGHAPAQGNLADLYRQGKGVEKDLNQAAQWYTKAAEQGDMVSQNWLGTLYLDGDGVEKNPQLAQQWYEKSAAQGYAFAQNNLAVMLRDGLAGKADYKRARQLFLLAARQNSGDAQNSLGVLYEKGLGGETDPIEAAAWYRKAIQYGNDSARYNLGMLYYANRQFGSIEEALRLLQDAQSAGVAQAQTALARIYLSKENSHYNPELGERFLREAAEQGGADAQALLGVLLTFKTPLKQDYEQALRWLKKGAEGGSPEAQFHLGYMLHLGVGLAPNAHRAVHWYRKAAEQGFAEAANNLGTLYFQGNGVDRDVFKAVEWYTRGAKLGHVPALHNLGNHYRHGLGVAVDARLARHYFEKAQAAGFMPSKLALGEMLEKGEGGVASLKRAEGLFGEVARSGNMDGKYRLARLYLTHGPEGKQVYAMRLLQQTAKLGHPAAQYGLAALYLKEADLEAPLTDRVKQAYSLLLASRHGGMSEAESLLERLEKHLPEGVRQELQHAFEKTKAKL

SEQ ID NO: 53099 - DNA, 912 bp, Thiomicrospira denitrificans ATCC 33889
  CDS (1)..(912): transl_table=11
atgaaaaaagcactaccttttttaacgctctttttttttgcattcacacaactatttgcagatataaactcaaccaagacatttgataaatacctaagagaagcaaaggatggaaactcttctgccatgtttaatgtaggtcttagctactttaacggagttggtgtcgaaaagaaccataataaggcttttgagtggtataacagagcttcagataaaggaaatttagaggcactaaacaaccttggtacaatgtatgacaatggagatgcaactcttcaaaacagctctttggcacaaaaatattatgagatggcagctaatgctggacttgctactgcacagctaaatttaggtctattttttgagaaaaacccaactagtgaaaatatgaaaaaagcagcctcttggtatgaaaaagcagcgctacaaggaaatagtatcgcacaaaacaatcttgctaaattatattactttggcaatggtatcggttacaacttggagagagctttttactggtttcaagaagcagcatggcaagatgacccaatagcacagtacaatctctccatgatgtactataaagcagaacacacgccttatgacgcttctaaaacactattttggcttgagcgatcagctaaaaatggaagccaacatgcacagacaaagctgggtgatttctatacagaggggttgattgtaaaaaaaaatttagaaattgcttttgagtggtacatgagagcagctcttaaaaattatcaaaaagcgctctatcaagttggggtattttacttttatggacatggagtaaataaaaattccataaaagcaaaagagtggctggaaaaagcctcagaatcaggctatgaagatgccactttatttatgcagaggaacaagcttagataa

SEQ ID NO: 53100 - protein, 303 aa, Thiomicrospira denitrificans ATCC 33889
MKKALPFLTLFFFAFTQLFADINSTKTFDKYLREAKDGNSSAMFNVGLSYFNGVGVEKNHNKAFEWYNRASDKGNLEALNNLGTMYDNGDATLQNSSLAQKYYEMAANAGLATAQLNLGLFFEKNPTSENMKKAASWYEKAALQGNSIAQNNLAKLYYFGNGIGYNLERAFYWFQEAAWQDDPIAQYNLSMMYYKAEHTPYDASKTLFWLERSAKNGSQHAQTKLGDFYTEGLIVKKNLEIAFEWYMRAALKNYQKALYQVGVFYFYGHGVNKNSIKAKEWLEKASESGYEDATLFMQRNKLR

SEQ ID NO: 53101 - DNA, 795 bp, Psychrobacter cryohalolentis K5
  CDS (1)..(795): transl_table=11
atgcttatctggtttgtagtcggagcgatagccttatctgtaatagcatttaaatattatggaagaaacagagaatctgatagttttaagcttatggagagattagctagccaaggggatgcgcgagctcaaataaatcttgccatgatgtattacggtggtacaggcgtacgtcaagatcttcctaaagctattcaatgggcagaaaaaccagctcggcaaggtaatgctgaggctctatttgttatgggtatgatgcatactcaaaagaatgatactaaggcttttgagttttacctacaatcagctaatcagggctatcctagtgctcagaacatggttggcctttcatacaaggaaggaagaggtgtacaacaagactataccaaggcatttgaatggatacaaaaagcagctaatcagggctatcctagtgctcaatacgagcttagtctaatgtatgagaaaggcataggcgtaaaacaggataacgctaaagcgtttgagtggtatctaaaatcagctaaccaaggtaatgcgcaagctcaaagcaatcttggtgctatgtatgatcaaggcataggcgtacaacaagactatgccaaggcatttgaatggtatacaagatcagctagccaaggtgatgcgcgagctcaatttaatcttggtaggatgtatcattttggcaaaggtgtacaacaagatgatgctaaggcacgtgattggctgggtaagtcttgcaaaaacgggtttcaagatgcttgcaccatttatcgattattacctaaaagatag

SEQ ID NO: 53102 - protein, 264 aa, Psychrobacter cryohalolentis K5
MLIWFVVGAIALSVIAFKYYGRNRESDSFKLMERLASQGDARAQINLAMMYYGGTGVRQDLPKAIQWAEKPARQGNAEALFVMGMMHTQKNDTKAFEFYLQSANQGYPSAQNMVGLSYKEGRGVQQDYTKAFEWIQKAANQGYPSAQYELSLMYEKGIGVKQDNAKAFEWYLKSANQGNAQAQSNLGAMYDQGIGVQQDYAKAFEWYTRSASQGDARAQFNLGRMYHFGKGVQQDDAKARDWLGKSCKNGFQDACTIYRLLPKR

SEQ ID NO: 53103 - DNA, 1512 bp, Prosthecochloris vibrioformis DSM 265
  CDS (1)..(1512): transl_table=11
atggcttatatgggtgacatggtgcgcccgatatgtcgggatggcgcaacgctggattatgtcgctgccgctaaggcgtacggatctcgttgtgatgcaatcggatccattccaagaggtggagtcctggtttttctggcagtcatgcttgtgttggctgttgcccccatgcggtcagcccgggggggtgagcagcccgtcaagatgcggctgatattcccgccttcagatgccgataagaaggacctggcgttgcttcagaaagaagctgacggagggaatccaaaagcgcaatttcttcttggaatgaggtacagcgaaggggttggcgtgtcgcagagcggcactgaggcgatgaaatggtaccggcgtgcggcggatcgggggtatgcccgggcgcagttcaatctgggggtgatgtgcgaccgaggacgaggtgttccggtagattatgccgaggccgccaaatggtaccggcttgccgccgggcaggaagtggctgcagcacagcataacatttcagtgctgtacgatgagggtaaaggtgtccgacgggacagcacggaggccctgaaatggcggaggcttgctgcggagcagggcatcgtcgaggcgcagtacctgcttgcccatgcatacaggtacggcgggggcgtactccgggacgacagggaggcggcgaaatggttcaagctggctgccgcgcaggggaatgcttatgcacagtttgagctggccgtgatgtatgactacggggagggagtgccgcaggacaagtttgaggcggtggagtggtacggtcgtgcggccgaacagggggtcccggaagcgcagaacagtcttgccgtgatgtacgatgagggcgaagggctcaccaggaataaggaggagtcgctctactggtgccggctcgccgccgagcagggggactccgttgcgcagaacaacctcgggtgggcataccgggaaggcgatggcgtggcaaaggattatgccgaggccgtgaaatggctgcgcctggccgccgggcagggcgtaacgattgcccagaacaatctcggcttgatgtacctcgagggccagggcgtgaagcgggatgagccagaggcgctcaggctgttccgccttgccgccgccgagggaaatggttatgcctgctgcaacatcggggagatgtatgtgaagggccaggttgtggagcagaattatgaagaggccatgaagtggttccgtctggctgccgagaaggatggcaatgatgccgcgtactggataggctggctctatgaagaggggaagggggtactggcggatcccgatgaagcagcaaaatggtatcgaatcgctgaagggcgtaaagatcccaatggcctgttatcaatcggggagatgtatgagaaaggactcggggttccgggcagcatatcgaacgccgaaaaatggtacaggaaggcttgccgtgcgggtgaaaaagatgcatgcgaaaggctgaaacgactggccgggaaatag

SEQ ID NO: 53104 - protein, 503 aa, Prosthecochloris vibrioformis DSM 265
MAYMGDMVRPICRDGATLDYVAAAKAYGSRCDAIGSIPRGGVLVFLAVMLVLAVAPMRSARGGEQPVKMRLIFPPSDADKKDLALLQKEADGGNPKAQFLLGMRYSEGVGVSQSGTEAMKWYRRAADRGYARAQFNLGVMCDRGRGVPVDYAEAAKWYRLAAGQEVAAAQHNISVLYDEGKGVRRDSTEALKWRRLAAEQGIVEAQYLLAHAYRYGGGVLRDDREAAKWFKLAAAQGNAYAQFELAVMYDYGEGVPQDKFEAVEWYGRAAEQGVPEAQNSLAVMYDEGEGLTRNKEESLYWCRLAAEQGDSVAQNNLGWAYREGDGVAKDYAEAVKWLRLAAGQGVTIAQNNLGLMYLEGQGVKRDEPEALRLFRLAAAEGNGYACCNIGEMYVKGQVVEQNYEEAMKWFRLAAEKDGNDAAYWIGWLYEEGKGVLADPDEAAKWYRIAEGRKDPNGLLSIGEMYEKGLGVPGSISNAEKWYRKACRAGEKDACERLKRLAGK

SEQ ID NO: 53105 - DNA, 2064 bp, Candida albicans
  CDS (1)..(2064): transl_table=12
atgccgccacaacaaccaccgggatccaatatgcaactacaatctatatcaccgcgtgatcaagcacaatttaatcaacagaatattcaactgcagagaccaatatctccaagaccaccaaatcaacgtctgaataatctgctgtcgtcacaaagactgtttcaacaaatccaacaacaacagcaacaacagcaccaaaatcaacaacaattctcgccatctataaaatatgcatctgacggttattcaaattctccatattcacctatgggctcaaacaatctttatcaacaagatcaattcaaggcttcaccaacattaaatgcaactccagtcaagtctccaccagttgatgctccatatccagtttatgatgctcctagtccacctccagtatttgcctctaaagaaagtattgtgatttctccaccatcagtgccgttatcagctacatcttcagtaaccaatttgaatttgaatcaagctgatatttatcattctcaatcggaaaacaatttggcggttcatactggtaataaatttggtcataatcgatcggtatcttcaacatcatcatttttctatgatcgtagtgataatgcttcaatgattgatttcaatcaaaatatgattcaactgtatttgggagcaaattccagtcatttattacctagaattaaaacattggaattgtatcggaaaaatgctaaaaaatctaccgatcctaacgttttatttcaatatgctcaatatatgttacaaacagcattattattagaatcagaattacaaaatatggtcaataatggcaatggtaatggcaacggaagtcaaaatggtaatatagcagggattaataatgctacatcttcttcacaatcttctggttcacaaaatggaactaattctccatttaccagatcaattgaaaattcaccaagaaaaggtccattggataatactactactactactactaatggaactaaagataaacataccaagagtaaatctatagatttcaataatattgaattggaaggtaatgaaaagaaattgaaaaaggcattattaaaagaagctgtcaaatatttgaaacgactttctgataaaggttatgttgaagcccaatatttattagctgatgcgtatagttcaggagctttagataaaattgacaataaggaagcatttatattatttcaatcagctgcgaaacatggacatgttgaaagtgcttttagaacttcattttgttatgaagaaggattaggaactggtagagattctagaaaagcggttgaatttttaaaaattgccgcatcaagaaatcatcctgctgccatgtataaattgggagtttattcattttatggtagaatgggtttacctgcaaatgatatgaatacgaaaaaaatgggtattaaatggttaactagggctgctaatgttgccactgaattaactgctgctgcaccttatgaattgggtaaattatattataatggatttgaagatattgtcttgattgataaaaaatatggattagaattatttgctcaagcagcagcattaggtcatttacaatcagccgccattttgggtcatcattatgaaattggagaaattgttcctcaagattctaatttatcaattcattattatactcaagcagcattaggaggtgatccaaattcaatgttggcaatgtgtgcttggtatttagttggtagtgaaccatatttacctaaagatgataatgaagcatttgaatgggctaaacgtgctgccaattgtaatttaccaaaagctcaatttgctttagcaaatttttatgaaaaagggattggatgtattaaaaatattaatgaagctcaatcatggtataaaaaagctgctgaaaatggtgatgaaaaatctttgaaacgattaactgataaagaattggttaaaaccattcaaaaacaatggaaaaagaaacctccagtaattcataatgaagatggaacttctacaactaattcaggatctcttgctcaagaaaaagattgtgttatcatgtaa

SEQ ID NO: 53106 - protein, 687 aa, Candida albicans
MPPQQPPGSNMQLQSISPRDQAQFNQQNIQSQRPISPRPPNQRSNNSSSSQRSFQQIQQQQQQQHQNQQQFSPSIKYASDGYSNSPYSPMGSNNLYQQDQFKASPTLNATPVKSPPVDAPYPVYDAPSPPPVFASKESIVISPPSVPLSATSSVTNLNLNQADIYHSQSENNLAVHTGNKFGHNRSVSSTSSFFYDRSDNASMIDFNQNMIQSYLGANSSHLLPRIKTLELYRKNAKKSTDPNVLFQYAQYMLQTALLLESELQNMVNNGNGNGNGSQNGNIAGINNATSSSQSSGSQNGTNSPFTRSIENSPRKGPLDNTTTTTTNGTKDKHTKSKSIDFNNIELEGNEKKLKKALLKEAVKYLKRLSDKGYVEAQYLLADAYSSGALDKIDNKEAFILFQSAAKHGHVESAFRTSFCYEEGLGTGRDSRKAVEFLKIAASRNHPAAMYKLGVYSFYGRMGLPANDMNTKKMGIKWLTRAANVATELTAAAPYELGKLYYNGFEDIVLIDKKYGLELFAQAAALGHLQSAAILGHHYEIGEIVPQDSNLSIHYYTQAALGGDPNSMLAMCAWYLVGSEPYLPKDDNEAFEWAKRAANCNLPKAQFALANFYEKGIGCIKNINEAQSWYKKAAENGDEKSLKRLTDKELVKTIQKQWKKKPPVIHNEDGTSTTNSGSLAQEKDCVIM

SEQ ID NO: 53107 - DNA, 2058 bp, Caenorhabditis elegans
  CDS (1)..(2058): Xaa of translated CDS can stand for any naturally occuring amino acid which can be translated from respective CDS-codon
atgattaaaacctatctgacactgttgctactagcaacctcggccacgtgtcaaaaaaagtcagcgactctggtatctgcggaaggagaagcgcctgcaataaaagtgataaaaaccacaggctcgttactcactgcaattgatgtgtcgaaagctgatttggactgggaacaggtcacatcacagcaagatgagaataagagcaatcgagaaattccaaaagtaataagcgaggagtacttggctgaaaaagtagaacaaccaccaagccctgaagctgaagctgagtttcaacgcggaatggcttatattgaaagaggaaaaggtcatggaagagaaggaagagttgcagctcatagagtatttgaaagagcagccgcacaaggtcatcaagaagccagaaaagctgtagcgttctcacagatgttcggagattattcccgttggtccattcaggaagccaagacagttttcgaagatctcgaaaaaaacggctcaccagatgctcaacttgcattaggattcatgcatggagccggaatcggagtggaaaaatcgaatcaagcaaaagctcttgtatattatatgttctccgctctcggaggaaatcctcttgcccaaatggctatgggcttccggtatagtcacggagttggagtgccacaaaactgcgaaactgcactttcatattatcaaaaagttgcaaaaactgtagtggataatgttaaattcacaactggacagacaattcaacgattgagactaaccgacgaaacagatccaacaatccatatgcaaccaggaagtgcaccactggagagtaatcttcttgagtattacaagatgcttgccgacaaaggagatacatccgctcaattgggactcggacagatttatttagctggtggacgagggctcaatcaaaatttcgaactcgccttccgctacttgttagctgctgctgagtcaggaagtgccgatgcattgacatatctcggaaaaatgtatttggatggaactccgtttacgccaaaagattatcaaaaatcattcgaatatttgatgaaatcagctgataaatctagtcctagtgcacaggctgtattgggagcaatgtatatgaaaggaaaaggagtcaagaagaattacgaaaaggctttgaagttgctgacattgtcggctgataagaagaacgccgatggacaaatgtatttagcagaattacattacaaaggtgttccaaccaacaaaggagtgcatcgagatttcaagaaatctgtgaaactttaccagcttgcttctcaaaatggacatattcttgcctactataatcttgctcaaatgcacgctgctggaacgggagttccacgttcatgttcccacgcggttgatcttttcaaatctgtagccgaacgaggaaaatggggagaacgattgatggaagcccatagcgcatataaagataatcgagttgatgaggccgcaatgaaatatttattcatggctgaacttggctatgaagttgctcaaactaatctagcctatattttggatcgtggagaagcgacgtcattgttctcgggaccgaaagataacaatatggaaagagcgttcctcaattggcaaagatctgcaaatcaagaatatgctgctgctcgcgtgaaacttggtgattactactattatggtctcggtacagaagttgaccacagtttggcgttctcaaactataaaatggcagtcgatagmcacggtgttgctcaagcaatgttcaatttgggatatatgcacgaagttggcgaaggaatcactcgggatctttacctggctaaacgtttctacgatcaagcaattgagcatagtcaggatgcatacatgccgtcgaaattagcattagcaaaactagcttttgtcttctatttggaagagctcaacaagctgccattaatcagttttatggagaaaaccgttggaccacgatgggatgctattttgatgaccgtttctgcattggttccattattcttgttctggaggcaccgacaaaatgataattga

SEQ ID NO: 53108 - protein, 685 aa, Caenorhabditis elegans
  misc_feature (583)..(583): Xaa can be any naturally occuring amino acid
MIKTYLTLLLLATSATCQKKSATLVSAEGEAPAIKVIKTTGSLLTAIDVSKADLDWEQVTSQQDENKSNREIPKVISEEYLAEKVEQPPSPEAEAEFQRGMAYIERGKGHGREGRVAAHRVFERAAAQGHQEARKAVAFSQMFGDYSRWSIQEAKTVFEDLEKNGSPDAQLALGFMHGAGIGVEKSNQAKALVYYMFSALGGNPLAQMAMGFRYSHGVGVPQNCETALSYYQKVAKTVVDNVKFTTGQTIQRLRLTDETDPTIHMQPGSAPLESNLLEYYKMLADKGDTSAQLGLGQIYLAGGRGLNQNFELAFRYLLAAAESGSADALTYLGKMYLDGTPFTPKDYQKSFEYLMKSADKSSPSAQAVLGAMYMKGKGVKKNYEKALKLLTLSADKKNADGQMYLAELHYKGVPTNKGVHRDFKKSVKLYQLASQNGHILAYYNLAQMHAAGTGVPRSCSHAVDLFKSVAERGKWGERLMEAHSAYKDNRVDEAAMKYLFMAELGYEVAQTNLAYILDRGEATSLFSGPKDNNMERAFLNWQRSANQEYAAARVKLGDYYYYGLGTEVDHSLAFSNYKMAVDXHGVAQAMFNLGYMHEVGEGITRDLYLAKRFYDQAIEHSQDAYMPSKLALAKLAFVFYLEELNKLPLISFMEKTVGPRWDAILMTVSALVPLFLFWRHRQNDN

SEQ ID NO: 53109 - DNA, 726 bp, Pseudoalteromonas haloplanktis TAC125
  CDS (1)..(726): transl_table=11
atgtcacagtttaatttaaaaaccttactcctagcgggcattttacttagtagccctttcgctcatgctgggttagaggaagggatcaaagccgctaatgaaggcgaatttgcacaagcactaaaagagtttaattacctagcagataaaggctttgcccctggtatttatgagctgggtaaattgtatgaaggtgggtatggtgtaacgcgtgactaccgtaaagctgctcaactttatcaacaaggggtagcaaaaaatcaccccgattctatgtttgctttagccgttttatacgatgaaggcaacggggtaaaactcgacaaacaaatggcaataaagttatttgaacaagcggcaaacaaaaacctacccgctgcacaatttaacctaggcgttatgtatgccaatggtgatggcgtaagcgtagattatgaacttgctaaaacgtggtatgaaaaagctgcagccaataattatactttggcgcaatttaatttagctttaatgtactttgaaggcttaggcatgcctaagaatttagaaaagtcatatatttggaacaccattgccgagtataacggcaatatgcaagcaagccatagtcgcaagctcgacgagcaaaaaatgctgcctaaagaagttgaagaagcaaaagaaaaagccgacgctatttataccagaattttagccggcacttacgctggtgaagggcggttgttttaa

SEQ ID NO: 53110 - protein, 241 aa, Pseudoalteromonas haloplanktis TAC125
MSQFNLKTLLLAGILLSSPFAHAGLEEGIKAANEGEFAQALKEFNYLADKGFAPGIYELGKLYEGGYGVTRDYRKAAQLYQQGVAKNHPDSMFALAVLYDEGNGVKLDKQMAIKLFEQAANKNLPAAQFNLGVMYANGDGVSVDYELAKTWYEKAAANNYTLAQFNLALMYFEGLGMPKNLEKSYIWNTIAEYNGNMQASHSRKLDEQKMLPKEVEEAKEKADAIYTRILAGTYAGEGRLF

SEQ ID NO: 53111 - DNA, 2916 bp, Rhodobacter sphaeroides 2
  CDS (1)..(2916): transl_table=11
atgcccggggcagagcagcgatggccggcgcgggcggctctcctgctcgtgctgatcgctgcggccgggctggcgcgggggcaggagacaccctccggcccgccgccgcgggtagcgatggtggtcggcaattccgcctatcagaacgtgccggccctgcccaatcccgcgggcgacgcggaactcgtggcggagaagctgtgggaatcgggcttcgaggtcatcgagacggtggacgccgaccgcgagaccatgctcgccgatctcgcgaccttccgcagccgcctgcgcgagggcagcgaggcgctcttcttctacgcgggccacggggtgcagatcggcgggcggaactacctgctgccggtctcggtcgccccttcctcggtcgaggacctgaaggcgcaggccatcgatgcgcagctctttctcgatgtgatggcgcagtcgggcgcgcggctgacgctcgtgctgctcgacgcctgccgcaacaatccgttcctcgacattccctccgacggcgccgaggccatcgccacccgcgccctctcgatcggcgcctcgcgtgcggcggtggagcgggggctccgcgatctggcggcggccagccggggcggtctggccgagatgtcggccggtcgcggcgaggcgctcatcagctttgccaccgcgcccggacaggtcgccttcgacgggcgcggacggcacagcccctataccagcgcgctcgccggcagcatcgacgagccggggctcgaactcgtcgacctcttccgccgggtgcggggcgcggtgcgcgaggcgaccggcgggcagcagatcgcctggacggcgagcacgctcgagagccgcttctatttcaagccgccagccgacgatctgcgctctgccaccaccggcatgagcaccgggtcggacacgctcggcgcgctgccgccacggcgggtggtggaccgcaccttctggcgcgcaatccgcgacacggaccggctcgacgccttcaccgcctatgtccgcaccatgccggacggcgccttcgtcgccgaggcgaaggagaagatccgcagcctcggcggcgatcccgaggcgatcccggtctcggacctgtcgctgccggagcggccgcgcggcttcgtgttggccgatcctgcggcgcaggccgatctcgcggcgacgctcgaccgggcgcccgcatcggtgcccatcggaacgggggcggcccgcatcggcgccgcagccggcagggcgggctgggttcatgtggccgcagccccgcgtctcggcgcggtctcggccggcggcacccgcctcgaggcgggctcggtgcgctggatggaggcggaccagccgctcgactacctccccggcatcggctcgaacggcgggctcgacagtctccgggccgaagccctgcgcgagggcggcacgaccgaaccccttgaggctgcggtcgaaacctatgtcgacgcctgcgacatgctcgcgggcaacccctacgacagccagcgcgtcactgccggcacgcgccagttcatcctcgaccgcaaccacgacgccgccatcgcggtctgcgagatcgccgtcgcgcgccatccggaggtggtccggttctgggccgaactcgcgcgcagctaccgcgccgcgggccgctacgaggaggcgctccactggcagcagaaggcggtcgacgcgggctatgcctcggcgatggtctatctcgggcagatgttcctcgacggccaggccgtgccgcaggacttcgaccgtgcgcgggagctgttcgaggcggccgatgcccgcggcgagacggcggcgctgacggcgctggcctggatccaccgggcgggggtgggtgtgccggaggatccggcccgggcgctcgacttctaccggcagggggcggcgcgcggcaacgactgggcgatgaccaacatcggcgagttctaccagaagggcctgagcgtcgcccgggatccggccgaagcggtgcgctggtatacggccgcggccaagagcggcgagctgaccgcccagacgcggctcgcgcggatgtatcagaccggcgacggcattgcggtggatgaggcgcaggcccgcttctggttcgagaccgccgcgggccggggcgtgccgaatgcgctgacccgtctcggcctcatgtatgagcagggtcagggggtggaccgggatctcgaggcagcggcgcgtctttacggccgggcggctgccgagggcgacgccgaggcctggctgcggctgggccggctcgaagcctcggacgcgccgctgttcgaccggcccgagcgcgccctgccgctgctggagaaggcgctcgcggcgcaggtgccgggcgccgcgcgcgagctcgggcgtctctacgagacggggcgcggcgtgacgaaggatctggcccgcgcccgcgcgctctatgtgcaggaggcgggcgcgaacccctgggccgcgcgcgacgccgggcgcgccttcgcctcggatgagggcgcgcccgccgatccggcgcaggcggcccgctggtatcgggccgcggccgagggcggggttccgtgggcggctctcgatctcgggcggctctacgagaccggccgcggtgtgccgcaggaccggaccgaggcgctggtcctctatgccgcggccgcgcgtcccggaggcgatgccagggcggccgacgccgcccgccgcgccgccgccggctattcggccgaggagacgatccgggcagcgcagctgctgcttggtcgcctcggcgccgaggtgggcgcgcccgacggccggatcggccccgcgacgcgggacgcgctcgcccgcgtctttgccgcgcaggggcgggccgcgcccggcacccgcatcgacttcgacctgctggccgagctttcggcgatggatgaggagagactgccatga

SEQ ID NO: 53112 - protein, 971 aa, Rhodobacter sphaeroides 2
MPGAEQRWPARAALLLVLIAAAGLARGQETPSGPPPRVAMVVGNSAYQNVPALPNPAGDAELVAEKLWESGFEVIETVDADRETMLADLATFRSRLREGSEALFFYAGHGVQIGGRNYLLPVSVAPSSVEDLKAQAIDAQLFLDVMAQSGARLTLVLLDACRNNPFLDIPSDGAEAIATRALSIGASRAAVERGLRDLAAASRGGLAEMSAGRGEALISFATAPGQVAFDGRGRHSPYTSALAGSIDEPGLELVDLFRRVRGAVREATGGQQIAWTASTLESRFYFKPPADDLRSATTGMSTGSDTLGALPPRRVVDRTFWRAIRDTDRLDAFTAYVRTMPDGAFVAEAKEKIRSLGGDPEAIPVSDLSLPERPRGFVLADPAAQADLAATLDRAPASVPIGTGAARIGAAAGRAGWVHVAAAPRLGAVSAGGTRLEAGSVRWMEADQPLDYLPGIGSNGGLDSLRAEALREGGTTEPLEAAVETYVDACDMLAGNPYDSQRVTAGTRQFILDRNHDAAIAVCEIAVARHPEVVRFWAELARSYRAAGRYEEALHWQQKAVDAGYASAMVYLGQMFLDGQAVPQDFDRARELFEAADARGETAALTALAWIHRAGVGVPEDPARALDFYRQGAARGNDWAMTNIGEFYQKGLSVARDPAEAVRWYTAAAKSGELTAQTRLARMYQTGDGIAVDEAQARFWFETAAGRGVPNALTRLGLMYEQGQGVDRDLEAAARLYGRAAAEGDAEAWLRLGRLEASDAPLFDRPERALPLLEKALAAQVPGAARELGRLYETGRGVTKDLARARALYVQEAGANPWAARDAGRAFASDEGAPADPAQAARWYRAAAEGGVPWAALDLGRLYETGRGVPQDRTEALVLYAAAARPGGDARAADAARRAAAGYSAEETIRAAQLLLGRLGAEVGAPDGRIGPATRDALARVFAAQGRAAPGTRIDFDLLAELSAMDEERLP

SEQ ID NO: 53113 - DNA, 726 bp, Nitrosococcus oceani ATCC 19707
  CDS (1)..(726): transl_table=11
atggataaaaaccctagaactcattatcgaaatgaaactggcgtatggtcattcctgggagcgatattgtttttgggcttcttacaagtcgcccaagcggatgttgatgctggaagggaagcctataagagccaagattatgagctcgcgcttaaggaatttatgccccttgctgaacaaggcgatgaaaatgcgcagttttatatgggtttgatgtacgccaatggatatggtttgcccaaggacccggaagaggctgacaaatggtttgagaagtttagtgagcatcttgatgtgagtgccaaattcaatctgggcatcatgtactatcaaggcaaatcggtaccaaaaaacgttgaaaaagctattgcttggtttaaaaaggcggcggcagagggagatgccgaagcccagtttaatttgggttttatctatgataacgggtatggcgttccccaggacagagaagaggcgctcaaatggtaccgggatgcagctaatcagggaattgtggaggcgcagaataatctgggcgtgatgtatagcgaaggtcagggaatagcaaaggattatgtacaagcctatttctggttcaatgtagcagcgaaacaaggagataaaaatgcagagaagatcagagatacccttgctaaggatatgaatacctcgcaaatggcagaggctataaagcttacccacgaatggcaattggcctcagggcactaa

SEQ ID NO: 53114 - protein, 241 aa, Nitrosococcus oceani ATCC 19707
MDKNPRTHYRNETGVWSFLGAILFLGFLQVAQADVDAGREAYKSQDYELALKEFMPLAEQGDENAQFYMGLMYANGYGLPKDPEEADKWFEKFSEHLDVSAKFNLGIMYYQGKSVPKNVEKAIAWFKKAAAEGDAEAQFNLGFIYDNGYGVPQDREEALKWYRDAANQGIVEAQNNLGVMYSEGQGIAKDYVQAYFWFNVAAKQGDKNAEKIRDTLAKDMNTSQMAEAIKLTHEWQLASGH

SEQ ID NO: 53115 - DNA, 2043 bp, Nitrobacter winogradskyi Nb
  CDS (1)..(2043): transl_table=11
atgctttcatccagatcgcttctccagtgggttcgtcgtccggttcttgggccttctcgcggtggcctcttcgagcatggaatgggcgcgtatgagcgcggcgagtatcttgaagcggtcaggtgctggaagctggcgctggaggcgggcgaggccgaggccgcctatcggatcggaaggctttatgtgaaaggcgaaggggtcgtcaggagcgtgccagatgccgcgatctggtatgagcgcgcggcccggctgggccatgtcgacgcgcagtttcaactcggcctgatctttctgcagggggagaagccgctgctgggcccgcatcgccacgaaacatggcgccagtcctcggccatacgtctcggcgacaaggcgtcgaacatacaccagcttgtgtttccgcatggaacgagcgttgagcggaatgttgacgctgcgtttcactggatatcggccgcggcggacaaaggcaaagccgaagcgcagacggtcctcggcaatatgtacagtgagggattaggctgcgagaagaatctccagatagcgcttgcatggtatggggttgcggccgagcagaactgtgctgccgcggaattcgctctcggcgatattcattttcagggcaaaggggttcccgtcgacttcgagcaggccgcggtctggtatcgcaaggcggccgagcaggatcacgtcagggcgcaggtcgcgctcgcgttcatgaacctgaagggaacgggaatgccggagaaccctgcggaagcggcacgcctgttccagggcgctgcgatgcatgacgatatcatcgcgctgtacaacatcggcttgttacgcctgaagggccatggcgtcgcgaaggatatcgacaaggctgaaaccgcgctgcgcaaggcggcgcgcaaggattactttcccgcgattcaggcgctggcggaattctattcgcacggcggaggatttgctccggatcttcgggaggccgcggtctggtatgagaaggccgccgagcgggacgacgtacaggcgcaattcttcatgggccgattctatgcgatgggcaccggcgtcggcccgaacattcgtcaggctgcaaaatggttcgagcgcgcggcccgcaacggtcacgcgactgccgcgttcaacatcgccattttttatctcaacggatccggcgtcgaacgcgatgtagaccgcgcgatcgaatggttcgagcgcgcgtccgaaggcggcatccgcgccgcgcagctgcagctcggaaaactttattcggcaggcaacggtgtgccgcgcgatcagaagctggcaagagaatggctcggcaaggccgccaacggcggagacccggacgcccagacggcctatgcgcttttcctgcttcgtcaggatggttcagcggaacagctcgagcaggcaaaggcgctgctggtcgaggcggccgaggccgatcacgcgccggctgcgttccagctcggcgtgctgcatatgggcaagttcgggggagaaacagacatcgcggccgccgttccatggttcgcacgcgccgccggcgcggggcatgtcgatgcacaatatacccttgcgctgcttcatctcgatccgggcagcggcatgagtgacgcgaaggctgccgcgtcatggatgacgaaggccgctcatgcgggccatgccggcgcgcagtttcagctcgccgtgctgtattgcaccggcgccggcctggctcaggatgtcgcgcaaggggtgaggtggtacgaggccgccgcgcaacagggacacaggatcgcgcagttcaacctcgcggtgatgcttggaaaaggacagggatgcgaggtcgacctcgggaaggcggtcgaatggttcgagaaggcggcccggcaggatgtggcggaagcgcagattgcgctcggcgacgcgttgatgtcgggaagcggcgtgacgaaggatcaggatgcggcggtgcagtggtatcgccgggcggccggtcacaaccatgaaggcgcccggcaccgtctgaatgcgatcggcgtaacgacggtcgatggctga

SEQ ID NO: 53116 - protein, 680 aa, Nitrobacter winogradskyi Nb
MLSSRSLLQWVRRPVLGPSRGGLFEHGMGAYERGEYLEAVRCWKLALEAGEAEAAYRIGRLYVKGEGVVRSVPDAAIWYERAARLGHVDAQFQLGLIFLQGEKPLLGPHRHETWRQSSAIRLGDKASNIHQLVFPHGTSVERNVDAAFHWISAAADKGKAEAQTVLGNMYSEGLGCEKNLQIALAWYGVAAEQNCAAAEFALGDIHFQGKGVPVDFEQAAVWYRKAAEQDHVRAQVALAFMNLKGTGMPENPAEAARLFQGAAMHDDIIALYNIGLLRLKGHGVAKDIDKAETALRKAARKDYFPAIQALAEFYSHGGGFAPDLREAAVWYEKAAERDDVQAQFFMGRFYAMGTGVGPNIRQAAKWFERAARNGHATAAFNIAIFYLNGSGVERDVDRAIEWFERASEGGIRAAQLQLGKLYSAGNGVPRDQKLAREWLGKAANGGDPDAQTAYALFLLRQDGSAEQLEQAKALLVEAAEADHAPAAFQLGVLHMGKFGGETDIAAAVPWFARAAGAGHVDAQYTLALLHLDPGSGMSDAKAAASWMTKAAHAGHAGAQFQLAVLYCTGAGLAQDVAQGVRWYEAAAQQGHRIAQFNLAVMLGKGQGCEVDLGKAVEWFEKAARQDVAEAQIALGDALMSGSGVTKDQDAAVQWYRRAAGHNHEGARHRLNAIGVTTVDG

SEQ ID NO: 53117 - DNA, 3180 bp, Nitrobacter winogradskyi Nb
  CDS (1)..(3180): transl_table=11
atgaattcgcggggatcgtcgagcgacgacggaatcgaaacatccgatcgcgagggagcggacgctgccgcgcggcgcgccggcacatcccgcgacgacggaccgggttccggttccggcggcaccccgccgggtccgacgcagccggcggcatctccccagaacagccccgagatgagggacattcatcaacggctagattccatcacccgccagatcgatcagttggcaagcccggccgagaacggcgaacccgcggtcgcccgtcagctcaacgacgccatttcgcggctcgatgcccggctcgcccgggtcacggcccagacacccgcagcgaacccgcagcaacggggcgcgagcggaagctacgaccgaccgacatcaccggacctcgtcacgctcgaatccgcgatcgcggagatcgccgcgcgccagcatgaactcgatgagacgccgcgcgcgccatcctcatacagctcagcccccgttgcgtccgcgatgagaacgtcgcgacaggcggatttctccagcctcgaacggcaactcttcaagatcacgagccagatcgaatccctgcaacgccccgacgggatcgagcagtcgatcgccgcattccgcatcgagcttgcggatatccgtcatgtgatcaccgaggccatgccgcgcagggcgatcgaatccctcgaaaacgagattcgctcgctttcgcagcgcatcgacgaagtccgccagaacggcagcgatggtcaggcgctggcgaatatcgaacgcgccctcaaggagatctacgacgctttgcgatcgctgaagccggcggaacagctctcaggattcgacgaggccatccgcaatctcggcaacaagatcgattcgatcgtgcggggcagcggcgacagcggcatgatgcagcagcttgagagcgcgatcggcgcgcttcgcggcatcgtctcgaacgtcgcctccaacgacgcgctggagcgcctcggcaacgatctcaacatgctgtcgtccaaggtcgagcagctcggccggcccgcgggcgacggggatttctacgccgcgctcgaacagcgcatggccgcattgacgcagaccctggaaaaccgcgaaagcccggcctcgggcagcagcttcgaacaacttgaagagacggtgcgagcgctgtccgagcgtctcgaccgcctgccggccggtcacgattcgtcctcggcgctggcgcacctcgaacagcgggtctcgatgctgctcgaacgcctggagaccgcaggcgaatattcaggatcccatctcgggcgcgtcgaggaaggtttgcaggacattctgcattgcctggaacggcagcaggccggactcgcggcgatgtccgaaagcggtccgcgaagcgctgtcccgaccatggatagcgaggtcgtggaagcgatcaagcgcgaactatccgagatgcgcttctgccagtcggaaaccgaccgccatacccaggactcgctcgaggccgttcacaacaccctggagcatgtggtcgaccggctggcgatgatcgaaagcgaccttcgcgcggtacacaccatgcccgcccgtgccgagccgtcccgcggcggaataatgccggaacggacggcaaatctgccgcccaaacccgaattgccgaatccggtactgtcgcaagcggccacgcagcccacgccggcccgcaccgccacggcggcgccgatcccgcgcgccatagccgacgccctgatccccaaagagaccttcgatccggatcgcgtcgtgccatccacgacagcgccctcgccgcgccccgcgatcgacccgaagctgccgcccgatcatccactcgagcccggcacccgtccggcgggacgcgcggcaacgccgtcggagcgcatcgcggcctccgagagcgagaccggcgacgtcgccgaaaccccgcgcgagcagtcgggctcgtccttcatcgccgccgcgcgccgcgcggcgaaggcggccgccgcctccacgccgtcgcccgacaaggcgggtcgaaccaaggtcgccatcgaaccggcgcgccccgccacgggcggatcggacatcacctccaagatccgttccctgctcgttgcggcgagcgtggtggtgatcgtcctcagcagtttcaagttcgcgatgaccctgctcgacagttctccgcgcgccaccctcagcgaaagcgaccacgcggctcccgtgaccaagccgccagccgaccccgagggcagcgccggcccagagataccgcagccgccctcgatgatcgcgccgacgccgatcgatcggcaatcgatgatcgcaccgcccgccggtgacagcgcggctccggccaaaaacccctcggatgccatgccggcgagccggccggacacgccgtccgccgacgtcaccggtgcgatcccgaacggactcacgccggaaccggctgcaactccacccgccgcatcgcttcccgacagcatcggcggcacgacgctgcgttccgccgcgctccagggcgaccccgcagcctcgttcgaggtcggtgttcgctacgccgaaggaaagggcgtgaccgtcaactacgacgaagccgcgaagtggtacgaacgggcggctcatgccggcatcgtgcccgccatgttcaggcttggcgccctgcatgaaaaggggctcggcacgagcaaggacgtcgataccgcgcggcgctattacctgcaggcggcggaccggggcaatgccaaggcgatgcacaacctcgccgtgctcgatgccgatggtggcggcaagggcgccgactatgtgagcgccgcgcaatggttcagcaaggcggccgagcgtggaatagccgacagccagtacaatctcggcattctttacgcccgcggcatcggcgtcgaacagaatctcgcgaaatcctacaagtggttcagcctcgccgccgcccagggtgacgtggactcagggcgcaagcgcgatgaagtcgccaagcggctcgatccgccgtcgcttgccgccgccaagctcgcggttcaaaccttcgtggtcacgccgcagcccagcgatgcggtcagcgttcccggccccgcgggcggatgggacagcgcggctgcaaagccccgcgccaaaccggcgccgggcaaatccgcgagggcgaaccacgcgatggcgcggcataccgcgcattaa

SEQ ID NO: 53118 - protein, 1059 aa, Nitrobacter winogradskyi Nb
MNSRGSSSDDGIETSDREGADAAARRAGTSRDDGPGSGSGGTPPGPTQPAASPQNSPEMRDIHQRLDSITRQIDQLASPAENGEPAVARQLNDAISRLDARLARVTAQTPAANPQQRGASGSYDRPTSPDLVTLESAIAEIAARQHELDETPRAPSSYSSAPVASAMRTSRQADFSSLERQLFKITSQIESLQRPDGIEQSIAAFRIELADIRHVITEAMPRRAIESLENEIRSLSQRIDEVRQNGSDGQALANIERALKEIYDALRSLKPAEQLSGFDEAIRNLGNKIDSIVRGSGDSGMMQQLESAIGALRGIVSNVASNDALERLGNDLNMLSSKVEQLGRPAGDGDFYAALEQRMAALTQTLENRESPASGSSFEQLEETVRALSERLDRLPAGHDSSSALAHLEQRVSMLLERLETAGEYSGSHLGRVEEGLQDILHCLERQQAGLAAMSESGPRSAVPTMDSEVVEAIKRELSEMRFCQSETDRHTQDSLEAVHNTLEHVVDRLAMIESDLRAVHTMPARAEPSRGGIMPERTANLPPKPELPNPVLSQAATQPTPARTATAAPIPRAIADALIPKETFDPDRVVPSTTAPSPRPAIDPKLPPDHPLEPGTRPAGRAATPSERIAASESETGDVAETPREQSGSSFIAAARRAAKAAAASTPSPDKAGRTKVAIEPARPATGGSDITSKIRSLLVAASVVVIVLSSFKFAMTLLDSSPRATLSESDHAAPVTKPPADPEGSAGPEIPQPPSMIAPTPIDRQSMIAPPAGDSAAPAKNPSDAMPASRPDTPSADVTGAIPNGLTPEPAATPPAASLPDSIGGTTLRSAALQGDPAASFEVGVRYAEGKGVTVNYDEAAKWYERAAHAGIVPAMFRLGALHEKGLGTSKDVDTARRYYLQAADRGNAKAMHNLAVLDADGGGKGADYVSAAQWFSKAAERGIADSQYNLGILYARGIGVEQNLAKSYKWFSLAAAQGDVDSGRKRDEVAKRLDPPSLAAAKLAVQTFVVTPQPSDAVSVPGPAGGWDSAAAKPRAKPAPGKSARANHAMARHTAH

SEQ ID NO: 53119 - DNA, 2220 bp, Mus musculus
  CDS (80)..(2146)
gacagacctgagaagaggaagcttgtgggccagccacctaattcagcccgtgttaaagtaaaaaggagctgcttaggagatgaatcccttggctttgttagtagagatattgatcattatcgaggtcacaaccaaaaatactgaagcagaaagatataacagaaaacaaaaagaagtgaatgtcaccacacaggtatcagtgagcaaagtcaagcaatttttattgtatctactggaacaaggaaacgcaaataaaataaccaataaaagagaaaatcccttagaaaaaaagaagcatcaacataagttaaaaataaaaggaattcaaaataagaatctcctgaagagaaatcaaaactacttcaaaaacccagccaagaaaagtatcacagatgaaggagatgagttatttaaaatgggcaacaagattctccaggagtctaaaagccaaaaacaaaaaacagaagcctacacactcttcaccagagcagccaacatgggaaatttgaaagctatggaaaaaatggctgatgcttggctatttggaagtttcggcatgcaaaacataacagcagctattcagttatatgagtccttggctaaagaaggatcatacaaagcccaaaatgcattaggatttttatcttcatatggaataggaatggaatatgaccaagccaaggcactgatatattatacctttggaagtgctggaggaagcatgatgtcccagatgattctggggtacagatacttgtcaggaattaacgttctgcaaaattgtgaagttgccctaaatcattacaagaaagtggcagattatattgctgataaattggaaaaaagtgaaggtattcccgtggaaaaagtgaggctaaccgagagacctgagaatctgagttccaacagtgagattttggattgggacatataccaatactataaatttttggcagaaagaggagatgttcagatacaagtatctcttggacaattacatctaattgggagaaagggactagatcaagattacagtaaggcgttatactactttctaaaggcagcaaaagccgggagtgcaaatgccatggcatttataggaaagatgtattttgaagggaatgctgctgcaccacaaaataacgccactgccttcaaatacttctccatggcggccagcaagggcaacgcaattggccttcatggacttggtctcctttacttccatggaaaaggtgttcctgtgaattatggtgaagcacttaaatacttccagaaagctgcggagaagggatggcctaatgcacagttccagctgggcttcatgtactactctggctctggagtatggaaggattataagcttgccttcaaatacttttacttggcatctcagagtgggcagcctcttgccatttattatctagccgagatgtacgcaactggcactggagtgctgagatcatgcagaacggccgtggagctttacaaaggtgtctgtgaactaggccactgggctgagaaattcctaacggcctatttcgcctataaggatggggacatagactcttctcttattcagtatgcattgcttgccgaaatgggatatgaagtagctcaaagcaattcagcattcattttggaatctaaaaaagctaaaattctggggaaagagaagttgtatccaatggcacttctgctatggaaccgagccgccattcaagggaacgcttttgctagagtaaaaattggagattaccattactatggctacgggactaagaaggactacgaaacagcagccacacactacagcatcgcagcagacaagcatcacagtgcacaagcaatgttcaacctggcatatatgtatgaacatggcttgggtattgcaaaggacattcacttggccagaagattgtacgacatggctgctcagacaagcccagatgctcacatacctgtgttctttgcccttatgaaactggaaaccatgcatctgctccatgatatcctgttttttaattttaccatgaaatggaaatggctgaaactggacagcactgttggaccatactgggatttattggtgattggcctaattgttgccatgctgatcttcctgcttagaaatcgccataggtaggctctagaccatcagataacctacttataggttcatgccaagctatcctcaccaaataaagaatttcctcatcc

SEQ ID NO: 53120 - protein, 688 aa, Mus musculus
MNPLALLVEILIIIEVTTKNTEAERYNRKQKEVNVTTQVSVSKVKQFLLYLLEQGNANKITNKRENPLEKKKHQHKLKIKGIQNKNLLKRNQNYFKNPAKKSITDEGDELFKMGNKILQESKSQKQKTEAYTLFTRAANMGNLKAMEKMADAWLFGSFGMQNITAAIQLYESLAKEGSYKAQNALGFLSSYGIGMEYDQAKALIYYTFGSAGGSMMSQMILGYRYLSGINVLQNCEVALNHYKKVADYIADKLEKSEGIPVEKVRLTERPENLSSNSEILDWDIYQYYKFLAERGDVQIQVSLGQLHLIGRKGLDQDYSKALYYFLKAAKAGSANAMAFIGKMYFEGNAAAPQNNATAFKYFSMAASKGNAIGLHGLGLLYFHGKGVPVNYGEALKYFQKAAEKGWPNAQFQLGFMYYSGSGVWKDYKLAFKYFYLASQSGQPLAIYYLAEMYATGTGVLRSCRTAVELYKGVCELGHWAEKFLTAYFAYKDGDIDSSLIQYALLAEMGYEVAQSNSAFILESKKAKILGKEKLYPMALLLWNRAAIQGNAFARVKIGDYHYYGYGTKKDYETAATHYSIAADKHHSAQAMFNLAYMYEHGLGIAKDIHLARRLYDMAAQTSPDAHIPVFFALMKLETMHLLHDILFFNFTMKWKWLKLDSTVGPYWDLLVIGLIVAMLIFLLRNRHR

SEQ ID NO: 53121 - DNA, 2469 bp, Xenopus laevis
  CDS (1)..(2469)
atggggggcaggactgtgcgctttctgctgttgctcgtctgctactgtggcttcctggaggtgttgtcagggatccaccgggtcgccgctgatgttcccaagggtagtgatgatccacagacatcagaagatcatgaatctgcataccccactggagacctaaaggaggagcgcaatatgctcccagaggcacaggacaaagatggagccatatttgataaaaatgaagttcaaaaggacaaacctgagcacccagacttgaattctgaaacaaatctaaaatcttttgaattacctactgtaaagctcattccaacagaggattttcagtctgaagatgaaaatgaaagaaatgagaaggaacaaactggcacacagacaagggagctgcaaaaaccagatccccaaatcctagtcttgggcggcactgctgagggagaagcatgtcgttttccattcttgtttctggataaagaatacacagagtgcacgacggatgggcgggaagatggcagactttggtgtgcaaccacttatgactacaagagtgacttgaagtggggattctgtgaaaagcagtccaataagagacatcagatgcaggaagcagaggacctttaccaactgggcatgaagatgctaaacgagagcagcaaaaggtcacagaagaaggaagccttccagtattttatgaaagcatctgacatggaccacatcaaggcaatggagatggtggcctatgcactgctctttggggatcctataaagcaaaatattacttctgctaaagagtttctagagaaactgtcagaacaagggtcacctcgtggtcagatggctcttggttttttatatgcatcgggtctgggtctaaattccagtcaagcaaaggctcttgtgtattacacatttggtgcactagggggtaacctcattgctcatatgattttgggctatcgatactgggctgggattggagtgctgcagagctgtgaatctgctctcacacattatcgtcttgtagcaaaccatgttgctagtgacatctcactgacaggtggcactgttgtacaaaggattcggctggcagatgaagtggaaaatccaggcatggccagtggaatgcttgaggaagatttgatccagtattaccagtttctggctgagaaaggagatgtccaggctcaggttggtctgggacagcttcatctgcatggagggcgtggtgtggaacaaaatcatcagagggcttttgagtattttaatcaagcagcaaatgcaggaaactcccatgcaatggcttttctaggaaagatgtattctgaaggaagtgattcggtgactcagagtaatgaaactgcacttcagtatttcaggaaagcagcagacatgggaaaccctgttggccagagtggacttggcatggcttatctatatggacgaggagttcctgttgactatgaactggctttgaaatacttccagaaggcagccgaacaagggtgggtggatggccagcttcagcttggatcaatgtattacaatggcattggtgtaaagaaagattacaaacaagccctgaaatattttaacctggcatcacaaggggggcacattttggctttctacaaccttgcccagatgcatgcgactggcacaggggtgatgagatcttgccacactgctgttgaattgtttaagaatgtatgtgagcgtgggcgttggtcagatagacttatgactgcctataacagctacaagaatggcaatgccaatatagccgcagtgcaatacctgcttctggccgaacaggggtatgaggtggcccagagcaatgcggctttcatcctagaccagaaagaagcagctatatttggagagaatgaaacctttcctagagctcttttacactggaatcgggcagcctcgcaaggttacaccctagccaggattaagctaggtgattatcatttctatggctacggaacagatattgactacgagactgcatttattcattatcgcctggcctctgaacagcagcacagcgcccaagccatgttcaacctgggatatatgcatgagaagggcctgggaatcaagcaggacatccatcttgctaaacgtttctatgacatggctgctgaagccagcccagatgctcaggtgccagtgtttctagcactgtgtaaacttggagtgctttattcactacagtttctgcgtgatgtgaatgttaaagaaatggccttccagttggatatggaccagttgctgggaccagagtgggacttgtaccttatgaccatcatcgctctgttgctcgggacagtcattgcatatagacaacggcagcctcaagttgttttaagacccccaacgccagctccaagagcagcacctcaggacccaccccctccacagccagagcaaccccaacaacaacaggaagtccagcaaccacagtga

SEQ ID NO: 53122 - protein, 822 aa, Xenopus laevis
MGGRTVRFLLLLVCYCGFLEVLSGIHRVAADVPKGSDDPQTSEDHESAYPTGDLKEERNMLPEAQDKDGAIFDKNEVQKDKPEHPDLNSETNLKSFELPTVKLIPTEDFQSEDENERNEKEQTGTQTRELQKPDPQILVLGGTAEGEACRFPFLFLDKEYTECTTDGREDGRLWCATTYDYKSDLKWGFCEKQSNKRHQMQEAEDLYQLGMKMLNESSKRSQKKEAFQYFMKASDMDHIKAMEMVAYALLFGDPIKQNITSAKEFLEKLSEQGSPRGQMALGFLYASGLGLNSSQAKALVYYTFGALGGNLIAHMILGYRYWAGIGVLQSCESALTHYRLVANHVASDISLTGGTVVQRIRLADEVENPGMASGMLEEDLIQYYQFLAEKGDVQAQVGLGQLHLHGGRGVEQNHQRAFEYFNQAANAGNSHAMAFLGKMYSEGSDSVTQSNETALQYFRKAADMGNPVGQSGLGMAYLYGRGVPVDYELALKYFQKAAEQGWVDGQLQLGSMYYNGIGVKKDYKQALKYFNLASQGGHILAFYNLAQMHATGTGVMRSCHTAVELFKNVCERGRWSDRLMTAYNSYKNGNANIAAVQYLLLAEQGYEVAQSNAAFILDQKEAAIFGENETFPRALLHWNRAASQGYTLARIKLGDYHFYGYGTDIDYETAFIHYRLASEQQHSAQAMFNLGYMHEKGLGIKQDIHLAKRFYDMAAEASPDAQVPVFLALCKLGVLYSLQFLRDVNVKEMAFQLDMDQLLGPEWDLYLMTIIALLLGTVIAYRQRQPQVVLRPPTPAPRAAPQDPPPPQPEQPQQQQEVQQPQ

SEQ ID NO: 53123 - DNA, 1164 bp, Homo sapiens
  CDS (1)..(1164)
atgggcatcaaggttctccagcagtctaaaagccaaaaacaaaaagaagaagcctacctactttttgccaaagcagctgacatgggaaacttgaaagctatggagaaaatggctgacgctttgctatttggaaattttggcgtgcaaaatataacagcagctatccaattatatgagtccttggctaaagaaggatcatgtaaagcccaaaacgcattaggatttttgtcttcttatggaataggaatggaatatgatcaagctaaggcactgatatattacacctttggaagtgctggaggaaacatgatgtcccagatgattttggggtacagatatttgtcgggaatcaatgttctacagaattgtgaagttgccctaagttattacaagaaagtggcagattatattgctgacacatttgaaaaaagtgaaggtgttccagtggaaaaagtgagactaacggaaagacctgaaaatctgagttctaacagtgagattttggattgggacatataccaatactataaatttttggcagaaagaggagatgttcagatacaagtctctcttggacaattacatctaattggcaggaaaggtctagatcaggattactacaaagcattacactacttcttaaaggcagcaaaggccgggagtgcaaatgccatggcatttataggaaagatgtatttagaggggaatgctgccgtgccgcaaaataacgctactgccttcaagtacttttccatggcagccagtaagggcaatgcaatcggccttcatgggcttggtcttctttactttcatggaaaaggagttcccctgaattatgccgaagcacttaaatactttcagaaagctgcggaaaaagggtggcccgacgcacagttccagttaggcttcatgtactactctggctctggaatatggaaggattataaacttgccttcaaatatttttacctggcatctcagagtgggcagccccttgccatttattatctggccaagatgtatgcaacaggaacaggagtagtaagatcatgcagaactgctgtggagaaaaggctaacattcttgaaaaagagaagatgtatccaatggcgcttctcctatggaatcgagctgccattcaaggcaatgcatttgctagagtaa

SEQ ID NO: 53124 - protein, 387 aa, Homo sapiens
MGIKVLQQSKSQKQKEEAYLLFAKAADMGNLKAMEKMADALLFGNFGVQNITAAIQLYESLAKEGSCKAQNALGFLSSYGIGMEYDQAKALIYYTFGSAGGNMMSQMILGYRYLSGINVLQNCEVALSYYKKVADYIADTFEKSEGVPVEKVRLTERPENLSSNSEILDWDIYQYYKFLAERGDVQIQVSLGQLHLIGRKGLDQDYYKALHYFLKAAKAGSANAMAFIGKMYLEGNAAVPQNNATAFKYFSMAASKGNAIGLHGLGLLYFHGKGVPLNYAEALKYFQKAAEKGWPDAQFQLGFMYYSGSGIWKDYKLAFKYFYLASQSGQPLAIYYLAKMYATGTGVVRSCRTAVEKRLTFLKKRRCIQWRFSYGIELPFKAMHLLE

SEQ ID NO: 53125 - DNA, 1785 bp, Homo sapiens
  CDS (1)..(1785)
atgcaaaagcaagcagagaaaaattttacagatgaaggagaccagctatttaagatgggcatcaaggttctccagcagtctaaaagccaaaaacaaaaagaagaagcctacctactttttgccaaagcagctgacatgggaaacttgaaagctatggagaaaatggctgacgctttgctatttggaaattttggcgtgcaaaatataacagcagctatccaattatatgagtccttggctaaagaaggatcatgtaaagcccaaaacgcattaggatttttgtcttcttatggaataggaatggaatatgatcaagctaaggcactgatatattacacctttggaagtgctggaggaaacatgatgtcccagatgattttggggtacagatatttgtcgggaatcaatgttctacagaattgtgaagttgccctaagttattacaagaaagtggcagattatattgctgacacatttgaaaaaagtgaaggtgttccagtggaaaaagtgagactaacggaaagacctgaaaatctgagttctaacagtgagattttggattgggacatataccaatactataaatttttggcagaaagaggagatgttcagatacaagtctctcttggacaattacatctaattggcaggaaaggtctagatcaggattactacaaagcattacactacttcttaaaggcagcaaaggccgggagtgcaaatgccatggcatttataggaaagatgtatttagaggggaatgctgccgtgccgcaaaataacgctactgccttcaagtacttttccatggcagccagtaagggcaatgcaatcggccttcatgggcttggtcttctttactttcatggaaaaggagttcccctgaattatgccgaagcacttaaatactttcagaaagctgcggaaaaagggtggcccgacgcacagttccagttaggcttcatgtactactctggctctggaatatggaaggattataaacttgccttcaaatatttttacctggcatctcagagtgggcagccccttgccatttattatctggccaagatgtatgcaacaggaacaggagtagtaagatcatgcagaactgctgtggagctttataaaggtgtctgtgaactaggccactgggctgagaaattcctgacagcttactttgcctataaggatggtgatatagattcttctcttgttcagtatgcactgcttgcagaaatggggtatgaagtagctcaaagcaattcagcattcattttggaatctaaaaaggctaacattcttgaaaaagagaagatgtatccaatggcgcttctcctatggaatcgagctgccattcaaggcaatgcatttgctagagtaaaaattggagattaccattactatggctatgggactaagaaagactatcaaacagcagccacacactacagcattgcagccaacaaataccacaacgcgcaagccatgttcaatctggcttatatgtatgaacacggcttaggcatcacaaaggacattcacttggccagaagattgtacgacatggctgctcaaacgagtccagatgcccacatacctgtgctctttgccgtcatgaaactggaaactacgcatttgctccgggatatcctgttttttaatttcacaacgagatggaactggctgaaactggacaacaccattggaccacactgggacttatttgtgattggcctcattgttcctgggctgattttgttgcttagaaatcaccatgggtag

SEQ ID NO: 53126 - protein, 594 aa, Homo sapiens
MQKQAEKNFTDEGDQLFKMGIKVLQQSKSQKQKEEAYLLFAKAADMGNLKAMEKMADALLFGNFGVQNITAAIQLYESLAKEGSCKAQNALGFLSSYGIGMEYDQAKALIYYTFGSAGGNMMSQMILGYRYLSGINVLQNCEVALSYYKKVADYIADTFEKSEGVPVEKVRLTERPENLSSNSEILDWDIYQYYKFLAERGDVQIQVSLGQLHLIGRKGLDQDYYKALHYFLKAAKAGSANAMAFIGKMYLEGNAAVPQNNATAFKYFSMAASKGNAIGLHGLGLLYFHGKGVPLNYAEALKYFQKAAEKGWPDAQFQLGFMYYSGSGIWKDYKLAFKYFYLASQSGQPLAIYYLAKMYATGTGVVRSCRTAVELYKGVCELGHWAEKFLTAYFAYKDGDIDSSLVQYALLAEMGYEVAQSNSAFILESKKANILEKEKMYPMALLLWNRAAIQGNAFARVKIGDYHYYGYGTKKDYQTAATHYSIAANKYHNAQAMFNLAYMYEHGLGITKDIHLARRLYDMAAQTSPDAHIPVLFAVMKLETTHLLRDILFFNFTTRWNWLKLDNTIGPHWDLFVIGLIVPGLILLLRNHHG

SEQ ID NO: 53127 - DNA, 978 bp, Helicobacter pylori
  CDS (1)..(978): transl_table=11
atgttaaggggtgtcaaaaaagcggtttttagggttttgtgtttgggggcgttgtgtttaggggggttaatggcagatcaagaccctaaagagcttatattttcaggtatcactatttacacggataaagatttcactagggctaaggaatactttgaaaaagcttgtaaattaaacgatgctgatggttgcacgatcttaaaagaggcttattctaaagtcatcctaaaaggaagtgcaagagagagcattgaaaaagccattgaacacacggctactgctaaagcttgcaaatcaaacgatgctgaaaaatgcaaggacttagcagagttttattttaatgcaaacgatcttaaaaatgctttagaatattactctaaatcttgtaagttaaataatgttgaagggtgtatgctgtcagcaactttttataacgatatgataaagggtttgaaaaaagataaaaaagatctagaatattattctaaagcttgcgagttaaactatggcgatggctgtgcgattttaggggatatttatcataatggtgaaggcgtaacacaaaattttaaaaaagctttcaaatattactctaaagcttgcgagttgaataatggtgaagggtgttctaaattaggaggggattattttcttggtgaaagcgtaacgcaagatcttaaaaaagcttttggatattactctaaagcttgcgaattaaacgaggctctaacatgcacgcttgtaggagagttttatcgtgatggtgaaggcgtaacaaaggatcttaaaaaagcttttgaatattctgctaaagcttgtgaattgaacgatgctaaagggtgttacgctctagcagcgttttataatgagggtaaaggcgtagcaaaggatgaaaagcaaacgacagaaaaccttgaaaagagttgcaagctaggattaaaagaagcatgcgatattctcaaagaacaaaaacaataa

SEQ ID NO: 53128 - protein, 325 aa, Helicobacter pylori
MLRGVKKAVFRVLCLGALCLGGLMADQDPKELIFSGITIYTDKDFTRAKEYFEKACKLNDADGCTILKEAYSKVILKGSARESIEKAIEHTATAKACKSNDAEKCKDLAEFYFNANDLKNALEYYSKSCKLNNVEGCMLSATFYNDMIKGLKKDKKDLEYYSKACELNYGDGCAILGDIYHNGEGVTQNFKKAFKYYSKACELNNGEGCSKLGGDYFLGESVTQDLKKAFGYYSKACELNEALTCTLVGEFYRDGEGVTKDLKKAFEYSAKACELNDAKGCYALAAFYNEGKGVAKDEKQTTENLEKSCKLGLKEACDILKEQKQ

SEQ ID NO: 53129 - DNA, 978 bp, Helicobacter pylori
  CDS (1)..(978): transl_table=11
atgttaaggggtgtcaaaaaagcggtttttagggttttgtgtttgggggcgttgtgtttatgggggttaatggcagagtcaaaccctaaagagcttatatttttaggtatcactatttacacggataaagatttcactagagctaaggaatactttgaaaaagcttgtagattaaacgatgctgatggttgcgcgatcttaagagaggcttattctaaagtcatcctaaaaggaagtgcaagagaaagcattgaaaaagctcttgaacgcaccgctactgctaaagcttgcaaatcaaacgatgctgaaaaatgcaaggacttagcagagttttattttaatgcaaacgatcttaaaaatgctttagaatattactctaaatcttgtaagttaaataatgttgaagggtgtatgctgtcagcaactttttataacgatatgataaagggtttaaaaaaagataaaaaagatctagaatattattctaaagcttgcgagttaaactatggcgatggctgtgcgattttaggggatatttatcataatggtgaaggcgtaacacaaaattttaaaaaagctttcaaatattactctaaagcttgcgagttgaataatggtgaagggtgttctaaattaggaggggattattttcttggtgaaagcgtaacgcaagatcttaaaaaagcttttggatattactctaaagcttgcgaattaaacgaggctctaacatgcacgcttgtaggagagctttatcgtgatggtgaaggcgtagcaaaggatcttaaaaaagcttttgaatattctgccaaagcttgtgaattgaacgatgctaaagggtgttacgctctagcagcgttttataatgagggtaaaggcgtaacaaaggatgaaaaacaaacgacagaaaaccttgaaaagagttgcaagctaggattaaaagaagcatgcgatattctcaaagaacaaaaacaataa

SEQ ID NO: 53130 - protein, 325 aa, Helicobacter pylori
MLRGVKKAVFRVLCLGALCLWGLMAESNPKELIFLGITIYTDKDFTRAKEYFEKACRLNDADGCAILREAYSKVILKGSARESIEKALERTATAKACKSNDAEKCKDLAEFYFNANDLKNALEYYSKSCKLNNVEGCMLSATFYNDMIKGLKKDKKDLEYYSKACELNYGDGCAILGDIYHNGEGVTQNFKKAFKYYSKACELNNGEGCSKLGGDYFLGESVTQDLKKAFGYYSKACELNEALTCTLVGELYRDGEGVAKDLKKAFEYSAKACELNDAKGCYALAAFYNEGKGVTKDEKQTTENLEKSCKLGLKEACDILKEQKQ

SEQ ID NO: 53131 - DNA, 978 bp, Helicobacter pylori
  CDS (1)..(978): transl_table=11
atgttaaggggtgtcaaaaaagcggtttttagggttttgtgtttgggggcgttgtgtttaggggggttaatggcagagcaaaactctaaagagcttatattttcaggtatcactatttacacggataaagatttcactagagctaaggaatactttgaaaaagcttgtagattaaacgatgctgatggttgtgcgatcttaagagaggcttattctaaagtcatcctaaaaggaagtgcaagagaaagcattgaaaaagctcttgaacacaccgctactgctaaagcttgcaaatcaaacgatgctgaaaaatgcaaggacttagcagagttttattttaatgcaaacgatcttaaaaatgctttagaatattactctaaatcttgtaagttaaataatgttgaagggtgtatgctgtcagcaactttttataacgatatgataaagggtttgaaaaaagataaaaaagatctagaatattattctaaagcttgcgagttaaactatggcgatggctgtgcgattttaggggatatttatcataatggtgaaggcgtaacacaaaattttaaaaaagctttcaaatattactctaaagcttgcgagttgaataatggtgaagggtgttctaaattaggaggggattattttcttggtgaaagcgtaacgcaagatcttaaaaaagcttttggatattactctaaagcttgcgaattaaacgaggctctaacatgcacgcttgtaggagagttttatcgtgatggtgaaggcgtaacaaaggatcttaaaaaagcttttgaatattctgccaaagcttgtgaattgaatgatgctaaagggtgttacgctctagcagcgttttataatgagggtaagggcgtagcaaaggatgaaaaacaaacgacagaaaaccttgaaaagagttgcaagctaggattaaaagaagcatgcgatattctcaaagaacaaaaacaataa

SEQ ID NO: 53132 - protein, 325 aa, Helicobacter pylori
MLRGVKKAVFRVLCLGALCLGGLMAEQNSKELIFSGITIYTDKDFTRAKEYFEKACRLNDADGCAILREAYSKVILKGSARESIEKALEHTATAKACKSNDAEKCKDLAEFYFNANDLKNALEYYSKSCKLNNVEGCMLSATFYNDMIKGLKKDKKDLEYYSKACELNYGDGCAILGDIYHNGEGVTQNFKKAFKYYSKACELNNGEGCSKLGGDYFLGESVTQDLKKAFGYYSKACELNEALTCTLVGEFYRDGEGVTKDLKKAFEYSAKACELNDAKGCYALAAFYNEGKGVAKDEKQTTENLEKSCKLGLKEACDILKEQKQ

SEQ ID NO: 53133 - DNA, 978 bp, Helicobacter pylori
  CDS (1)..(978): transl_table=11
atgttaaggggtgtcaaaaaagcggtttttagggttttgtgtttgggggcgttgtgtttaggggggttaatggcagagcaagactctaaagagcttatattttcaggtatcactatttacacggataaagatttcactagagctaaggaatactttgaaaaagcttgtagattaaacgatgctgatggttgcgcgatcttaagagaggcttattctaaagttatcctaaaaggaagtgcaagagaaagcattgaaaaagctcttgaacacaccgctactgctaaagcttgcaaatcaaacgatgctgaaaaatgcaaggacttagcagagttttattttaatgcaaacgatcttaaaaatgctttagaatattactctagatcttgtaagttaaataatgttgaagggtgtatgctgtcagcaactttttataacgatatgataaagggtttgaaaaaagataaaaaagatctagaatattattctaaagcttgcgagttaaactatggcgatggctgtgcgattttaggggatatttatcataatggtgaaggcgtaacacaaaattttaaaaaagctttcaaatattattctaaagcttgcgagttgaataatggtgaagggtgttctaaattaggaggggattattttcttggtgaaagcgtaacgcaagatcttaaaaaagcttttggatattactctaaagcttgcgaattaaacgaggctctaacatgcacgcttgtaggagagttttatcgtgatggtgaaggcgtaacaaaggatcttaaaaaagcttttgaatattctgccaaagcttgtgaattgaacgatgctaaagggtgttacgctctagcagcgttttataatgagggtaaaggcgtagcaaaggatgaaaaacaaacgacagaaaaccttgaaaagagttgcaagctaggattaaaagaagcatgcgatattctcaaagaacaaaaacaataa

SEQ ID NO: 53134 - protein, 325 aa, Helicobacter pylori
MLRGVKKAVFRVLCLGALCLGGLMAEQDSKELIFSGITIYTDKDFTRAKEYFEKACRLNDADGCAILREAYSKVILKGSARESIEKALEHTATAKACKSNDAEKCKDLAEFYFNANDLKNALEYYSRSCKLNNVEGCMLSATFYNDMIKGLKKDKKDLEYYSKACELNYGDGCAILGDIYHNGEGVTQNFKKAFKYYSKACELNNGEGCSKLGGDYFLGESVTQDLKKAFGYYSKACELNEALTCTLVGEFYRDGEGVTKDLKKAFEYSAKACELNDAKGCYALAAFYNEGKGVAKDEKQTTENLEKSCKLGLKEACDILKEQKQ

SEQ ID NO: 53135 - DNA, 978 bp, Helicobacter pylori
  CDS (1)..(978): transl_table=11
atgttaaggggtgtcaaaaaagcggtttttagggttttgtgtttgggggcgttgtgtttaggggggttaatggcagagtcaaaccctaaagagcttatattttcaggtatcactatttacacggataaagatttcactagggctaaggaatactttgaaaaagcttgtaaattaaacgatgctgatggttgcacgatcttaagagaggcttattctaaagtcatcctaaaaggaagtgcaagagaaagcattgaaaaagctcttgaacacacggctactgctaaagcttgcaaatcaaacgatgctgaaaaatgcaaggacttagcagagttttattttaatgcaaacgatcttaaaaatgctttagaatattactctaaatcttgtaagttaaataatgttgaagggtgtatgctgtcagcaactttttataacgatatgataaagggtttgaaaaaagataaaaaagatctagaatattattctaaagcttgcgagttaaactatggcgatggctgtgcgattttaggggatatttatcataatggtgaaggcgttacacaaaattttaaaaaagctttcaaatattactctaaagcttgcgagttgaataatggtgaagggtgttctaaattaggaggggattattttcttggtgaaagcgtaacacaagatcttaaaaaagcttttggatattactctaaagcttgcgaattaaacgaagctctaacatgcacgcttgtaggagagttttatcgtgatggtgaaggcgtaacaaaggatcttaaaaaagcttttgaatattctgccaaagcttgtgaattgaacgatgctaaagggtgttacgctctagcagcgttttataatgagggtaaaggcgtagcaaaggatgaaaagcaaacgacagaaaaccttgaaaagagttgcaagctaggattaaaagaagcatgcgatattctcaaagaacaaaaacaataa

SEQ ID NO: 53136 - protein, 325 aa, Helicobacter pylori
MLRGVKKAVFRVLCLGALCLGGLMAESNPKELIFSGITIYTDKDFTRAKEYFEKACKLNDADGCTILREAYSKVILKGSARESIEKALEHTATAKACKSNDAEKCKDLAEFYFNANDLKNALEYYSKSCKLNNVEGCMLSATFYNDMIKGLKKDKKDLEYYSKACELNYGDGCAILGDIYHNGEGVTQNFKKAFKYYSKACELNNGEGCSKLGGDYFLGESVTQDLKKAFGYYSKACELNEALTCTLVGEFYRDGEGVTKDLKKAFEYSAKACELNDAKGCYALAAFYNEGKGVAKDEKQTTENLEKSCKLGLKEACDILKEQKQ

SEQ ID NO: 53137 - DNA, 981 bp, Helicobacter pylori
  CDS (1)..(981): transl_table=11
atgttaaggggtgtcaaaaaagcggtttttagggttttgtgtttaggggcgttgtgtttacgcggggggttaatggcagagcaagattctaaagagcttatattttcaggtataactatttacacggataaagatttcactagggctaaggaatgctttgaaaaagcttgtaaattaaacgatgctgatggttgcgcgatcttaagagaggcttattctaaagtcatcctaaaaggaagtgcaagagagagcattgaaaaagctcttgaacacgcggctactgctaaagcttgcaaatcaaacgatgctgaaaaatgcaaggacttagcagagttttattttaatgcaaacgatcttaaaaatgctttagaatattactctaaatcttgtaagttaaataatgttgaagggtgtatgctgtcagcaactttttataacgatatgataaagggtttgaaaaaagataaaaaagatctagaatattattctaaagcttgcgagttaaactatggcgatggctgtgcgattttaggggatatttatcataatggtgaaggcgtaacgcaaaattttaaaaaagctttcaaatattactctaaagcttgcgagttgaataatggtgaagggtgttctaaattaggaggggattattttcttggtgaaagcgtaacgcaggatcttaaaaaagcttttggacattactctaaggcttgcgaattaaacgaagctctaacatgcacgcttgtaggagagttttatcgtgatggtgaaggcgtaacaaaggatcttaaaaaagcttttgaatattctgctaaagcttgtgagttgaatgatgctaaagggtgttacgctctagcagcgttttataatgagggtaagggcgtagcaaaggatgaaaaacaaacgacagaaaaccttgaaaagagttgcaagctaggattaaaagaagcatgcgatattctcaaagaacaaaaacaataa

SEQ ID NO: 53138 - protein, 326 aa, Helicobacter pylori
MLRGVKKAVFRVLCLGALCLRGGLMAEQDSKELIFSGITIYTDKDFTRAKECFEKACKLNDADGCAILREAYSKVILKGSARESIEKALEHAATAKACKSNDAEKCKDLAEFYFNANDLKNALEYYSKSCKLNNVEGCMLSATFYNDMIKGLKKDKKDLEYYSKACELNYGDGCAILGDIYHNGEGVTQNFKKAFKYYSKACELNNGEGCSKLGGDYFLGESVTQDLKKAFGHYSKACELNEALTCTLVGEFYRDGEGVTKDLKKAFEYSAKACELNDAKGCYALAAFYNEGKGVAKDEKQTTENLEKSCKLGLKEACDILKEQKQ

SEQ ID NO: 53139 - DNA, 978 bp, Helicobacter pylori
  CDS (1)..(978): transl_table=11
atgttaaggggtgtcaaaaaagcggtttttagggttttatgtttgggagcgttgtgtttaggggggttaatggcagagtcaaaccctaaagagcttatatttttaggtatcactatttacacggataaagatttcactagggctaaggaatactttgaaaaagcttgcgaattaaacgatgctgatggttgcataatcttaagagaggcttattctaaagccatagcgagcgaaaacgcaagagaaagcattgaaaaagctcttgaacacaccgctactgctaaagcttgcaaatcaaacgatgctgaaaaatgcaaggacttagcggagttttattttaatgcaaacgatcttaaaaatgctttcaaatattactctaaatcttgtaagttaaataatgttgaagggtgtatgctgtcagcaactttttataacgatatgataaagggtttgaaaaaagataaaaaagatctagaatattattctaaagcttgcgagttaaactatggcgatggctgtgcgattttaggggatatttatcataatggtgaaggcgtaacgcaaaattttaaaagagctttcaaatattactctaaagcttgcgagttgaataatggtgaagggtgttctaaattaggaggggattattttcttggtgaaagcgtaacgcaagatcttaaaaaagcttttggatattactctaaagcttgcgagttaaacgaggctctaacatgcacgcttgtaggagagttttatcgtgatggtgaaggcgtaacaaaggatcttaaaaaagcttttgaatattctgccaaagcttgtgaattgaatgatgctaaagggtgttacgctctagcagcgttttataatgagggtaaaggcgtagcaaaggatgaaaagcaaacgacagaaaaccttgaaaagagttgcaagctaggattaaaagaagcatgcgatattctcaaagaacaaaaacaataa

SEQ ID NO: 53140 - protein, 325 aa, Helicobacter pylori
MLRGVKKAVFRVLCLGALCLGGLMAESNPKELIFLGITIYTDKDFTRAKEYFEKACELNDADGCIILREAYSKAIASENARESIEKALEHTATAKACKSNDAEKCKDLAEFYFNANDLKNAFKYYSKSCKLNNVEGCMLSATFYNDMIKGLKKDKKDLEYYSKACELNYGDGCAILGDIYHNGEGVTQNFKRAFKYYSKACELNNGEGCSKLGGDYFLGESVTQDLKKAFGYYSKACELNEALTCTLVGEFYRDGEGVTKDLKKAFEYSAKACELNDAKGCYALAAFYNEGKGVAKDEKQTTENLEKSCKLGLKEACDILKEQKQ

SEQ ID NO: 53141 - DNA, 978 bp, Helicobacter pylori
  CDS (1)..(978): transl_table=11
atgttaaggggtgtcaaaaaagcggtttttagggttttgtgtttgggagcgttgtgtttaggggggttaatggcagagcaagactctaaagagcttatattttcaggtatcactatttacacggataaagatttcactagagctaaggaatactttgaaaaagcttgtaaattaaacgatgctgatggttgtgcaatcttaagagaggcttattctaaagccatagcgagcgaaaacgcaagagaaagtattgaaaaagccattgaacacacggctactgctaaagcttgcaaatcaaacgatgctgaaaaatgcaaggacttagcagagttttattttaatgcaaacgatcttaaaaatgctttagaatattactctaaatcttgtaagttaaataatgttgaagggtgtatgctgtcagcaactttttataacgatatgataaagggtttgaaaaaagataaaaaagatctagaatattattctaaagcttgcgagttaaactatggcgatggctgtgcgattttaggggatatttatcataatggtgaaggcgtaacacaaaattttaaaaaagctttcaaatattactctaaagcttgcgagttgaataatggtgaagggtgttctaaattaggaggggattattttcttggtgaaagcgtaacgcaagatcttaaaaaagcttttggatattactctaaagcttgcgagttaaacgaagctctaacatgcacgcttgtaggagagttttatcgtgatggtgaaggcgtaacaaaggatcttaaaaaagcttttgaatattctgctaaagcttgtgaattgaacgatgctaaagggtgttacgctctagcagcgttttataatgagggtaaaggcgtagcaaaggatgaaaagcaaacgacagaaaaccttgaaaagagttgcaagctaggattaaaagaagcatgcgatattctcaaagaacaaaaacaataa

SEQ ID NO: 53142 - protein, 325 aa, Helicobacter pylori
MLRGVKKAVFRVLCLGALCLGGLMAEQDSKELIFSGITIYTDKDFTRAKEYFEKACKLNDADGCAILREAYSKAIASENARESIEKAIEHTATAKACKSNDAEKCKDLAEFYFNANDLKNALEYYSKSCKLNNVEGCMLSATFYNDMIKGLKKDKKDLEYYSKACELNYGDGCAILGDIYHNGEGVTQNFKKAFKYYSKACELNNGEGCSKLGGDYFLGESVTQDLKKAFGYYSKACELNEALTCTLVGEFYRDGEGVTKDLKKAFEYSAKACELNDAKGCYALAAFYNEGKGVAKDEKQTTENLEKSCKLGLKEACDILKEQKQ

SEQ ID NO: 53143 - DNA, 612 bp, Mucor circinelloides
  CDS (1)..(612)
atgtactatcgattggctgctgaacaaggaaacgcatttgctcaaaactctctggggtactgctatgaggatggaattggtgttcctcaggacaagacggtcgctgctgactggtatcgccagtctgctgaacagggctatccatgggctcaatgcaacttgggttattgccatcaaaatggcattggcgcagaaaaggacactgtcaagggtgcttattggtatggacaagctgctcgccagggccatgctcgtgctcaacacaacttgggcttctgctaccacaatggcattggtgtcactagaaacttgcagatggcagtcgcttggtacaagaaatcagctaatcagggcaacatttttgcataccattctttgggctactgcttccaaaatggtcttggtgtggaagtcaacttgagagaaagctgttattggtactttcgtagtgctgaacacaaccatgcgcctgcccaactctctttggggctctgcttccgtaatggtatgggcgtccagaagaatgaagaagaggcttgtaaatggttccgtctctctgcgttgcaaggcaatcctttggctcaaaattcgcttggtttctgctatgaatag

SEQ ID NO: 53144 - protein, 203 aa, Mucor circinelloides
MYYRLAAEQGNAFAQNSLGYCYEDGIGVPQDKTVAADWYRQSAEQGYPWAQCNLGYCHQNGIGAEKDTVKGAYWYGQAARQGHARAQHNLGFCYHNGIGVTRNLQMAVAWYKKSANQGNIFAYHSLGYCFQNGLGVEVNLRESCYWYFRSAEHNHAPAQLSLGLCFRNGMGVQKNEEEACKWFRLSALQGNPLAQNSLGFCYE

SEQ ID NO: 53145 - DNA, 588 bp, Haemophilus influenzae biotype aegyptius
  CDS (1)..(588): transl_table=11
atgaaattgacaaaaacactgtttactagcgcattgttaggtgcctctattctttcttttcatccaactgtggcagctatggatttcggaacacaagtgggtatagatgcttataggaagaatgatttcgcacaggctgcagaacagtttaaagatgcaggtattgtgagaggagatcctacagcgcaattatttttggggagaatgtattataatggggaattttttaagcaagattatgttgaggcagctaaatggtatcgtaaagctgcagagcagggggaggagtttggtttacttttcttaggtgagacgtatgaagatggagaaggtgtagaaaaagattatgctgaagcagcaaaattgtatagaaaggctgcagagcaggggagtgcagaaggtcaaatggccttaggtaaaatgtacagatttggaaacggtgtagaaaaagattatgctgaggcaataaagttgtatagaaagtctgcagagcaaggaaatttcacggcactatttttcttaggtgagatgtatgataatggagtaggcgttaaacaaaataaagccgaaagccaaagaattatttaa

SEQ ID NO: 53146 - protein, 195 aa, Haemophilus influenzae biotype aegyptius
MKLTKTLFTSALLGASILSFHPTVAAMDFGTQVGIDAYRKNDFAQAAEQFKDAGIVRGDPTAQLFLGRMYYNGEFFKQDYVEAAKWYRKAAEQGEEFGLLFLGETYEDGEGVEKDYAEAAKLYRKAAEQGSAEGQMALGKMYRFGNGVEKDYAEAIKLYRKSAEQGNFTALFFLGEMYDNGVGVKQNKAESQRII

SEQ ID NO: 53147 - DNA, 984 bp, Helicobacter pylori
  CDS (1)..(984): transl_table=11
atgcgtcatgttaaggggtgtcaaaaaagcggttttagggttttgtgtttgggggcgttgtgtttaggggggttaatggcagagtcaaaccctaaagagcttatatttttaggtatcactatttacacggataaagatttcactagggctaaggaatactttgaaaaagcttgcgaattacacgatgctgatggttgcataatcttaagagagacttattctaaagtcatcctaaaaggaagtgcaaaagaaagcattgaaaaagccattgaacacatcgctactgctaaagcttgcaaatcaaacgatgctgaaaaatgcaaggacttagcagagttttattttaatgcaaacgatcttaaaaatgctttagaatattactctaaatcttgtaagttaaataatgttgaagggtgtatgctgtcagcaactttttataacgatatgataaagggtttgaaaaaagataaaaaagatctagaatattattctaaagcttgcgaattgaactatggcgatggctgtgcgattttaggggatatttatcataatggtgaaggcgtaacacaaaattttaaaaaagctttcaaatattactctaaagcttgcgagttgaataatggtgaagggtgttctaaattaggaggggattatttttttggtgaaagcgtaacgcaagatcttaaaaaagcttttggatattactctaaagcttgcgaattaaacgaggctctgacatgcacgcttgtaggagagttttatcgtgatggtgaaggcgtaacaaaggatcttaaaaaagcttttgaatattctgctaaagcttgtgaattgaacgatgctaaagggtgttacgctctagcagcgttttataatgagggtaaaggcgtagcaagaggtgaaaaacaaatgacagaaaactttgaaaagagttgcaagctaggattaaaagaagcatgcgattttctcaaagaacaaaaaccataa

SEQ ID NO: 53148 - protein, 327 aa, Helicobacter pylori
MRHVKGCQKSGFRVLCLGALCLGGLMAESNPKELIFLGITIYTDKDFTRAKEYFEKACELHDADGCIILRETYSKVILKGSAKESIEKAIEHIATAKACKSNDAEKCKDLAEFYFNANDLKNALEYYSKSCKLNNVEGCMLSATFYNDMIKGLKKDKKDLEYYSKACELNYGDGCAILGDIYHNGEGVTQNFKKAFKYYSKACELNNGEGCSKLGGDYFFGESVTQDLKKAFGYYSKACELNEALTCTLVGEFYRDGEGVTKDLKKAFEYSAKACELNDAKGCYALAAFYNEGKGVARGEKQMTENFEKSCKLGLKEACDFLKEQKP

SEQ ID NO: 53149 - DNA, 1011 bp, Helicobacter pylori
  CDS (1)..(1011): transl_table=11
atgcgtcatgttaaggggtgtcaaaaaagcggttttagggttttgtgtttggtggcgttgtgtttaggggggttaatggcagagtcaaaccctaaagagcttatatttttaggtatcactatttacacggataaagatttcactagggctaaggaatactttgaaaaagcttgcgaattacacgatgctgatggttgcataatcttaagagagacttattctaaagtcatcctaaaaggaagtgcaaaagaaagcattgaaaaagccattgaacacatcgctactgctaaagcttgcaaatcaaacgatgctgaaaaatgcaaggacttagcagagttttattttaatgcaaacgatcttaaaaatgctttagaatattactctaaatcttgtaagttaaataatgttgaagggtgtatgctgtcagcaactttttataacgatatgataaagggtttgaaaaaagataaaaaagatctagaatattattctaaagcttgcgaattgaactatggcgatggctgtgcgattttaggggatatttatcataatggtgaaggcgtaacacaaaattttaaaaaagctttcaaatattactctaaagcttgcgagttgaataatggtgaagggtgttctaaattaggaggggattatttttttggtgaaagcgtaacgcaagatcttaaaaaagcttttggatattactctaaagcttgcgaattaaacgaggctctgacatgcacgcttgtaggagagttttatcgtgatggtgaaggcgtaacaaaggatcttaaaaaagcttttgaatattctgctaaagcttgtgaattgaacgatgctaaagggtgttactctctagcagcgttttttaatgagggtaaaggcgtagcaagaggtgaaaaacaaatgacagaaaaccttgaaaagagttgcaagcttggattaaagaagcatgcgatattttcaaagaacaaaaacaataaaatttcgcccctaaccaagccccattaa

SEQ ID NO: 53150 - protein, 336 aa, Helicobacter pylori
MRHVKGCQKSGFRVLCLVALCLGGLMAESNPKELIFLGITIYTDKDFTRAKEYFEKACELHDADGCIILRETYSKVILKGSAKESIEKAIEHIATAKACKSNDAEKCKDLAEFYFNANDLKNALEYYSKSCKLNNVEGCMLSATFYNDMIKGLKKDKKDLEYYSKACELNYGDGCAILGDIYHNGEGVTQNFKKAFKYYSKACELNNGEGCSKLGGDYFFGESVTQDLKKAFGYYSKACELNEALTCTLVGEFYRDGEGVTKDLKKAFEYSAKACELNDAKGCYSLAAFFNEGKGVARGEKQMTENLEKSCKLGLKKHAIFSKNKNNKISPLTKPH

SEQ ID NO: 53151 - DNA, 651 bp, Helicobacter pylori
  CDS (1)..(651): transl_table=11
ttgggtgtaaagagtagtgaagcgaaagattacattcaagctaaaaaatattttgaaaaagcgtgtggtttgaataatggtggggggtgtggtgctttaggggatctgtatgatgatggaaaaggcgtagaaaaaaacttaataaaagccgcttatttttattctaaagcgtgtgatttaaaagaaggtatggggtgtaagagattagggtcattatattatcatggtcgagacgtagaaaaaaacttaacaaaagccgcttatttttattctaaagcatgcgatttgaataatggtggggggtgtggtaatttgggggtgttatatcaaaaaggggaaggagtagaaaaaaacttaataaaagccgctcaattttactctaaagcatgcgagttaaaagatggtttggggtgtaaggatttagggacgttatattataatggggaaggagtagaaaaagacttaataaaagccgcttatctttattctaaagcatgcgatttaaaagagggtttgggatgttttaatttaggggcgttatattataatgggaaaggagtagaaaaagacttaacaaaagccgcttacttttactctaaagcctgcaaattaggaagtcaagaggcatgcgaggcgctcaaagaaaaataa

SEQ ID NO: 53152 - protein, 216 aa, Helicobacter pylori
MGVKSSEAKDYIQAKKYFEKACGLNNGGGCGALGDLYDDGKGVEKNLIKAAYFYSKACDLKEGMGCKRLGSLYYHGRDVEKNLTKAAYFYSKACDLNNGGGCGNLGVLYQKGEGVEKNLIKAAQFYSKACELKDGLGCKDLGTLYYNGEGVEKDLIKAAYLYSKACDLKEGLGCFNLGALYYNGKGVEKDLTKAAYFYSKACKLGSQEACEALKEK

SEQ ID NO: 53153 - DNA, 2037 bp, Arabidopsis thaliana
  CDS (1)..(2037)
atgagaatattaagctacggaatcgttattctctctttactcgttttctctttcattgaatttggcgttcacgctcgtcccgtcgttctcgtcctctcaaatgacgatctcaatagcggcggcgatgataacggagtcggagagtcctctgacttcgatgagtttggagaatccgaacctaagtccgaagaggagcttgatcccggttcatggcgatcgatcttcgagccagatgactcaacagtccaagcagcctcgccgcagtactactccggcctcaaaaagattctatcggcggcgagtgagggaaatttcaggttgatggaagaagcagtggatgagatagaggctgcttcttcagctggagatccacacgcacagtcgataatggggttcgtttacgggataggaatgatgcgagagaagagcaaaagcaagtcgtttcttcaccataatttcgcagctgctggtgggaatatgcagtcgaagatggcacttgcgttcacgtatcttcgtcaagatatgcatgataaagctgttcaattatatgctgaattagcagagacagctgtcaatagttttctgatctcaaaggattctccggtggttgaaccaactagaattcatagcggaactgaagagaacaaaggtgctctaaggaaatctcgaggcgaggaggatgaagatttccagatattggaatatcaggcacagaaagggaatgctaatgcaatgtacaaaaatggactgttctactactttggcctgcgaggattaaggcgtgatcacaccaaggcattgcattggtttttgaaagcagtagataaaggagagccgaggtcaatggaacttctgggggagatatatgctagaggagctggtgttgaaagaaattataccaaggcacttgaatggcttacacttgctgcaaaagaaggtctctattcagcatttaatggaattggctacttgtatgtcaaaggctatggagtagataagaaaaactatactaaggcaagagaatattttgagaaggctgttgacaatgaagaccccagtgggcattataaccttggagttttgtatcttaaaggcatcggagtcaacagggatgtgaggcaggcaacaaaatacttctttgttgctgcaaatgctggtcaaccaaaggctttctatcaactcgccaagatgttccatactggtgttgggcttaagaagaatctggagatggcgacttcattttataagctagtagcagaaagggggccgtggagttctctctctagatgggctcttgaagcttacttaaaaggtgatgtgggtaaggctttgattttgtactcaaggatggcagagatgggttatgaagtggcacaaagtaatgctgcctggatcctcgataaatacggcgaaagaagcatgtgcatgggagtatctggattttgcacagacaaagagagacatgagcgggcacattctttgtggtggcgggcctctgaacaaggcaatgaacatgctgctctgcttattggagatgcatattactatggccggggaactgagagagattttgtgcgtgcggcagaagcatacatgcatgctaaatcacagtccaatgcgcaagcaatgttcaacctcggttacatgcatgaacatggacaaggacttccctttgatctccatttagcaaaacgttactatgatgaatcccttcagagcgatgcagccgcgagattgccagtcacacttgctctcgctagcttatggctccgtagaaactatgctgataccgtcctggtgagagttgtggattcattaccagaagtgtatccgaaggtagagacttggatagagaatgtggtgtttgaagaaggtaatgcaacaatacttacactctttgtctgtctcatcacaattctctatctccgggaaagacaacgtagacaagtcgtcgttgttgccgatccagtggctgctgacgtggcacaaccgctcgacgctgatgtggcgcaacacctcgctgcgttcccacggtaa

SEQ ID NO: 53154 - protein, 678 aa, Arabidopsis thaliana
MRILSYGIVILSLLVFSFIEFGVHARPVVLVLSNDDLNSGGDDNGVGESSDFDEFGESEPKSEEELDPGSWRSIFEPDDSTVQAASPQYYSGLKKILSAASEGNFRLMEEAVDEIEAASSAGDPHAQSIMGFVYGIGMMREKSKSKSFLHHNFAAAGGNMQSKMALAFTYLRQDMHDKAVQLYAELAETAVNSFLISKDSPVVEPTRIHSGTEENKGALRKSRGEEDEDFQILEYQAQKGNANAMYKNGLFYYFGLRGLRRDHTKALHWFLKAVDKGEPRSMELLGEIYARGAGVERNYTKALEWLTLAAKEGLYSAFNGIGYLYVKGYGVDKKNYTKAREYFEKAVDNEDPSGHYNLGVLYLKGIGVNRDVRQATKYFFVAANAGQPKAFYQLAKMFHTGVGLKKNLEMATSFYKLVAERGPWSSLSRWALEAYLKGDVGKALILYSRMAEMGYEVAQSNAAWILDKYGERSMCMGVSGFCTDKERHERAHSLWWRASEQGNEHAALLIGDAYYYGRGTERDFVRAAEAYMHAKSQSNAQAMFNLGYMHEHGQGLPFDLHLAKRYYDESLQSDAAARLPVTLALASLWLRRNYADTVLVRVVDSLPEVYPKVETWIENVVFEEGNATILTLFVCLITILYLRERQRRQVVVVADPVAADVAQPLDADVAQHLAAFPR

SEQ ID NO: 53155 - DNA, 807 bp, Pseudomonas indigofera
  CDS (1)..(807): transl_table=11
atgaaaaccctcgccccgttggcggcgctgatatccgccctgctgttacccgccgcgcacgccgccctcaccacgccccccgcccagagcgccgagcagatcgcagagcaggtcgccgccgaacagggcgatgccaatgcccagttccggctgggtgtccgctacgaaaagggctccggcgtgccacaggattttgccaaggcggcgacgtggtatcgccaggccgccacgcaagggatgcccgaggcgcaaaacaacctggccgtgctgtatctgaacggccaaggcgtaaatcagaacgatgccgaggccctcgcgtggttccgcaaggcagcaacacaggggcaggccgaggcgcaactaaaccttggcgcgatgctgatgaatggccaaggcactcccaaaaatgacgacgaggcggttgtctggacccgcaaggcggcggcacagggtcagctcatggccgactacaaccttgccataatgatgcgggaaggtcggggacttccgcaggatgacgccgcagccgtggccttgttccgcaaggttgccgagcagggagtggccatagcgcagagtaatcttggtctcatgtacaagctcgggcgaggggtagcgcaggattaccagcttgcgctgagctggttgcgcaaaggggtagcgcagaaatcggcgatggcacaagccaacctcggcgtgctgtacctggaaggcaagggtgtagcccaagacgataacgaagccgtggtctggttccgcctggctgcaggcgcgcggctaccggctggcgctggacgacgtcagtga

SEQ ID NO: 53156 - protein, 268 aa, Pseudomonas indigofera
MKTLAPLAALISALLLPAAHAALTTPPAQSAEQIAEQVAAEQGDANAQFRLGVRYEKGSGVPQDFAKAATWYRQAATQGMPEAQNNLAVLYLNGQGVNQNDAEALAWFRKAATQGQAEAQLNLGAMLMNGQGTPKNDDEAVVWTRKAAAQGQLMADYNLAIMMREGRGLPQDDAAAVALFRKVAEQGVAIAQSNLGLMYKLGRGVAQDYQLALSWLRKGVAQKSAMAQANLGVLYLEGKGVAQDDNEAVVWFRLAAGARLPAGAGRRQ

SEQ ID NO: 53157 - DNA, 3606 bp, Legionella pneumophila
  CDS (1)..(3606): transl_table=11
atgaaatcactagtaccttgggtgtgtgttttagtcgcgtcagctggccaacaggcttttgccaatgatgcgttcaatgcttatagattaggcaattataatgaagcagctgagcccctaatcattaaatcaggtcaggatgctgttgccgaatactatttagggcgactttatctctatggatatgggcagttaaaaaacaatcgtgttgcgatgcgctactttaccaaatcagcggaaaaaggctatttacctgctgtcttgctcatggccaaatacagtttgctccatgaaaaaaatccggaagaagctgctcgttggtttaagcaagcagctgcggtgggagatgtgagcgcacaaatgtatatggcggcagcttatttatatggtgttggcgtcaagaaaaatacagatatcgcaagacgttattatattgatgcagcaaaaaatggtaatcctattgctcaatacaccttagcagagtatttcttagagagtaagcatgcgggtaataaaaaattagggatcatttggctgaataaagcagcagaaaatggagatccaaaagctttaacagaattgggcagattttatgtcgccggacaaatggttgccaaggatactgccaagggcgttgaattattaaataaagcagcctcagaacaatatactccagccatgcttgagttgggtaaattggctttaatgcaaaatcaatacgatgaggctattcaatggcttaataaggccgaggaacagagtacagaagctactcttgagttagcccatatttatttacaagataaaagtccagtttatgatccaaaaacaggttttttattggtactaaaagcagctcagaacggttctgttcaagcccaaaaagaattagccaatttatatcaaaaagggattggcgtagcggctgatgaagaattgtctaaacaatggactcttaaagcagcagaaaacgagaagaaaaatgcagagcctcctgttcttgcccaagctgcattatggctaagtaatgacagaacggataaattggaagagacggcttaccagatgaatggtatatttagcccatggaataatccgtctgccctgagaaataatagctataatcaagcacctaagcttgaaaccatctctcgtcaggatattttcaaaccacaatttgagttgactcagcctaatagtattcctataagcaattactatgatgctttaatcagtaaacaagtggagtttcaatcaaatcaatgggcttatccaacttacagacttaacccatttgtagaagctctagagagagccaatagtcctgtcgtacaaaagctcaacttgccagttccttatgctgacgcgaattatgatgatgatagcgaagttggcagttttgatttgatggacatttggacaggggattggaaacggactgtcaattatatgtctgtggtcaattatttgtatttcagggcaatactcggaaatgctcaaactcaatttgaaattggtcaattgtttcaatatgggattggtttaatgcaagatgatgcttcggctattattttttatgagaatgccgcagaacaaaagcacttgggtgctgaatataatttaggaatactttatctgaaacgcggtaaagacgaaaatgattaccaacaagcattaaattggctgactgattccgcatttaaagggaataagagagcacaatacgtattggcaaggatattgcgtcaggggatcgttggtcctgatggaaaagagtatattaaagcaaatgatgagcaagctatggccatgctttatctttcagctgccaatgattatgggccggcagaatatgagttggcagaatatttggcaagagactacaacaatggtttaagtgtagatgtcagaaaacaaaaaattgccttaataagaaagttataccaaggtgctgtgaagaataaagtggcagaggcattgttgccattggcattttataatgcgatggatgataacaggcaaaagcaggaacaagcatttaaagtagccgaagagcaagctgaaacaggcaatgagaatgccgctcttttactcggaatgctctatgaccgtggtataggaataaccgctgatccagccaaagccatgtactggtatcaacaagccggacaaaatcccgtaagtcagtttatattgggcacttacatcacagaaggaaaaggggtggcacaggataaggaaaaaggattggatttgctgaagcaatcagcagactcccaattttcctatgccgactttaatctggcagtacttaaacaacaatccggggaagactttttacccaatttaattgagtcttataaattagggaatagtcatgcggggatagtattggcagattattatttatctcaaagcagtgttcctgaacaaatgaatcaagctaaggaaatttataagggcttagctgataaaggcgatcaatatgcacaattaaaattggcttatatgctacaaaaaggattgggtgctgcaccggatcttgctggcgcgcaacattggtatactgcttcggcagaacaaggcaatcctgaggcacaatacttattaggccaattttatcaactaggtgaaacaggagaacctgattataatttggccaaacactggtatcaaaaagcagcgaaacatttatctaaagctgatgtagcattaggttttatttatgaaacggtagatgataattatgctcaagcactaaaagcctatgaaaatgctgcagcaaaaggagatatgctaggcgcttataatttggctttaatgtatgagtatggcaagggcgtgcccgtcaattactccaaagcgttatctttgtttaaagaagcatcagagaaaggtgctcctgaagcgatgagtcaattggctggaatgtatttttatggtttggggcaaccaagaaacgaacaacaagctttggtctggtataagaaagctgcaagcttaggtaatgggaatgctttgtatgccctcggtttattatccgaaactggtgttggtgttaaattggattttccagatgctttacggtattaccaggatgcatctgataaaggtaatgaaaaagcaatgctggctttggcaagaatgtatcattatggtcttggtgtcgaaaaggatcataaaagatcagcgagtatttatcaaaaattggcacaaaagcaaaatgcttatgctcaatatcaattaggtacttattatattgagggaacggcaggcgaacgactacccgaaaaaggccgtgagctattacaacaagcgagtgaaaacggaagtttacaggcccgtagagtattgcaaagattagatgcacaaacccagggtaaagtaagttatgtcgagcccgtgttatttaataatgttcccaaatttgatggccaaagcgctgatatgatttattttgatgcattaaatgaatggaatcatggggaggaggttttgtccagaatgatcttgcaacgtctggtgacgcaatatcccaattttatccctgcaaagcgagcttatgagcagttgaatcaagccaaattaatgaataacttgggttaa

SEQ ID NO: 53158 - protein, 1201 aa, Legionella pneumophila
MKSLVPWVCVLVASAGQQAFANDAFNAYRLGNYNEAAEPLIIKSGQDAVAEYYLGRLYLYGYGQLKNNRVAMRYFTKSAEKGYLPAVLLMAKYSLLHEKNPEEAARWFKQAAAVGDVSAQMYMAAAYLYGVGVKKNTDIARRYYIDAAKNGNPIAQYTLAEYFLESKHAGNKKLGIIWLNKAAENGDPKALTELGRFYVAGQMVAKDTAKGVELLNKAASEQYTPAMLELGKLALMQNQYDEAIQWLNKAEEQSTEATLELAHIYLQDKSPVYDPKTGFLLVLKAAQNGSVQAQKELANLYQKGIGVAADEELSKQWTLKAAENEKKNAEPPVLAQAALWLSNDRTDKLEETAYQMNGIFSPWNNPSALRNNSYNQAPKLETISRQDIFKPQFELTQPNSIPISNYYDALISKQVEFQSNQWAYPTYRLNPFVEALERANSPVVQKLNLPVPYADANYDDDSEVGSFDLMDIWTGDWKRTVNYMSVVNYLYFRAILGNAQTQFEIGQLFQYGIGLMQDDASAIIFYENAAEQKHLGAEYNLGILYLKRGKDENDYQQALNWLTDSAFKGNKRAQYVLARILRQGIVGPDGKEYIKANDEQAMAMLYLSAANDYGPAEYELAEYLARDYNNGLSVDVRKQKIALIRKLYQGAVKNKVAEALLPLAFYNAMDDNRQKQEQAFKVAEEQAETGNENAALLLGMLYDRGIGITADPAKAMYWYQQAGQNPVSQFILGTYITEGKGVAQDKEKGLDLLKQSADSQFSYADFNLAVLKQQSGEDFLPNLIESYKLGNSHAGIVLADYYLSQSSVPEQMNQAKEIYKGLADKGDQYAQLKLAYMLQKGLGAAPDLAGAQHWYTASAEQGNPEAQYLLGQFYQLGETGEPDYNLAKHWYQKAAKHLSKADVALGFIYETVDDNYAQALKAYENAAAKGDMLGAYNLALMYEYGKGVPVNYSKALSLFKEASEKGAPEAMSQLAGMYFYGLGQPRNEQQALVWYKKAASLGNGNALYALGLLSETGVGVKLDFPDALRYYQDASDKGNEKAMLALARMYHYGLGVEKDHKRSASIYQKLAQKQNAYAQYQLGTYYIEGTAGERLPEKGRELLQQASENGSLQARRVLQRLDAQTQGKVSYVEPVLFNNVPKFDGQSADMIYFDALNEWNHGEEVLSRMILQRLVTQYPNFIPAKRAYEQLNQAKLMNNLG

SEQ ID NO: 53159 - DNA, 873 bp, Helicobacter pylori J99
  CDS (1)..(873): transl_table=11
atgttagaaaatgtcaaaaaatccctttttagggttttgtgcttgggcgcgttgtgtttaggggggctaatggcagagcaagaccctaaagagcttgtcggtttgggggcaaagagctacaaagagcaggatttcactcaggctaagaaatattttgaaaaagcttgcgatttgaaagaaaatagcgggtgttttaatttaggggtgctttattatcaagggcatggggtggaaaagaatttgaaaaaagccgcttcattttactctaaagcttgcgatttaaattacagcaatgggtgtcatttgctagggaatttatattatagcgggcaaggcgtgtcccaaaacaccaacaaagccttgcaatactactctaaagcgtgcgatttgaaatacgctgaagggtgtgcgagcttaggggggatctatcatgatggcaaagtggttactagggattttaaaaaagcggtggaatatttcactaaagcttgcgatttgaacgatggcgatggttgcacgatattagggagcttgtatgatgcaggcagaggcacgcctaaagatttgaaaaaagcgctcgcttcgtatgataaagcttgcgacttaaaagacagcccagggtgctttaacgcagggaacatgtatcatcatggcgaaggtgcggcgaagaattttaaagaggccctcgctcgttattctaaggcatgcgagttggaaaatggcggagggtgtttcaatttaggggctatgcaatacaatggcgaaggcgcaacaaggaatgaaaagcaagccatagaaaactttaaaaaaggctgtaaattaggcgctaaaggggcatgcgatattctcaagcagctcaaaatcaaagtttag

SEQ ID NO: 53160 - protein, 290 aa, Helicobacter pylori J99
MLENVKKSLFRVLCLGALCLGGLMAEQDPKELVGLGAKSYKEQDFTQAKKYFEKACDLKENSGCFNLGVLYYQGHGVEKNLKKAASFYSKACDLNYSNGCHLLGNLYYSGQGVSQNTNKALQYYSKACDLKYAEGCASLGGIYHDGKVVTRDFKKAVEYFTKACDLNDGDGCTILGSLYDAGRGTPKDLKKALASYDKACDLKDSPGCFNAGNMYHHGEGAAKNFKEALARYSKACELENGGGCFNLGAMQYNGEGATRNEKQAIENFKKGCKLGAKGACDILKQLKIKV

SEQ ID NO: 53161 - DNA, 873 bp, Helicobacter pylori
  CDS (1)..(873): transl_table=11
atgttagaaaatgtcaaaaagtccttttttagggttttgtgcttgggtgcgttgtgtttaggggggctaatggcagagcaagaccctaaagagcttgtgggtttgggggcaaagagctacaaagagaaagatttcactcaagcgaagaaatattttgagaaagcgtgcgatttgaaagaaaatagcgggtgttttaatttaggggtgctttattatcaagggcaaggggtggaaaagaacttgaaaaaagccgcctccttttacgctaaagcttgcgatttgaattacagcaatgggtgtcatttgctagggaatttatattacagcgggcaaggcgtgtcccaaaacaccaataaagccctacaatactactctaaagcgtgcgatttgaaatacgctgaagggtgcgcgagcttaggggggatttatcatgatggtaaagtggtaactagggattttaaaaaagcggtggaatatttcactaaagcgtgcgatttaaacgatggcgatggttgcacgatattagggagcttgtatgatgcaggcagaggtacgcctaaagatttgaaaaaggcgctcgcttcgtatgataaagcttgcgacttaaaagacagcccagggtgctttaacgcagggaatatgtatcatcatggcgaaggtgcaacgaagaattttaaagaggctctcgctcgttattctaaagcatgcgaattggaaaatggcggagggtgtttcaatttaggggctatgcaatacaatggcgaaggcgtaacaaggaatgaaaagcaagccatagaaaactttaaaaaaggctgtaaattgggcgctaaaggggcgtgcgatattctcaagcagcttaagatcaaagtttag

SEQ ID NO: 53162 - protein, 290 aa, Helicobacter pylori
MLENVKKSFFRVLCLGALCLGGLMAEQDPKELVGLGAKSYKEKDFTQAKKYFEKACDLKENSGCFNLGVLYYQGQGVEKNLKKAASFYAKACDLNYSNGCHLLGNLYYSGQGVSQNTNKALQYYSKACDLKYAEGCASLGGIYHDGKVVTRDFKKAVEYFTKACDLNDGDGCTILGSLYDAGRGTPKDLKKALASYDKACDLKDSPGCFNAGNMYHHGEGATKNFKEALARYSKACELENGGGCFNLGAMQYNGEGVTRNEKQAIENFKKGCKLGAKGACDILKQLKIKV

SEQ ID NO: 53163 - DNA, 918 bp, Helicobacter pylori J99
  CDS (1)..(918): transl_table=11
atgataaagagttggactaaaaagtggtttttgattttatttttaatggcaagctgttttggtcatttggtggctacaaccggtgagaaatattttaagatggctaatcaagcccttaagagaggggattaccatagagcggtggctttttataagaggagctgtaatttgaggatgggggttggttgcacgagtttaggctctatgtatgaatatggcgatggcgtggatcagaatatttcaaaagccgttttttattacagaagagggtgtaatttgaggaatcatctcgcttgcgcgagtttaggctctatgtatgaagatggcgatggcgtgcaaaaagactttccaaaggctatctattattataggagagggtgccacttaaaaggtggggtgagctgcggtagtttgggttttatgtatttcaatggtacgggcgttaaacaaaattacgccaaagccctttctttttctaaatacgcttgcagtttgaattatggcattagttgtaactttgtagggtatatgtataagagcgccaaaggcgtggagaaggatttgaaaaaagcccttgcgaattttaaaagagggtgccatttaaaagacggggcgagctgtgtgagcttgggatacttgtatgaagccggtatggatgtcaaacaaaatgaagagcaggctttgaatctttataaaaagggttgctctttaaaagaagggagcggttgtcataatgtggcggtgatgtattacacgggtaagggagctccaaaagatttggagaaagccacttcatattataagaaagggtgcgctttaggctttagtggtagttgtaaggtgttagaagtgattggcaaggagtctgataatttgcaagatgacgcgcaaaacgacacgcaagatagcgtgcaataa

SEQ ID NO: 53164 - protein, 305 aa, Helicobacter pylori J99
MIKSWTKKWFLILFLMASCFGHLVATTGEKYFKMANQALKRGDYHRAVAFYKRSCNLRMGVGCTSLGSMYEYGDGVDQNISKAVFYYRRGCNLRNHLACASLGSMYEDGDGVQKDFPKAIYYYRRGCHLKGGVSCGSLGFMYFNGTGVKQNYAKALSFSKYACSLNYGISCNFVGYMYKSAKGVEKDLKKALANFKRGCHLKDGASCVSLGYLYEAGMDVKQNEEQALNLYKKGCSLKEGSGCHNVAVMYYTGKGAPKDLEKATSYYKKGCALGFSGSCKVLEVIGKESDNLQDDAQNDTQDSVQ

SEQ ID NO: 53165 - DNA, 921 bp, Helicobacter pylori
  CDS (1)..(921): transl_table=11
atgataaagagttggactaaaaagtggtttttgattttatttttaatggcaagttgttccagttatttggtggctacaaccggtgagaaatattttaaaatggctactcaagcctttaagagaggggactaccataaagcggtggctttttataagaggagctgtaatttaagggtgggggttggttgcacgagtttaggctctatgtatgaagatggcgatggcgtggatcagaatattacaaaagccgttttttattacagaagagggtgtaatttaaggaatcatctcgcttgcgcgagtctaggctctatgtatgaagatggcgatggtgtgcaaaaaaaccttccaaaggctatctattattacaggagagggtgccacttaaagggtggggtgagctgtgggagtttaggttttatgtattttaatggcacgggcgttaagcaaaattatgccaaagccctttttctttctaaatacgcttgcagtttgaattacggcattagttgtaactttgtagggtatatgtataggaacgccaaaggcgtacagaaggatttgaaaaaagcccttgcgaattttaaaagagggtgccatttgaaagacggagcgagttgtgtgagcttgggatacatgtatgaagtcggtatggatgtcaaacaaaatggagagcaagccttgaatctttataaaaagggttgttatttaaaaagggggagcggttgtcataatgtggcggtgatgtattacaccggtaagggcgttccaaaggatttagataaagccatttcgtattataagaaaggttgcactctaggctttagtggtagctgtaaagtgttagaagaagtgattggcaagaagtctgatgatttgcaagatgacgcgcaaaacgacacgcaagatgatatgcaataa

SEQ ID NO: 53166 - protein, 306 aa, Helicobacter pylori
MIKSWTKKWFLILFLMASCSSYLVATTGEKYFKMATQAFKRGDYHKAVAFYKRSCNLRVGVGCTSLGSMYEDGDGVDQNITKAVFYYRRGCNLRNHLACASLGSMYEDGDGVQKNLPKAIYYYRRGCHLKGGVSCGSLGFMYFNGTGVKQNYAKALFLSKYACSLNYGISCNFVGYMYRNAKGVQKDLKKALANFKRGCHLKDGASCVSLGYMYEVGMDVKQNGEQALNLYKKGCYLKRGSGCHNVAVMYYTGKGVPKDLDKAISYYKKGCTLGFSGSCKVLEEVIGKKSDDLQDDAQNDTQDDMQ

SEQ ID NO: 53167 - DNA, 1068 bp, Helicobacter pylori J99
  CDS (1)..(1068): transl_table=11
atgaatatcaaaattttaaaaatattagttggagggttattttttttgagcttgaacgcccatttatgggggaaacaagacaatagctttttagggattggtgaaagagcctataaaagcgggaattattctaaagcggcgtcttattttaaaaaagcatgcaacgatggggtgagtgaaggctgcacgcaattaggaatcatttatgaaaacgggcaaggcactagaatagattataaaaaagccctagaatattataaaaccgcatgccaggctgatgatagggaagggtgttttggcttaggggggctttatgatgagggtttaggcacggctcaaaattatcaagaagccattgacgcttacgctaaggcatgcgttttaaaacaccctgagagttgctacaatttaggcatcatttatgatagaaaaatcaaaggcaatgccgctcaagcggttacttactatcaaaaaagctgtaattttgatatggctaaggggtgttatattttaggcactgcctatgaaaaaggctttttagaagtcaaacagagcaaccataaagccgttatctattatttgaaagcgtgccgattgaatgaggggcaggcttgccgagcgttagggagtttgtttgaaaatggcgatgcagggcttgatgaagattttgaagtggcgtttgattatttgcaaaaagcttgcgctttaaacaattctggtggttgcgcgagtttaggctctatgtatatgttgggcaggtatgttaaaaaagacccccaaaaggcttttaactatttcaagcaagcatgcgatatggggagcgcggtgagttgctctaggatgggctttatgtattcgcaaggggacactgtttcaaaagacttgaggaaagcccttgataattatgaaagaggttgcgatatgggcgatgaagtgggttgcttcgctctagcgggcatgtattacaacatgaaagataaagaaaacgccataatgatttatgacaagggctgtaaattgggcatgaaacaggcatgcgaaaatctcaccaaactcagggggtattag

SEQ ID NO: 53168 - protein, 355 aa, Helicobacter pylori J99
MNIKILKILVGGLFFLSLNAHLWGKQDNSFLGIGERAYKSGNYSKAASYFKKACNDGVSEGCTQLGIIYENGQGTRIDYKKALEYYKTACQADDREGCFGLGGLYDEGLGTAQNYQEAIDAYAKACVLKHPESCYNLGIIYDRKIKGNAAQAVTYYQKSCNFDMAKGCYILGTAYEKGFLEVKQSNHKAVIYYLKACRLNEGQACRALGSLFENGDAGLDEDFEVAFDYLQKACALNNSGGCASLGSMYMLGRYVKKDPQKAFNYFKQACDMGSAVSCSRMGFMYSQGDTVSKDLRKALDNYERGCDMGDEVGCFALAGMYYNMKDKENAIMIYDKGCKLGMKQACENLTKLRGY

SEQ ID NO: 53169 - DNA, 1068 bp, Helicobacter pylori
  CDS (1)..(1068): transl_table=11
atgggtgtcaaatttttaaaaatattagtttgtgggttatttttttggagcttgaacgcccatttatggggaaaacaagacaatagttttttgggggttgctgaaaaagcctataaaagcgggaattattctaaagccacatcttattttaaaaaagcatgcaacgatggggtgagtgaaggttgcacgcaattaggaatcatttatgaaaacgggcaaggcactagaatagattataaaaaagccctagaatattataaaaccgcatgccaggctgatgatagggaagggtgttttggtttaggggggctttatgatgaggggttaggcacgactcaaaattatcaagaagccattgacgcttatgctaaggcgtgcgttttaaaacaccctgagagttgctacaatttaggcattatttatgaccgaaaaatcaaaggcaatgccgatcaagcggttacctactaccaaaaaagctgtaattttgatatggctaaggggtgttatgttttgggcgtggcttatgaaaaaggctttttagaagtcaaacaaagcaaccataaagccgtcatctattatttgaaagcatgccgattggatgatgggcaggcttgtcgcgcgttagggagtttgtttgaaaatggcgatgcagggcttgatgaagattttgaagtggcgtttgattacttgcaaaaagcttgcgggttaaacaattctggtggttgcgcgagtttaggctctatgtatatgttaggcaggtatgtcaaaaaagatccccaaaaggcttttaattttttcaaacaagcatgcgatatggggagtgcggtgagttgctctaggatgggctttatgtattcccaaggggacgctgttccaaaagacttgaggaaagcccttgataattatgaaaggggttgcgatatgggcgatgaagtgggttgcttcgctctagcgggcatgtattacaacatgaaagacaaagaaaacgccataatgatttatgacaagggctgtaagctaggcatgaaacaagcatgcgaaaacctcactaaacttagggggtattga

SEQ ID NO: 53170 - protein, 355 aa, Helicobacter pylori
MGVKFLKILVCGLFFWSLNAHLWGKQDNSFLGVAEKAYKSGNYSKATSYFKKACNDGVSEGCTQLGIIYENGQGTRIDYKKALEYYKTACQADDREGCFGLGGLYDEGLGTTQNYQEAIDAYAKACVLKHPESCYNLGIIYDRKIKGNADQAVTYYQKSCNFDMAKGCYVLGVAYEKGFLEVKQSNHKAVIYYLKACRLDDGQACRALGSLFENGDAGLDEDFEVAFDYLQKACGLNNSGGCASLGSMYMLGRYVKKDPQKAFNFFKQACDMGSAVSCSRMGFMYSQGDAVPKDLRKALDNYERGCDMGDEVGCFALAGMYYNMKDKENAIMIYDKGCKLGMKQACENLTKLRGY

SEQ ID NO: 53171 - DNA, 2385 bp, Homo sapiens
  CDS (1)..(2385)
atgcgggtccggatagggctgacgctgctgctgtgtgcggtgctgctgagcttggcctcggcgtcctcggatgaagaaggcagccaggatgaatccttagattccaagactactttgacatcagatgagtcagtaaaggaccatactactgcaggcagagtagttgctggtcaaatatttcttgattcagaagaatctgaattagaatcctctattcaagaagaggaagacagcctcaagagccaagagggggaaagtgtcacagaagatatcagctttctagagtctccaaatccagaaaacaaggactatgaagagccaaagaaagtacggaaaccagctttgaccgccattgaaggcacagcacatggggagccctgccacttcccttttcttttcctagataaggagtatgatgaatgtacatcagatgggagggaagatggcagactgtggtgtgctacaacctatgactacaaagcagatgaaaagtggggcttttgtgaaactgaagaagaggctgctaagagacggcagatgcaggaagcagaaatgatgtatcaaactggaatgaaaatccttaatggaagcaataagaaaagccaaaaaagagaagcatatcggtatctccaaaaggcagcaagcatgaaccataccaaagccctggagagagtgtcatatgctcttttatttggtgattacttgccacagaatatccaggcagcgagagagatgtttgagaagctgactgaggaaggctctcccaagggacagactgctcttggctttctgtatgcctctggacttggtgttaattcaagtcaggcaaaggctcttgtatattatacatttggagctcttgggggcaatctaatagcccacatggttttgggttacagatactgggctggcatcggcgtcctccagagttgtgaatctgccctgactcactatcgtcttgttgccaatcatgttgctagtgatatctcgctaacaggaggctcagtagtacagagaatacggctgcctgatgaagtggaaaatccaggaatgaacagtggaatgctagaagaagatttgattcaatattaccagttcctagctgaaaaaggtgatgtacaagcacaggttggtcttggacaactgcacctgcacggagggcgtggagtagaacagaatcatcagagagcatttgactacttcaatttagcagcaaatgctggcaattcacatgccatggcctttttgggaaagatgtattcggaaggaagtgacattgtacctcagagtaatgagacagctctccactactttaagaaagctgctgacatgggcaacccagttggacagagtgggcttggaatggcctacctctatgggagaggagttcaagttaattatgatctagcccttaagtatttccagaaagctgctgaacaaggctgggtggatgggcagctacagcttggttccatgtactataatggcattggagtcaagagagattataaacaggccttgaagtattttaatttagcttctcagggaggccatatcttggctttctataacctagctcagatgcatgccagtggcaccggcgtgatgcgatcatgtcacactgcagtggagttgtttaagaatgtatgtgaacgaggccgttggtctgaaaggcttatgactgcctataacagctataaagatggcgattacaatgctgcagtgatccagtacctcctcctggctgaacagggctatgaagtggcacaaagcaatgcagcctttattcttgatcagagagaagcaagcattgtaggtgagaatgaaacttatcccagagctttgctacattggaacagggccgcctctcaaggctatactgtggctagaattaagctcggagactaccatttctatgggtttggcaccgatgtagattatgaaactgcatttattcattaccgtctggcttctgagcagcaacacagtgcacaagctatgtttaatctgggatatatgcatgagaaaggactgggcattaaacaggatattcaccttgcgaaacgtttttatgacatggcagctgaagccagcccagatgcacaagttccagtcttcctagccctctgcaaattgggcgtcgtctatttcttgcagtacatacgggaaacaaacattcgagatatgttcacccaacttgatatggaccagcttttgggacctgagtgggacctttacctcatgaccatcattgcgctgctgttgggaacagtcatagcttacaggcaaaggcagcaccaagacatgcctgcacccaggcctccagggccacggccagctccaccccagcaggaggggccaccagagcagcagccaccacagtaa

SEQ ID NO: 53172 - protein, 794 aa, Homo sapiens
MRVRIGLTLLLCAVLLSLASASSDEEGSQDESLDSKTTLTSDESVKDHTTAGRVVAGQIFLDSEESELESSIQEEEDSLKSQEGESVTEDISFLESPNPENKDYEEPKKVRKPALTAIEGTAHGEPCHFPFLFLDKEYDECTSDGREDGRLWCATTYDYKADEKWGFCETEEEAAKRRQMQEAEMMYQTGMKILNGSNKKSQKREAYRYLQKAASMNHTKALERVSYALLFGDYLPQNIQAAREMFEKLTEEGSPKGQTALGFLYASGLGVNSSQAKALVYYTFGALGGNLIAHMVLGYRYWAGIGVLQSCESALTHYRLVANHVASDISLTGGSVVQRIRLPDEVENPGMNSGMLEEDLIQYYQFLAEKGDVQAQVGLGQLHLHGGRGVEQNHQRAFDYFNLAANAGNSHAMAFLGKMYSEGSDIVPQSNETALHYFKKAADMGNPVGQSGLGMAYLYGRGVQVNYDLALKYFQKAAEQGWVDGQLQLGSMYYNGIGVKRDYKQALKYFNLASQGGHILAFYNLAQMHASGTGVMRSCHTAVELFKNVCERGRWSERLMTAYNSYKDGDYNAAVIQYLLLAEQGYEVAQSNAAFILDQREASIVGENETYPRALLHWNRAASQGYTVARIKLGDYHFYGFGTDVDYETAFIHYRLASEQQHSAQAMFNLGYMHEKGLGIKQDIHLAKRFYDMAAEASPDAQVPVFLALCKLGVVYFLQYIRETNIRDMFTQLDMDQLLGPEWDLYLMTIIALLLGTVIAYRQRQHQDMPAPRPPGPRPAPPQQEGPPEQQPPQ

SEQ ID NO: 53173 - DNA, 2385 bp, Mesocricetus auratus
  CDS (1)..(2385)
atgcaggtccacgtcgggctgacgttgctgctctgcgcggtgctcctgagctcggcgaccgcgtcctccgatgacgaaagtaaccaggacgaatccatagattccaagagttctttgccagccgatgagtcggtgaaggaccactccaccacaggcagagtggttgctggccagatatttgttgattctgaggacccagaggtggagtcccctcttcaggaagaggaagagagctccaagactgaggaggaagtcagtgtcggtgaagaaatcagctttgtagaatctccaagtctaagcagcaagagctatgaagaagcaaagagagcccggaaaccagttttgaccgccattgagggtacggcgcacggagagccctgccacttccctttccttttcctggataaggagtatgacgagtgcacgtcagacgggaggcaagacggcaggctgtggtgtgccacaacctatgactacaagacagatgagaagtggggcttctgcgaaactgaagaagatgctgcaaaaagacggcagatgcaggaagcagaaatgatttaccaggctgggatgaagatactgaatgggagcaacagaaagagccaaaagagagaagcatatcggtatcttcaaaaggcagcaggcatgaatcacaccaaagccctggagagagtatcctacgctctcttatttggtgattacctcacacagaatatccaggcggctaaagagatgtttgagaaactgaccgaggaaggttctcccaaaggacaaactgctcttggctttctctacgtctctggactcggtgttaattcaagtcaggcaaaggctcttgtatattatacttttggagcccttggaggcaatctgatagcccatatggttttgggttaccggtactgggctggcatcggagtcctccagagttgtgagtcggtactgacccattatcgtcttgttgccaaccatgttgctagcgatatctccctgaccggaggctcagtagtccagagaatacggctgcctgatgaagtggaaaacccagggatgaacagtgggatgctggaagaggatttgattcagtattaccagttcctggctgagaagggtgacgtgcaagcacaggttggtctgggacaactgcatctgcatggagggcgtggagtagaacagaatcaccagagagcatttgactacttcaacttagcagcaaatgctggcaattcacatgcgatggccttcctgggaaagatgtattctgaaggaagcgacatcgtccctcagagtaatgagacagcacttcactacttcaagaaagccgcggacatgggcaaccccgtgggacagagcgggcttggaatggcctacctctatggaaggggaattcaagttaattatgacctggcactcaagtatttccagaaagctgctgagcaaggctgggtggatgggcagctgcagcttggctctatgtactacaatggcattggagtcaagagagattataagcaggccttgaagtattttaatttagcatctcaaggaggccatatcctggctttctataacctggcacagatgcacgccagcggcacaggggtgatgaggtcctgtcacactgcggtggagttgtttaagaacgtgtgtgagcgaggccgctggtcggagaggctcatgactgcctacaacagctataaagacggggactacaatgctgcagtggtccagtacctcctgctggccgaacagggctacgaagtggcacagagcaacgcagccttcatccttgaccagagagaagcaaccattgtaggtgagaatgagacttaccccagagctttgctgcattggaacagggccgcctctcaaggttataccgtggctagaattaaacttggagactaccatttctatgggtttggcactgatgtggattacgagactgcttttattcattaccgactggcttcggagcaacaacacagtgcccaagctatgtttaacctgggctacatgcatgagaagggcctaggcattaaacaggatattcaccttgcaaaacgcttttatgacatggcagccgaggctagcccagatgcacaagttcctgtcttccttgcactctgcaaattgggtgtcgtctatttcttacagtacatacgggaagcaaatatccgagacatattcacccaactggatatggaccagcttctgggacccgagtgggacctttacctcatgaccatcatcgcgctcctgttgggtacggtcatagcttacagacagagacagcaccaggatgtgccggtacccaggcccccagggccatggccagctcctccccagcaggaaggaccaccagagcagcagccaccacagtag

SEQ ID NO: 53174 - protein, 794 aa, Mesocricetus auratus
MQVHVGLTLLLCAVLLSSATASSDDESNQDESIDSKSSLPADESVKDHSTTGRVVAGQIFVDSEDPEVESPLQEEEESSKTEEEVSVGEEISFVESPSLSSKSYEEAKRARKPVLTAIEGTAHGEPCHFPFLFLDKEYDECTSDGRQDGRLWCATTYDYKTDEKWGFCETEEDAAKRRQMQEAEMIYQAGMKILNGSNRKSQKREAYRYLQKAAGMNHTKALERVSYALLFGDYLTQNIQAAKEMFEKLTEEGSPKGQTALGFLYVSGLGVNSSQAKALVYYTFGALGGNLIAHMVLGYRYWAGIGVLQSCESVLTHYRLVANHVASDISLTGGSVVQRIRLPDEVENPGMNSGMLEEDLIQYYQFLAEKGDVQAQVGLGQLHLHGGRGVEQNHQRAFDYFNLAANAGNSHAMAFLGKMYSEGSDIVPQSNETALHYFKKAADMGNPVGQSGLGMAYLYGRGIQVNYDLALKYFQKAAEQGWVDGQLQLGSMYYNGIGVKRDYKQALKYFNLASQGGHILAFYNLAQMHASGTGVMRSCHTAVELFKNVCERGRWSERLMTAYNSYKDGDYNAAVVQYLLLAEQGYEVAQSNAAFILDQREATIVGENETYPRALLHWNRAASQGYTVARIKLGDYHFYGFGTDVDYETAFIHYRLASEQQHSAQAMFNLGYMHEKGLGIKQDIHLAKRFYDMAAEASPDAQVPVFLALCKLGVVYFLQYIREANIRDIFTQLDMDQLLGPEWDLYLMTIIALLLGTVIAYRQRQHQDVPVPRPPGPWPAPPQQEGPPEQQPPQ

SEQ ID NO: 53175 - DNA, 2373 bp, Mus musculus
  CDS (1)..(2373)
atgcaggtccgcgtcaggctgtcgttgctgctgctctgcgcggtgctcctgggctcggcagccgcgacctcggatgacaaaactaaccaggatgactccttagattccaagagttctttgcccacagatgagtcagtgaaggaccacaccaccacgggcaaagtagttgctggccagatatttgttgattctgaagaagcagaagtggaatcccttcttcaggacgaggaagatagctccaagacccaggaggaagagatcagctttttagaatctccgaatccaagcagcaagacctacgaagaactaaagagagtgcggaagccagtcttgactgccattgaaggtacggcgcacggggagccctgccacttccctttccttttcctggataaggagtatgatgagtgcacctcagacgggagggaagatggcagactgtggtgtgccacaacctatgactacaagacagatgagaagtggggcttctgcgaaactgaagaagatgctgccaaaagacgacagatgcaggaagcagagatgatctatcaggccgggatgaagatactgaatggaagcaataggaagagccaaaagagagaagcatatcggtaccttcagaaggcagcaggcatgaatcacaccaaagccctggagagagtgtcctatgctctcttgtttggtgattacctcacacagaatatccaggcagccaaagagatgtttgagaaactgactgaggaagggtctcccaaaggacagactggtcttggctttctctacgcttctgggcttggtgttaattcaagtcaggcaaaggctcttgtatattatactttcggagctcttggaggcaacctgatagcccatatgattttgggttaccgctactgggctggcatcggagtcctccagagttgtgagtcggcactgacccattatcgtcttgttgccaatcatgttgctagtgatatctccctaactggaggctctgtagtccagagaatacggctgcccgatgaagtggaaaacccggggatgaacagtgggatgctggaagaagacctgattcagtattaccagttcctagctgagaagggtgacgtccaagcacaggttggcctgggacagctgcatctgcatggagggcgtggagtagaacagaatcaccagagagcgtttgactacttcaacttagcagcaaatgctggcaattcacatgctatggccttcctgggaaagatgtattctgaaggaagtgacatcgtacctcagagtaatgagacggcacttcactactttaagaaagctgctgacatgggcaaccccgtgggacagagcgggcttggaatggcctacctctacggaagaggcgttcaagttaattatgacctggccctcaagtatttccagaaagctgctgagcaaggctgggtggacgggcagctgcagctcggctctatgtactacaatggcattggagtcaagagagattataagcaggccttgaagtattttaatctggcttctcaaggaggccatatcttggctttctataacctcgcacagatgcacgccagcggcacaggggtgatgcggtcctgtcacactgcagtggagttgtttaagaatgtgtgtgagcgaggtcgctggtcagagagactgatgactgcctacaacagctataaggatgaggactacaatgctgcagtggtccagtacctcctgctggctgagcagggctacgaggtggcgcagagcaacgcagccttcatcctcgaccagagagaagcaaccattgtaggtgagaatgaaacttaccccagagctttactgcattggaacagggccgcctcccaaggttacactgtggctagaattaagcttggagactaccacttctatggctttggcactgatgtggattatgagaccgcatttattcattaccgcctggcttctgagcagcagcacagcgcccaagctatgtttaacctgggctacatgcacgagaagggcctaggcattaaacaggacattcaccttgcaaaacgcttttatgacatggcagccgaagctagcccagatgcacaagtacctgtgttcctcgcactctgcaaattaggtgtcgtctatttcttacagtacatacgggaagcaaacattcgagatctattcacacaactggatatggaccagcttttgggacccgagtgggacctttacctcatgaccatcattgcactgctcttgggtacagtcatagcttacaggcagcgacagcaccaggacataccagttcccaggcccccagggccacggccggctcctccccagcaggaaggaccaccagagcagcagccaccacagtag

SEQ ID NO: 53176 - protein, 790 aa, Mus musculus
MQVRVRLSLLLLCAVLLGSAAATSDDKTNQDDSLDSKSSLPTDESVKDHTTTGKVVAGQIFVDSEEAEVESLLQDEEDSSKTQEEEISFLESPNPSSKTYEELKRVRKPVLTAIEGTAHGEPCHFPFLFLDKEYDECTSDGREDGRLWCATTYDYKTDEKWGFCETEEDAAKRRQMQEAEMIYQAGMKILNGSNRKSQKREAYRYLQKAAGMNHTKALERVSYALLFGDYLTQNIQAAKEMFEKLTEEGSPKGQTGLGFLYASGLGVNSSQAKALVYYTFGALGGNLIAHMILGYRYWAGIGVLQSCESALTHYRLVANHVASDISLTGGSVVQRIRLPDEVENPGMNSGMLEEDLIQYYQFLAEKGDVQAQVGLGQLHLHGGRGVEQNHQRAFDYFNLAANAGNSHAMAFLGKMYSEGSDIVPQSNETALHYFKKAADMGNPVGQSGLGMAYLYGRGVQVNYDLALKYFQKAAEQGWVDGQLQLGSMYYNGIGVKRDYKQALKYFNLASQGGHILAFYNLAQMHASGTGVMRSCHTAVELFKNVCERGRWSERLMTAYNSYKDEDYNAAVVQYLLLAEQGYEVAQSNAAFILDQREATIVGENETYPRALLHWNRAASQGYTVARIKLGDYHFYGFGTDVDYETAFIHYRLASEQQHSAQAMFNLGYMHEKGLGIKQDIHLAKRFYDMAAEASPDAQVPVFLALCKLGVVYFLQYIREANIRDLFTQLDMDQLLGPEWDLYLMTIIALLLGTVIAYRQRQHQDIPVPRPPGPRPAPPQQEGPPEQQPPQ

SEQ ID NO: 53177 - DNA, 1755 bp, Mimivirus
  CDS (1)..(1755)
atgaataaaaattgcgattattgtggtttaactatatattcagagacatatcataaatgtgtcgaatcatctgtgaaaatcaatgatgaaactaaaatagtcaattataaaattatcactattgatgaattgggtattttagctggtaaaaatgatcgtgaagcacaagatgaaattgtatatcgttatttgaatcaagatgctattaatttatctcaaaaaaatattaaaccaatcaattgggaaaatatcattgaacgagctattgatgaccaatattttacgtattttttattattttttgcttttgaccacgatgaatatcatgttatatttgatgtgttatttgatgtgttatttgaaaacgttaaattagctgcaaaaaccggagatagtatggcacaatataatcttggtcaaatgtattatagaggtattagtactaaaaaaaatatacaaaaagcaattaaatggataacaaagtcagcagatcaaaataataaatatggattgattaatttagctagattttatgaatatggtgatggtgtcttgttggatattgataaagcaacccaattactcgaacaagctagctgtcaaaatttttcaaaggcacaattttatttaggcagaatatacatgtataaagatccaccagattataaactagcattcaaatattatcaacaagctgcaaatcaaaaccatagtagtgcacaatattttatagccgtattttataaaactggtaaatgtgtggcgcaagattataaaaaggcagtacattggttgacattagccgctagtcaaggtttaaattcggccaaaattaaattagctgaaatgtatatgaaaggtattgatgtagaacaaaattatcataaagcttttgaattgttaaattcgtctatttatgatgatggaacaaataattattatgatgaagttgcaatgaccgagctagcgtgcatgtataaacgtggtctaggaatagaaaaaaatatatctaaagcaatttatttacatattaaatccagaaatacaaaaaatattttcaaaatatttgaaattaatactattacgtttattaatccaattaatgtcgattgcgaaaacaacaatctatctgatattgatcaattagaatctaaaattatttacaaattacaatttctaatgataaaattaaaatacgaatggagtaatatttatcacgatgatattagtaatagtttacaagaaattgaaaacagtttcacacgactgataaaattacgaatacaattaaataattccagtgcaatgattaactgtttatcgtttaagaaaaatacatcatacaaatttgacgtttttaatactaaaaatgcatatgttaattactacgtttatgatgacatatcatatataaacattggtcttaataatattaaactcgtaaacaatttccaaaaaaatcttgataaatttatgttttgtaatatatttttagatttagaactagcgttagaaaataaacacaaagaaaaaattgatgatttaataaatgctgttaaaaatgatgatcgttctcatcaattaaatattgttaaggatttggataatattaagtttgtcttatcacaaacaaaaaaaatttcatccaaattgattgggtacgtaaatattttaatgaatgacctaaaatctaatacacatattcgtaatcaacaatttcaactcgaatatgcaaatatatttggatatgattga

SEQ ID NO: 53178 - protein, 584 aa, Mimivirus
MNKNCDYCGLTIYSETYHKCVESSVKINDETKIVNYKIITIDELGILAGKNDREAQDEIVYRYLNQDAINLSQKNIKPINWENIIERAIDDQYFTYFLLFFAFDHDEYHVIFDVLFDVLFENVKLAAKTGDSMAQYNLGQMYYRGISTKKNIQKAIKWITKSADQNNKYGLINLARFYEYGDGVLLDIDKATQLLEQASCQNFSKAQFYLGRIYMYKDPPDYKLAFKYYQQAANQNHSSAQYFIAVFYKTGKCVAQDYKKAVHWLTLAASQGLNSAKIKLAEMYMKGIDVEQNYHKAFELLNSSIYDDGTNNYYDEVAMTELACMYKRGLGIEKNISKAIYLHIKSRNTKNIFKIFEINTITFINPINVDCENNNLSDIDQLESKIIYKLQFLMIKLKYEWSNIYHDDISNSLQEIENSFTRLIKLRIQLNNSSAMINCLSFKKNTSYKFDVFNTKNAYVNYYVYDDISYINIGLNNIKLVNNFQKNLDKFMFCNIFLDLELALENKHKEKIDDLINAVKNDDRSHQLNIVKDLDNIKFVLSQTKKISSKLIGYVNILMNDLKSNTHIRNQQFQLEYANIFGYD

SEQ ID NO: 53179 - DNA, 1602 bp, Mimivirus
  CDS (1)..(1602)
atggattacaagcacgttgatatccaaaaactaattgaactagccaaatatgataattatgcgcaggaagaaattgttgaacgtatgatcgtggggcaagtcaaacatgatttatggaaaaatattaatccatttgactgggaaaatttgttcgaaaaatgttatagtaatccaaaatatgtatttgtgttgttatgtgcatataaatcaatatttctttgcaaaattgatccaaaaattccaacatcaaatacaataatttatctcgaaaaaatacatcctattgtaaaacaacaagccaaaaattgtgatgttctttcccaaaataatcttggatttatgtacgaagaaggtattggaactgaaatcaaaataaataaagcaaaaatgtggtatacattatccgcaaatcaaggtttatcattcgcgcaatacaatttaggatattattactacaataaagctaagtacgaaaaaagtattaattacttccaaaaatctgcacaatcagggtattatctttcaaatttcatgttagcagaaacgtatttaaaattatctattcctaattttaatgaagctattaaaaactatttattggcagccaatcaaggatgtaacatatcccaatacagattaggtatgatttattttgaagggaaatatgttaatactgatatgaatcaagcatataaatggtttaagttatctgcaaaacaaggaaattatttttctcaatatggtttaggacgtgtttattactcgatggattctacaaaatataattgtcaaaaagccattaactgcttcattaaatcagcaaattgtggacacatatatgcacaaaaaaaattaattgaatattatgaaatcaataataatattgccgaaatgatttattggtgtgttaaatcttccgatgtagacaaaataaaaaaatacattaaaatcaatgaaaatattgagaatactagtgatattgtatattttgacttagtcagaaaaaatttagaagatgttggatcagatattctctataaatgccaattattgattatccagaataaatatttttggaaagataatgtttctctttgtcgagtaaaattatgcgaaaaattggaaaatattattttgaaatttattgattggactaataaattgcaaaataattctctactattattatcgtgtttgagttttattgatgacaatcacaatgtgtctatccgccatcaccaacatacaacaggattaataccttatgtaaaacaacatgaatttagaaacaaaaaatttatcacttttgataaagaaaatgttagttttgttaatgaaattattgatataaccaatggtactgatatgaatgaatggtttgaaagtctacaatttctgaaattaaattatcagaatttaatgaaaacatccatgaattcttctagaatttacaaagacttaatcttaatacaaaatttagagactgatatcgaaaaatattgcgaattaatgtttgatgaaattgaatatggtgtttatgatcgtaatcgtttattcatagaaaatagagaatacaatatggcgaaattgtttgataactaa

SEQ ID NO: 53180 - protein, 533 aa, Mimivirus
MDYKHVDIQKLIELAKYDNYAQEEIVERMIVGQVKHDLWKNINPFDWENLFEKCYSNPKYVFVLLCAYKSIFLCKIDPKIPTSNTIIYLEKIHPIVKQQAKNCDVLSQNNLGFMYEEGIGTEIKINKAKMWYTLSANQGLSFAQYNLGYYYYNKAKYEKSINYFQKSAQSGYYLSNFMLAETYLKLSIPNFNEAIKNYLLAANQGCNISQYRLGMIYFEGKYVNTDMNQAYKWFKLSAKQGNYFSQYGLGRVYYSMDSTKYNCQKAINCFIKSANCGHIYAQKKLIEYYEINNNIAEMIYWCVKSSDVDKIKKYIKINENIENTSDIVYFDLVRKNLEDVGSDILYKCQLLIIQNKYFWKDNVSLCRVKLCEKLENIILKFIDWTNKLQNNSLLLLSCLSFIDDNHNVSIRHHQHTTGLIPYVKQHEFRNKKFITFDKENVSFVNEIIDITNGTDMNEWFESLQFLKLNYQNLMKTSMNSSRIYKDLILIQNLETDIEKYCELMFDEIEYGVYDRNRLFIENREYNMAKLFDN

SEQ ID NO: 53181 - DNA, 1623 bp, Mimivirus
  CDS (1)..(1623)
atggaaaatttatgtgataaatgtagctctgtaatatattccaaagaatatcatcaatgtttagcaaactctactacgagaaattttatcgtgtgtaattcaacaacaatcaactatgatagtttaacaatgaaacaattatgcgaattggctaacggtggtaataaacaagttcaaaaaataattctcgataggatacaatttttttcttatggatcagttcctcataggtacattgaatttaaaaaatgggaatattttatggataaaattcctcacaaccaaaattatgttagattatatttatgttggatttattataattgtatggagattgatggttcgataatcgcacacataaaaaatttggcaaaaatgtgtaacattgatgcacaaacaaattatggtttagtaaatgaatacggtatcggtgttaaaaaaaatattaaaaaagcaataaaatggtataaattatcatgttataaagaaaatttatttggattattatttttgggttcattatatgagagaggatacggtgtttcttgtgacaaacacatggcatttaatctgtatgaaaaagcaactaaacataattatcctgcggtaaaaagacaattagcatttatgtacagaactggtagcggaacaacaaaaaatatcaataaatctcatgaattatatagagaggctgcaaatcaaggatatccattggcccaatacgcattggctttgcagtgtaaatatggacatggttgtattaaaaattataaggaagctgaaacatggttaattcggagttataataatggttgtttatatgcaacatatagtttagcaagattgtatattgaaacaaaatctccgttacgaaattactcaagagcctttgagttaatgcaagaagctgcttcagaaaattatttactggcaataaattatctggcaaaaatatataaaaatggaataggcgtcaataaaaatatatctagagcaatttattggtattacaaagccggtaattcaacaaaaattactgaattattagaaataaacaactctgtaattattaacacattagattgtaatatattcacatgtttggattcaatagagaatgaaatattgtttgacattcaattatatattttgaaatataaatacggtgataaatgtgactataatctccaattatatcaacaattagaaacgatagtttttgaatgcattaaattgagaaatgcactagataaatcttcggcattgacaacttgtttaaaaccaatcacaaaagaatatcgcgatgaattatctaagtttacgattgatacagatgtatttgtcaaacattattattttaataaacaaacatatatgacatttggaaaagcaaatgttaaattatccgatgacattatttttttcttgtcaaaaaaaccttacattaacattgttaataagttgatttgtcttaacaaaacaaatatcgatactgtcaaagatattaaatctattaattccaaactacaaaaatatgctaacttgtttgttcgatatattgaagagacagtaaatattcgcaatacaatgttccaaataaaattttcttttatttttaggtaa

SEQ ID NO: 53182 - protein, 540 aa, Mimivirus
MENLCDKCSSVIYSKEYHQCLANSTTRNFIVCNSTTINYDSLTMKQLCELANGGNKQVQKIILDRIQFFSYGSVPHRYIEFKKWEYFMDKIPHNQNYVRLYLCWIYYNCMEIDGSIIAHIKNLAKMCNIDAQTNYGLVNEYGIGVKKNIKKAIKWYKLSCYKENLFGLLFLGSLYERGYGVSCDKHMAFNLYEKATKHNYPAVKRQLAFMYRTGSGTTKNINKSHELYREAANQGYPLAQYALALQCKYGHGCIKNYKEAETWLIRSYNNGCLYATYSLARLYIETKSPLRNYSRAFELMQEAASENYLLAINYLAKIYKNGIGVNKNISRAIYWYYKAGNSTKITELLEINNSVIINTLDCNIFTCLDSIENEILFDIQLYILKYKYGDKCDYNLQLYQQLETIVFECIKLRNALDKSSALTTCLKPITKEYRDELSKFTIDTDVFVKHYYFNKQTYMTFGKANVKLSDDIIFFLSKKPYINIVNKLICLNKTNIDTVKDIKSINSKLQKYANLFVRYIEETVNIRNTMFQIKFSFIFR

SEQ ID NO: 53183 - DNA, 26 bp, Artificial sequence
  Primer sequence
atgataatgattttcacgtcaagttg

SEQ ID NO: 53184 - DNA, 26 bp, Artificial sequence
  Primer sequence
ttacagtaaatcttcagtctcacgaa

SEQ ID NO: 53185 - protein, 529 aa, Artificial sequence
  Consensus
  Variant (2)..(18): Xaa in position 2 to 18 is any amino acid
  Variant (19)..(86): Xaa in position 19 to 86 is any or no amino acid
  Variant (89)..(98): Xaa in position 89 to 98 is any amino acid
  Variant (99)..(106): Xaa in position 99 to 106 is any or no amino acid
  Variant (108)..(113): Xaa in position 108 to 113 is any amino acid
  Variant (115)..(118): Xaa in position 115 to 118 is any amino acid
  Variant (119)..(121): Xaa in position 119 to 121 is any or no amino acid
  Variant (123)..(125): Xaa in position 123 to 125 is any or no amino acid
  Variant (128)..(129): Xaa in position 128 to 129 is any amino acid
  Variant (131)..(132): Xaa in position 131 to 132 is any amino acid
  Variant (134)..(138): Xaa in position 134 to 138 is any amino acid
  Variant (139)..(285): Xaa in position 139 to 285 is any or no amino acid
  Variant (287)..(288): Xaa in position 287 to 288 is any amino acid
  Variant (291)..(292): Xaa in position 291 to 292 is any amino acid
  Variant (295)..(300): Xaa in position 295 to 300 is any amino acid
  Variant (302)..(304): Xaa in position 302 to 304 is any amino acid
  Variant (307)..(308): Xaa in position 307 to 308 is any amino acid
  Variant (310)..(311): Xaa in position 310 to 311 is any amino acid
  Variant (313)..(317): Xaa in position 313 to 317 is any amino acid
  Variant (318)..(323): Xaa in position 318 to 323 is any or no amino acid
  Variant (325)..(326): Xaa in position 325 to 326 is any amino acid
  Variant (329)..(330): Xaa in position 329 to 330 is any amino acid
  Variant (333)..(338): Xaa in position 333 to 338 is any amino acid
  Variant (340)..(342): Xaa in position 340 to 342 is any amino acid
  Variant (345)..(349): Xaa in position 345 to 349 is any amino acid
  Variant (351)..(355): Xaa in position 351 to 355 is any amino acid
  Variant (356)..(502): Xaa in position 356 to 502 is any or no amino acid
  Variant (504)..(509): Xaa in position 504 to 509 is any amino acid
  Variant (511)..(517): Xaa in position 511 to 517 is any amino acid
  Variant (519)..(521): Xaa in position 519 to 521 is any amino acid
  Variant (524)..(528): Xaa in position 524 to 528 is any amino acid
AXXXXXXXXXXXXXXXXXXXXXXXXXXXXXXXXXXXXXXXXXXXXXXXXXXXXXXXXXXXXXXXXXXXXXXXXXXXXXXXXXXXXXLGXXXXXXXXXXXXXXXXXXAXXXXXXAXXXXXXXAXXXLGXXYXXGXXXXXXXXXXXXXXXXXXXXXXXXXXXXXXXXXXXXXXXXXXXXXXXXXXXXXXXXXXXXXXXXXXXXXXXXXXXXXXXXXXXXXXXXXXXXXXXXXXXXXXXXXXXXXXXXXXXXXXXXXXXXXXXXXXXXXXXXXXXXXXXXXXXXXXXXAXXWYXXAAXXXXXXAXXXLGXXYXXGXXXXXXXXXXXAXXWYXXAAXXXXXXAXXXLGXXXXXGXXXXXXXXXXXXXXXXXXXXXXXXXXXXXXXXXXXXXXXXXXXXXXXXXXXXXXXXXXXXXXXXXXXXXXXXXXXXXXXXXXXXXXXXXXXXXXXXXXXXXXXXXXXXXXXXXXXXXXXXXXXXXXXXXXXXXXXXXXXXXXXXXXXXXXXXAXXXXXXAXXXXXXXAXXXLGXXXXXG

SEQ ID NO: 53186 - protein, 27 aa, Artificial sequence
  Consensus
  Variant (2)..(7): Xaa in position 2 to 7 is any amino acid
  Variant (8)..(8): Xaa in position 8 is Ala, Gly, Ser, Thr or Val
  Variant (9)..(9): Xaa in position 9 is Ala, Cys, Gly, Ser, Thr or Val
  Variant (10)..(15): Xaa in position 10 to 15 is any amino acid
  Variant (16)..(16): Xaa in position 16 is Ala, Cys, Gly, Ser, Thr or Val
  Variant (17)..(20): Xaa in position 17 to 20 is any amino acid
  Variant (22)..(26): Xaa in position 22 to 26 is any amino acid
AXXXXXXXXXXXXXXXXXXXGXXXXXG

SEQ ID NO: 53187 - DNA, 1473 bp, Escherichia coli; identical to SEQ ID NO: 27148
  CDS (1)..(1473)

SEQ ID NO: 53188 - protein, 490 aa, Escherichia coli; identical to SEQ ID NO: 27149

SEQ ID NO: 53189 - DNA, 1620 bp, Saccharomyces cerevisiae; identical to SEQ ID NO: 27150
  CDS (1)..(1620)

SEQ ID NO: 53190 - protein, 539 aa, Saccharomyces cerevisiae; identical to SEQ ID NO: 27151

SEQ ID NO: 53191 - DNA, 1545 bp, Mesorhizobium loti MAFF303099; identical to SEQ ID NO: 27152
  CDS (1)..(1545): transl_table=11

SEQ ID NO: 53192 - protein, 514 aa, Mesorhizobium loti MAFF303099; identical to SEQ ID NO: 27153

SEQ ID NO: 53193 - DNA, 1656 bp, Mesorhizobium loti MAFF303099; identical to SEQ ID NO: 27154
  CDS (1)..(1656): transl_table=11

SEQ ID NO: 53194 - protein, 551 aa, Mesorhizobium loti MAFF303099; identical to SEQ ID NO: 27155

SEQ ID NO: 53195 - DNA, 1518 bp, Mesorhizobium loti MAFF303099; identical to SEQ ID NO: 27156
  CDS (1)..(1518): transl_table=11

SEQ ID NO: 53196 - protein, 505 aa, Mesorhizobium loti MAFF303099; identical to SEQ ID NO: 27157

SEQ ID NO: 53197 - DNA, 1563 bp, Thermotoga maritima MSB8; identical to SEQ ID NO: 27158
  CDS (1)..(1563): transl_table=11

SEQ ID NO: 53198 - protein, 520 aa, Thermotoga maritima MSB8; identical to SEQ ID NO: 27159

SEQ ID NO: 53199 - DNA, 1452 bp, Pasteurella multocida subsp. multocida str. Pm70; identical to SEQ ID NO: 27160
  CDS (1)..(1452): transl_table=11

SEQ ID NO: 53200 - protein, 483 aa, Pasteurella multocida subsp. multocida str. Pm70; identical to SEQ ID NO: 27161

SEQ ID NO: 53201 - DNA, 1518 bp, Pasteurella multocida subsp. multocida str. Pm70; identical to SEQ ID NO: 27162
  CDS (1)..(1518): transl_table=11

SEQ ID NO: 53202 - protein, 505 aa, Pasteurella multocida subsp. multocida str. Pm70; identical to SEQ ID NO: 27163

SEQ ID NO: 53203 - DNA, 2733 bp, Pasteurella multocida subsp. multocida str. Pm70; identical to SEQ ID NO: 27164
  CDS (1)..(2733): transl_table=11

SEQ ID NO: 53204 - protein, 910 aa, Pasteurella multocida subsp. multocida str. Pm70; identical to SEQ ID NO: 27165

SEQ ID NO: 53205 - DNA, 1566 bp, Pseudomonas aeruginosa PAO1; identical to SEQ ID NO: 27166
  CDS (1)..(1566): transl_table=11

SEQ ID NO: 53206 - protein, 521 aa, Pseudomonas aeruginosa PAO1; identical to SEQ ID NO: 27167

SEQ ID NO: 53207 - DNA, 2751 bp, Pseudomonas aeruginosa PAO1; identical to SEQ ID NO: 27168
  CDS (1)..(2751): transl_table=11

SEQ ID NO: 53208 - protein, 916 aa, Pseudomonas aeruginosa PAO1; identical to SEQ ID NO: 27169

SEQ ID NO: 53209 - DNA, 1698 bp, Lactococcus lactis subsp. lactis Il1403; identical to SEQ ID NO: 27170
  CDS (1)..(1698): transl_table=11

SEQ ID NO: 53210 - protein, 565 aa, Lactococcus lactis subsp. lactis Il1403; identical to SEQ ID NO: 27171

SEQ ID NO: 53211 - DNA, 1521 bp, Lactococcus lactis subsp. lactis Il1403; identical to SEQ ID NO: 27172
  CDS (1)..(1521): transl_table=11

SEQ ID NO: 53212 - protein, 506 aa, Lactococcus lactis subsp. lactis Il1403; identical to SEQ ID NO: 27173

SEQ ID NO: 53213 - DNA, 1590 bp, Escherichia coli O157:H7 EDL933; identical to SEQ ID NO: 27174
  CDS (1)..(1590): transl_table=11

SEQ ID NO: 53214 - protein, 529 aa, Escherichia coli O157:H7 EDL933; identical to SEQ ID NO: 27175
  misc_feature (383)..(383): Xaa can be any naturally occuring amino acid

SEQ ID NO: 53215 - DNA, 1590 bp, Escherichia coli O157:H7; identical to SEQ ID NO: 27176
  CDS (1)..(1590): transl_table=11

SEQ ID NO: 53216 - protein, 529 aa, Escherichia coli O157:H7; identical to SEQ ID NO: 27177

SEQ ID NO: 53217 - DNA, 1512 bp, Escherichia coli O157:H7; identical to SEQ ID NO: 27178
  CDS (1)..(1512): transl_table=11

SEQ ID NO: 53218 - protein, 503 aa, Escherichia coli O157:H7; identical to SEQ ID NO: 27179

SEQ ID NO: 53219 - DNA, 2685 bp, Escherichia coli O157:H7; identical to SEQ ID NO: 27180
  CDS (1)..(2685): transl_table=11

SEQ ID NO: 53220 - protein, 894 aa, Escherichia coli O157:H7; identical to SEQ ID NO: 27181

SEQ ID NO: 53221 - DNA, 2793 bp, Agrobacterium tumefaciens str. C58; identical to SEQ ID NO: 27182
  CDS (1)..(2793): transl_table=11

SEQ ID NO: 53222 - protein, 930 aa, Agrobacterium tumefaciens str. C58; identical to SEQ ID NO: 27183

SEQ ID NO: 53223 - DNA, 1593 bp, Staphylococcus aureus subsp. aureus Mu50; identical to SEQ ID NO: 27184
  CDS (1)..(1593): transl_table=11

SEQ ID NO: 53224 - protein, 530 aa, Staphylococcus aureus subsp. aureus Mu50; identical to SEQ ID NO: 27185

SEQ ID NO: 53225 - DNA, 1704 bp, Sinorhizobium meliloti 1021; identical to SEQ ID NO: 27186
  CDS (1)..(1704): transl_table=11

SEQ ID NO: 53226 - protein, 567 aa, Sinorhizobium meliloti 1021; identical to SEQ ID NO: 27187

SEQ ID NO: 53227 - DNA, 1491 bp, Yersinia pestis CO92; identical to SEQ ID NO: 27188
  CDS (1)..(1491)

SEQ ID NO: 53228 - protein, 496 aa, Yersinia pestis CO92; identical to SEQ ID NO: 27189

SEQ ID NO: 53229 - DNA, 1593 bp, Yersinia pestis CO92; identical to SEQ ID NO: 27190
  CDS (1)..(1593)

SEQ ID NO: 53230 - protein, 530 aa, Yersinia pestis CO92; identical to SEQ ID NO: 27191

SEQ ID NO: 53231 - DNA, 1596 bp, Yersinia pestis CO92; identical to SEQ ID NO: 27192
  CDS (1)..(1596)

SEQ ID NO: 53232 - protein, 531 aa, Yersinia pestis CO92; identical to SEQ ID NO: 27193

SEQ ID NO: 53233 - DNA, 1515 bp, Yersinia pestis CO92; identical to SEQ ID NO: 27194
  CDS (1)..(1515)

SEQ ID NO: 53234 - protein, 504 aa, Yersinia pestis CO92; identical to SEQ ID NO: 27195

SEQ ID NO: 53235 - DNA, 1536 bp, Sinorhizobium meliloti 1021; identical to SEQ ID NO: 27196
  CDS (1)..(1536): transl_table=11

SEQ ID NO: 53236 - protein, 511 aa, Sinorhizobium meliloti 1021; identical to SEQ ID NO: 27197

SEQ ID NO: 53237 - DNA, 1647 bp, Sinorhizobium meliloti 1021; identical to SEQ ID NO: 27198
  CDS (1)..(1647): transl_table=11

SEQ ID NO: 53238 - protein, 548 aa, Sinorhizobium meliloti 1021; identical to SEQ ID NO: 27199

SEQ ID NO: 53239 - DNA, 1602 bp, Sinorhizobium meliloti 1021; identical to SEQ ID NO: 27200
  CDS (1)..(1602): transl_table=11

SEQ ID NO: 53240 - protein, 533 aa, Sinorhizobium meliloti 1021; identical to SEQ ID NO: 27201

SEQ ID NO: 53241 - DNA, 1476 bp, Salmonella typhimurium LT2; identical to SEQ ID NO: 27202
  CDS (1)..(1476): transl_table=11

SEQ ID NO: 53242 - protein, 491 aa, Salmonella typhimurium LT2; identical to SEQ ID NO: 27203

SEQ ID NO: 53243 - DNA, 1593 bp, Salmonella typhimurium LT2; identical to SEQ ID NO: 27204
  CDS (1)..(1593): transl_table=11

SEQ ID NO: 53244 - protein, 530 aa, Salmonella typhimurium LT2; identical to SEQ ID NO: 27205

SEQ ID NO: 53245 - DNA, 1872 bp, Salmonella typhimurium LT2; identical to SEQ ID NO: 27206
  CDS (1)..(1872): transl_table=11

SEQ ID NO: 53246 - protein, 623 aa, Salmonella typhimurium LT2; identical to SEQ ID NO: 27207

SEQ ID NO: 53247 - DNA, 1590 bp, Salmonella typhimurium LT2; identical to SEQ ID NO: 27208
  CDS (1)..(1590): transl_table=11

SEQ ID NO: 53248 - protein, 529 aa, Salmonella typhimurium LT2; identical to SEQ ID NO: 27209

SEQ ID NO: 53249 - DNA, 1536 bp, Salmonella typhimurium LT2; identical to SEQ ID NO: 27210
  CDS (1)..(1536): transl_table=11

SEQ ID NO: 53250 - protein, 511 aa, Salmonella typhimurium LT2; identical to SEQ ID NO: 27211

SEQ ID NO: 53251 - DNA, 1656 bp, Ralstonia solanacearum GMI1000; identical to SEQ ID NO: 27212
  CDS (1)..(1656): transl_table=11

SEQ ID NO: 53252 - protein, 551 aa, Ralstonia solanacearum GMI1000; identical to SEQ ID NO: 27213

SEQ ID NO: 53253 - DNA, 1524 bp, Agrobacterium tumefaciens str. C58; identical to SEQ ID NO: 27214
  CDS (1)..(1524): transl_table=11

SEQ ID NO: 53254 - protein, 507 aa, Agrobacterium tumefaciens str. C58; identical to SEQ ID NO: 27215

SEQ ID NO: 53255 - DNA, 1764 bp, Brucella melitensis 16M; identical to SEQ ID NO: 27216
  CDS (1)..(1764): transl_table=11

SEQ ID NO: 53256 - protein, 587 aa, Brucella melitensis 16M; identical to SEQ ID NO: 27217

SEQ ID NO: 53257 - DNA, 1464 bp, Schizosaccharomyces pombe 972h-; identical to SEQ ID NO: 27218
  CDS (1)..(1464)

SEQ ID NO: 53258 - protein, 487 aa, Schizosaccharomyces pombe 972h-; identical to SEQ ID NO: 27219

SEQ ID NO: 53259 - DNA, 1734 bp, Corynebacterium glutamicum ATCC 13032; identical to SEQ ID NO: 27220
  CDS (1)..(1734): transl_table=11

SEQ ID NO: 53260 - protein, 577 aa, Corynebacterium glutamicum ATCC 13032; identical to SEQ ID NO: 27221

SEQ ID NO: 53261 - DNA, 1644 bp, Corynebacterium glutamicum ATCC 13032; identical to SEQ ID NO: 27222
  CDS (1)..(1644): transl_table=11

SEQ ID NO: 53262 - protein, 547 aa, Corynebacterium glutamicum ATCC 13032; identical to SEQ ID NO: 27223

SEQ ID NO: 53263 - DNA, 1524 bp, Thermoanaerobacter tengcongensis MB4; identical to SEQ ID NO: 27224
  CDS (1)..(1524): transl_table=11

SEQ ID NO: 53264 - protein, 507 aa, Thermoanaerobacter tengcongensis MB4; identical to SEQ ID NO: 27225

SEQ ID NO: 53265 - DNA, 1593 bp, Staphylococcus aureus subsp. aureus MW2; identical to SEQ ID NO: 27226
  CDS (1)..(1593): transl_table=11

SEQ ID NO: 53266 - protein, 530 aa, Staphylococcus aureus subsp. aureus MW2; identical to SEQ ID NO: 27227

SEQ ID NO: 53267 - DNA, 1497 bp, Yersinia pestis KIM; identical to SEQ ID NO: 27228
  CDS (1)..(1497): transl_table=11

SEQ ID NO: 53268 - protein, 498 aa, Yersinia pestis KIM; identical to SEQ ID NO: 27229

SEQ ID NO: 53269 - DNA, 1515 bp, Yersinia pestis KIM; identical to SEQ ID NO: 27230
  CDS (1)..(1515): transl_table=11

SEQ ID NO: 53270 - protein, 504 aa, Yersinia pestis KIM; identical to SEQ ID NO: 27231

SEQ ID NO: 53271 - DNA, 1557 bp, Yersinia pestis KIM; identical to SEQ ID NO: 27232
  CDS (1)..(1557): transl_table=11

SEQ ID NO: 53272 - protein, 518 aa, Yersinia pestis KIM; identical to SEQ ID NO: 27233

SEQ ID NO: 53273 - DNA, 1542 bp, Bifidobacterium longum NCC2705; identical to SEQ ID NO: 27234
  CDS (1)..(1542): transl_table=11

SEQ ID NO: 53274 - protein, 513 aa, Bifidobacterium longum NCC2705; identical to SEQ ID NO: 27235

SEQ ID NO: 53275 - DNA, 2433 bp, Bifidobacterium longum NCC2705; identical to SEQ ID NO: 27236
  CDS (1)..(2433): transl_table=11

SEQ ID NO: 53276 - protein, 810 aa, Bifidobacterium longum NCC2705; identical to SEQ ID NO: 27237

SEQ ID NO: 53277 - DNA, 1593 bp, Shigella flexneri 2a str. 301; identical to SEQ ID NO: 27238
  CDS (1)..(1593): transl_table=11

SEQ ID NO: 53278 - protein, 530 aa, Shigella flexneri 2a str. 301; identical to SEQ ID NO: 27239

SEQ ID NO: 53279 - DNA, 1512 bp, Shigella flexneri 2a str. 301; identical to SEQ ID NO: 27240
  CDS (1)..(1512): transl_table=11

SEQ ID NO: 53280 - protein, 503 aa, Shigella flexneri 2a str. 301; identical to SEQ ID NO: 27241

SEQ ID NO: 53281 - DNA, 2736 bp, Shigella flexneri 2a str. 301; identical to SEQ ID NO: 27242
  CDS (1)..(2736): transl_table=11

SEQ ID NO: 53282 - protein, 911 aa, Shigella flexneri 2a str. 301; identical to SEQ ID NO: 27243

SEQ ID NO: 53283 - DNA, 1413 bp, Shewanella oneidensis MR-1; identical to SEQ ID NO: 27244
  CDS (1)..(1413): transl_table=11

SEQ ID NO: 53284 - protein, 470 aa, Shewanella oneidensis MR-1; identical to SEQ ID NO: 27245

SEQ ID NO: 53285 - DNA, 1380 bp, Streptococcus agalactiae NEM316; identical to SEQ ID NO: 27246
  CDS (1)..(1380): transl_table=11

SEQ ID NO: 53286 - protein, 459 aa, Streptococcus agalactiae NEM316; identical to SEQ ID NO: 27247

SEQ ID NO: 53287 - DNA, 1740 bp, Corynebacterium efficiens YS-314; identical to SEQ ID NO: 27248
  CDS (1)..(1740): transl_table=11

SEQ ID NO: 53288 - protein, 579 aa, Corynebacterium efficiens YS-314; identical to SEQ ID NO: 27249

SEQ ID NO: 53289 - DNA, 1476 bp, Corynebacterium efficiens YS-314; identical to SEQ ID NO: 27250
  CDS (1)..(1476): transl_table=11

SEQ ID NO: 53290 - protein, 491 aa, Corynebacterium efficiens YS-314; identical to SEQ ID NO: 27251

SEQ ID NO: 53291 - DNA, 2721 bp, Pseudomonas putida KT2440; identical to SEQ ID NO: 27252
  CDS (1)..(2721): transl_table=11

SEQ ID NO: 53292 - protein, 906 aa, Pseudomonas putida KT2440; identical to SEQ ID NO: 27253

SEQ ID NO: 53293 - DNA, 1485 bp, Escherichia coli CFT073; identical to SEQ ID NO: 27254
  CDS (1)..(1485): transl_table=11

SEQ ID NO: 53294 - protein, 494 aa, Escherichia coli CFT073; identical to SEQ ID NO: 27255

SEQ ID NO: 53295 - DNA, 1512 bp, Escherichia coli CFT073; identical to SEQ ID NO: 27256
  CDS (1)..(1512): transl_table=11

SEQ ID NO: 53296 - protein, 503 aa, Escherichia coli CFT073; identical to SEQ ID NO: 27257

SEQ ID NO: 53297 - DNA, 2736 bp, Escherichia coli CFT073; identical to SEQ ID NO: 27258
  CDS (1)..(2736): transl_table=11

SEQ ID NO: 53298 - protein, 911 aa, Escherichia coli CFT073; identical to SEQ ID NO: 27259

SEQ ID NO: 53299 - DNA, 1578 bp, Escherichia coli CFT073; identical to SEQ ID NO: 27260
  CDS (1)..(1578): transl_table=11

SEQ ID NO: 53300 - protein, 525 aa, Escherichia coli CFT073; identical to SEQ ID NO: 27261

SEQ ID NO: 53301 - DNA, 1542 bp, Vibrio vulnificus CMCP6; identical to SEQ ID NO: 27262
  CDS (1)..(1542): transl_table=11

SEQ ID NO: 53302 - protein, 513 aa, Vibrio vulnificus CMCP6; identical to SEQ ID NO: 27263

SEQ ID NO: 53303 - DNA, 1485 bp, Bradyrhizobium japonicum USDA 110; identical to SEQ ID NO: 27264
  CDS (1)..(1485)

SEQ ID NO: 53304 - protein, 494 aa, Bradyrhizobium japonicum USDA 110; identical to SEQ ID NO: 27265

SEQ ID NO: 53305 - DNA, 1518 bp, Clostridium tetani E88; identical to SEQ ID NO: 27266
  CDS (1)..(1518): transl_table=11

SEQ ID NO: 53306 - protein, 505 aa, Clostridium tetani E88; identical to SEQ ID NO: 27267

SEQ ID NO: 53307 - DNA, 1407 bp, Lactobacillus plantarum WCFS1; identical to SEQ ID NO: 27268
  CDS (1)..(1407): transl_table=11

SEQ ID NO: 53308 - protein, 468 aa, Lactobacillus plantarum WCFS1; identical to SEQ ID NO: 27269

SEQ ID NO: 53309 - DNA, 1629 bp, Tropheryma whipplei str. Twist; identical to SEQ ID NO: 27270
  CDS (1)..(1629): transl_table=11

SEQ ID NO: 53310 - protein, 542 aa, Tropheryma whipplei str. Twist; identical to SEQ ID NO: 27271

SEQ ID NO: 53311 - DNA, 1557 bp, Tropheryma whipplei str. Twist; identical to SEQ ID NO: 27272
  CDS (1)..(1557): transl_table=11

SEQ ID NO: 53312 - protein, 518 aa, Tropheryma whipplei str. Twist; identical to SEQ ID NO: 27273

SEQ ID NO: 53313 - DNA, 1629 bp, Tropheryma whipplei TW08/27; identical to SEQ ID NO: 27274
  CDS (1)..(1629): transl_table=11

SEQ ID NO: 53314 - protein, 542 aa, Tropheryma whipplei TW08/27; identical to SEQ ID NO: 27275

SEQ ID NO: 53315 - DNA, 1557 bp, Tropheryma whipplei TW08/27; identical to SEQ ID NO: 27276
  CDS (1)..(1557): transl_table=11

SEQ ID NO: 53316 - protein, 518 aa, Tropheryma whipplei TW08/27; identical to SEQ ID NO: 27277

SEQ ID NO: 53317 - DNA, 1584 bp, Pseudomonas syringae pv. tomato str. DC3000; identical to SEQ ID NO: 27278
  CDS (1)..(1584): transl_table=11

SEQ ID NO: 53318 - protein, 527 aa, Pseudomonas syringae pv. tomato str. DC3000; identical to SEQ ID NO: 27279

SEQ ID NO: 53319 - DNA, 1455 bp, Vibrio parahaemolyticus RIMD 2210633; identical to SEQ ID NO: 27280
  CDS (1)..(1455): transl_table=11

SEQ ID NO: 53320 - protein, 484 aa, Vibrio parahaemolyticus RIMD 2210633; identical to SEQ ID NO: 27281

SEQ ID NO: 53321 - DNA, 1632 bp, Vibrio parahaemolyticus RIMD 2210633; identical to SEQ ID NO: 27282
  CDS (1)..(1632): transl_table=11

SEQ ID NO: 53322 - protein, 543 aa, Vibrio parahaemolyticus RIMD 2210633; identical to SEQ ID NO: 27283

SEQ ID NO: 53323 - DNA, 1590 bp, Salmonella enterica subsp. enterica serovar Typhi Ty2; identical to SEQ ID NO: 27284
  CDS (1)..(1590): transl_table=11

SEQ ID NO: 53324 - protein, 529 aa, Salmonella enterica subsp. enterica serovar Typhi Ty2; identical to SEQ ID NO: 27285

SEQ ID NO: 53325 - DNA, 1596 bp, Salmonella enterica subsp. enterica serovar Typhi Ty2; identical to SEQ ID NO: 27286
  CDS (1)..(1596): transl_table=11

SEQ ID NO: 53326 - protein, 531 aa, Salmonella enterica subsp. enterica serovar Typhi Ty2; identical to SEQ ID NO: 27287

SEQ ID NO: 53327 - DNA, 1536 bp, Salmonella enterica subsp. enterica serovar Typhi Ty2; identical to SEQ ID NO: 27288
  CDS (1)..(1536): transl_table=11

SEQ ID NO: 53328 - protein, 511 aa, Salmonella enterica subsp. enterica serovar Typhi Ty2 [sequence omitted]

SEQ ID NO: 53329 - DNA, 2742 bp, Salmonella enterica subsp. enterica serovar Typhi Ty2; identical to SEQ ID NO: 27290
  CDS (1)..(2742): transl_table=11

SEQ ID NO: 53330 - protein, 913 aa, Salmonella enterica subsp. enterica serovar Typhi Ty2; identical to SEQ ID NO: 27291

SEQ ID NO: 53331 - DNA, 1470 bp, Bacteroides thetaiotaomicron VPI-5482; identical to SEQ ID NO: 27292
  CDS (1)..(1470): transl_table=11

SEQ ID NO: 53332 - protein, 489 aa, Bacteroides thetaiotaomicron VPI-5482; identical to SEQ ID NO: 27293

SEQ ID NO: 53333 - DNA, 1455 bp, Bacteroides thetaiotaomicron VPI-5482; identical to SEQ ID NO: 27294
  CDS (1)..(1455): transl_table=11

SEQ ID NO: 53334 - protein, 484 aa, Bacteroides thetaiotaomicron VPI-5482; identical to SEQ ID NO: 27295

SEQ ID NO: 53335 - DNA, 1425 bp, Enterococcus faecalis V583; identical to SEQ ID NO: 27296
  CDS (1)..(1425): transl_table=11

SEQ ID NO: 53336 - protein, 474 aa, Enterococcus faecalis V583; identical to SEQ ID NO: 27297

SEQ ID NO: 53337 - DNA, 1542 bp, Streptomyces avermitilis MA-4680; identical to SEQ ID NO: 27298
  CDS (1)..(1542)

SEQ ID NO: 53338 - protein, 513 aa, Streptomyces avermitilis MA-4680; identical to SEQ ID NO: 27299

SEQ ID NO: 53339 - DNA, 1533 bp, Bacillus cereus ATCC 14579; identical to SEQ ID NO: 27300
  CDS (1)..(1533): transl_table=11

SEQ ID NO: 53340 - protein, 510 aa, Bacillus cereus ATCC 14579; identical to SEQ ID NO: 27301

SEQ ID NO: 53341 - DNA, 2772 bp, Nitrosomonas europaea ATCC 19718; identical to SEQ ID NO: 27302
  CDS (1)..(2772): transl_table=11

SEQ ID NO: 53342 - protein, 923 aa, Nitrosomonas europaea ATCC 19718; identical to SEQ ID NO: 27303

SEQ ID NO: 53343 - DNA, 1533 bp, Bacillus anthracis str. Ames; identical to SEQ ID NO: 27304
  CDS (1)..(1533): transl_table=11

SEQ ID NO: 53344 - protein, 510 aa, Bacillus anthracis str. Ames; identical to SEQ ID NO: 27305

SEQ ID NO: 53345 - DNA, 1623 bp, Prochlorococcus marinus subsp. marinus str. CCMP1375; identical to SEQ ID NO: 27306
  CDS (1)..(1623): transl_table=11

SEQ ID NO: 53346 - protein, 540 aa, Prochlorococcus marinus subsp. marinus str. CCMP1375; identical to SEQ ID NO: 27307

SEQ ID NO: 53347 - DNA, 1635 bp, Bordetella pertussis Tohama I; identical to SEQ ID NO: 27308
  CDS (1)..(1635): transl_table=11

SEQ ID NO: 53348 - protein, 544 aa, Bordetella pertussis Tohama I; identical to SEQ ID NO: 27309

SEQ ID NO: 53349 - DNA, 1761 bp, Bordetella bronchiseptica RB50; identical to SEQ ID NO: 27310
  CDS (1)..(1761)

SEQ ID NO: 53350 - protein, 586 aa, Bordetella bronchiseptica RB50; identical to SEQ ID NO: 27311

SEQ ID NO: 53351 - DNA, 1476 bp, Photorhabdus luminescens subsp. laumondii TTO1; identical to SEQ ID NO: 27312
  CDS (1)..(1476): transl_table=11

SEQ ID NO: 53352 - protein, 491 aa, Photorhabdus luminescens subsp. laumondii TTO1; identical to SEQ ID NO: 27313

SEQ ID NO: 53353 - DNA, 1596 bp, Photorhabdus luminescens subsp. laumondii TTO1; identical to SEQ ID NO: 27314
  CDS (1)..(1596): transl_table=11

SEQ ID NO: 53354 - protein, 531 aa, Photorhabdus luminescens subsp. laumondii TTO1; identical to SEQ ID NO: 27315

SEQ ID NO: 53355 - DNA, 1536 bp, Photorhabdus luminescens subsp. laumondii TTO1; identical to SEQ ID NO: 27316
  CDS (1)..(1536): transl_table=11

SEQ ID NO: 53356 - protein, 511 aa, Photorhabdus luminescens subsp. laumondii TTO1; identical to SEQ ID NO: 27317

SEQ ID NO: 53357 - DNA, 1683 bp, Corynebacterium diphtheriae NCTC 13129; identical to SEQ ID NO: 27318
  CDS (1)..(1683): transl_table=11

SEQ ID NO: 53358 - protein, 560 aa, Corynebacterium diphtheriae NCTC 13129; identical to SEQ ID NO: 27319

SEQ ID NO: 53359 - DNA, 1443 bp, Corynebacterium diphtheriae NCTC 13129; identical to SEQ ID NO: 27320
  CDS (1)..(1443): transl_table=11

SEQ ID NO: 53360 - protein, 480 aa, Corynebacterium diphtheriae NCTC 13129; identical to SEQ ID NO: 27321

SEQ ID NO: 53361 - DNA, 2715 bp, Rhodopseudomonas palustris CGA009; identical to SEQ ID NO: 27322
  CDS (1)..(2715): transl_table=11

SEQ ID NO: 53362 - protein, 904 aa, Rhodopseudomonas palustris CGA009; identical to SEQ ID NO: 27323

SEQ ID NO: 53363 - DNA, 2796 bp, Rhodopseudomonas palustris CGA009; identical to SEQ ID NO: 27324
  CDS (1)..(2796): transl_table=11

SEQ ID NO: 53364 - protein, 931 aa, Rhodopseudomonas palustris CGA009; identical to SEQ ID NO: 27325

SEQ ID NO: 53365 - DNA, 2793 bp, Geobacter sulfurreducens PCA; identical to SEQ ID NO: 27326
  CDS (1)..(2793): transl_table=11

SEQ ID NO: 53366 - protein, 930 aa, Geobacter sulfurreducens PCA; identical to SEQ ID NO: 27327

SEQ ID NO: 53367 - DNA, 1347 bp, Lactobacillus johnsonii NCC 533; identical to SEQ ID NO: 27328
  CDS (1)..(1347): transl_table=11

SEQ ID NO: 53368 - protein, 448 aa, Lactobacillus johnsonii NCC 533; identical to SEQ ID NO: 27329

SEQ ID NO: 53369 - DNA, 1425 bp, Treponema denticola ATCC 35405; identical to SEQ ID NO: 27330
  CDS (1)..(1425): transl_table=11

SEQ ID NO: 53370 - protein, 474 aa, Treponema denticola ATCC 35405; identical to SEQ ID NO: 27331

SEQ ID NO: 53371 - DNA, 1509 bp, Treponema denticola ATCC 35405; identical to SEQ ID NO: 27332
  CDS (1)..(1509): transl_table=11

SEQ ID NO: 53372 - protein, 502 aa, Treponema denticola ATCC 35405; identical to SEQ ID NO: 27333

SEQ ID NO: 53373 - DNA, 1446 bp, Treponema denticola ATCC 35405; identical to SEQ ID NO: 27334
  CDS (1)..(1446): transl_table=11

SEQ ID NO: 53374 - protein, 481 aa, Treponema denticola ATCC 35405; identical to SEQ ID NO: 27335

SEQ ID NO: 53375 - DNA, 1509 bp, Treponema denticola ATCC 35405; identical to SEQ ID NO: 27336
  CDS (1)..(1509): transl_table=11

SEQ ID NO: 53376 - protein, 502 aa, Treponema denticola ATCC 35405; identical to SEQ ID NO: 27337

SEQ ID NO: 53377 - DNA, 1743 bp, Yersinia pestis biovar Medievalis str. 91001; identical to SEQ ID NO: 27338
  CDS (1)..(1743): transl_table=11

SEQ ID NO: 53378 - protein, 580 aa, Yersinia pestis biovar Medievalis str. 91001; identical to SEQ ID NO: 27339

SEQ ID NO: 53379 - DNA, 2085 bp, Neurospora crassa; identical to SEQ ID NO: 27340
  CDS (1)..(2085)

SEQ ID NO: 53380 - protein, 694 aa, Neurospora crassa; identical to SEQ ID NO: 27341

SEQ ID NO: 53381 - DNA, 2052 bp, Magnaporthe grisea 70-15; identical to SEQ ID NO: 27342
  CDS (1)..(2052)

SEQ ID NO: 53382 - protein, 683 aa, Magnaporthe grisea 70-15; identical to SEQ ID NO: 27343

SEQ ID NO: 53383 - DNA, 1965 bp, Gibberella zeae PH-1; identical to SEQ ID NO: 27344
  CDS (1)..(1965)

SEQ ID NO: 53384 - protein, 654 aa, Gibberella zeae PH-1; identical to SEQ ID NO: 27345

SEQ ID NO: 53385 - DNA, 2004 bp, Ustilago maydis 521; identical to SEQ ID NO: 27346
  CDS (1)..(2004)

SEQ ID NO: 53386 - protein, 667 aa, Ustilago maydis 521; identical to SEQ ID NO: 27347

SEQ ID NO: 53387 - DNA, 1635 bp, Candida glabrata CBS138; identical to SEQ ID NO: 27348
  CDS (1)..(1635)

SEQ ID NO: 53388 - protein, 544 aa, Candida glabrata CBS138; identical to SEQ ID NO: 27349

SEQ ID NO: 53389 - DNA, 1566 bp, Kluyveromyces lactis NRRL Y-1140; identical to SEQ ID NO: 27350
  CDS (1)..(1566)

SEQ ID NO: 53390 - protein, 521 aa, Kluyveromyces lactis NRRL Y-1140; identical to SEQ ID NO: 27351

SEQ ID NO: 53391 - DNA, 1641 bp, Debaryomyces hansenii CBS767; identical to SEQ ID NO: 27352
  CDS (1)..(1641)

SEQ ID NO: 53392 - protein, 546 aa, Debaryomyces hansenii CBS767; identical to SEQ ID NO: 27353

SEQ ID NO: 53393 - DNA, 1503 bp, Yarrowia lipolytica CLIB99; identical to SEQ ID NO: 27354
  CDS (1)..(1503)

SEQ ID NO: 53394 - protein, 500 aa, Yarrowia lipolytica CLIB99; identical to SEQ ID NO: 27355

SEQ ID NO: 53395 - DNA, 1632 bp, Cryptococcus neoformans var. neoformans JEC21; identical to SEQ ID NO: 27356
  CDS (1)..(1632)

SEQ ID NO: 53396 - protein, 543 aa, Cryptococcus neoformans var. neoformans JEC21; identical to SEQ ID NO: 27357

SEQ ID NO: 53397 - DNA, 1638 bp, Candida albicans SC5314; identical to SEQ ID NO: 27358
  CDS (1)..(1638): transl_table=12

SEQ ID NO: 53398 - protein, 545 aa, Candida albicans SC5314; identical to SEQ ID NO: 27359

SEQ ID NO: 53399 - DNA, 1899 bp, Desulfovibrio vulgaris subsp. vulgaris str. Hildenborough; identical to SEQ ID NO: 27360
  CDS (1)..(1899): transl_table=11

SEQ ID NO: 53400 - protein, 632 aa, Desulfovibrio vulgaris subsp. vulgaris str. Hildenborough; identical to SEQ ID NO: 27361

SEQ ID NO: 53401 - DNA, 1527 bp, Bacillus anthracis str. Sterne; identical to SEQ ID NO: 27362
  CDS (1)..(1527): transl_table=11

SEQ ID NO: 53402 - protein, 508 aa, Bacillus anthracis str. Sterne; identical to SEQ ID NO: 27363

SEQ ID NO: 53403 - DNA, 1593 bp, Staphylococcus aureus subsp. aureus MRSA252; identical to SEQ ID NO: 27364
  CDS (1)..(1593): transl_table=11

SEQ ID NO: 53404 - protein, 530 aa, Staphylococcus aureus subsp. aureus MRSA252; identical to SEQ ID NO: 27365

SEQ ID NO: 53405 - DNA, 1476 bp, Erwinia carotovora subsp. atroseptica SCRI1043; identical to SEQ ID NO: 27366
  CDS (1)..(1476)

SEQ ID NO: 53406 - protein, 491 aa, Erwinia carotovora subsp. atroseptica SCRI1043; identical to SEQ ID NO: 27367

SEQ ID NO: 53407 - DNA, 1617 bp, Erwinia carotovora subsp. atroseptica SCRI1043; identical to SEQ ID NO: 27368
  CDS (1)..(1617)

SEQ ID NO: 53408 - protein, 538 aa, Erwinia carotovora subsp. atroseptica SCRI1043; identical to SEQ ID NO: 27369

SEQ ID NO: 53409 - DNA, 1380 bp, Desulfotalea psychrophila LSv54; identical to SEQ ID NO: 27370
  CDS (1)..(1380): transl_table=11

SEQ ID NO: 53410 - protein, 459 aa, Desulfotalea psychrophila LSv54; identical to SEQ ID NO: 27371

SEQ ID NO: 53411 - DNA, 1491 bp, Yersinia pseudotuberculosis IP 32953; identical to SEQ ID NO: 27372
  CDS (1)..(1491): transl_table=11

SEQ ID NO: 53412 - protein, 496 aa, Yersinia pseudotuberculosis IP 32953; identical to SEQ ID NO: 27373

SEQ ID NO: 53413 - DNA, 1743 bp, Yersinia pseudotuberculosis IP 32953; identical to SEQ ID NO: 27374
  CDS (1)..(1743): transl_table=11

SEQ ID NO: 53414 - protein, 580 aa, Yersinia pseudotuberculosis IP 32953; identical to SEQ ID NO: 27375

SEQ ID NO: 53415 - DNA, 1593 bp, Yersinia pseudotuberculosis IP 32953; identical to SEQ ID NO: 27376
  CDS (1)..(1593): transl_table=11

SEQ ID NO: 53416 - protein, 530 aa, Yersinia pseudotuberculosis IP 32953; identical to SEQ ID NO: 27377

SEQ ID NO: 53417 - DNA, 1764 bp, Yersinia pseudotuberculosis IP 32953; identical to SEQ ID NO: 27378
  CDS (1)..(1764): transl_table=11

SEQ ID NO: 53418 - protein, 587 aa, Yersinia pseudotuberculosis IP 32953; identical to SEQ ID NO: 27379

SEQ ID NO: 53419 - DNA, 1689 bp, Symbiobacterium thermophilum IAM 14863; identical to SEQ ID NO: 27380
  CDS (1)..(1689): transl_table=11

SEQ ID NO: 53420 - protein, 562 aa, Symbiobacterium thermophilum IAM 14863; identical to SEQ ID NO: 27381

SEQ ID NO: 53421 - DNA, 1533 bp, Bacillus cereus E33L; identical to SEQ ID NO: 27382
  CDS (1)..(1533): transl_table=11

SEQ ID NO: 53422 - protein, 510 aa, Bacillus cereus E33L; identical to SEQ ID NO: 27383

SEQ ID NO: 53423 - DNA, 1470 bp, Mannheimia succiniciproducens MBEL55E; identical to SEQ ID NO: 27384
  CDS (1)..(1470): transl_table=11

SEQ ID NO: 53424 - protein, 489 aa, Mannheimia succiniciproducens MBEL55E; identical to SEQ ID NO: 27385

SEQ ID NO: 53425 - DNA, 2736 bp, Mannheimia succiniciproducens MBEL55E; identical to SEQ ID NO: 27386
  CDS (1)..(2736): transl_table=11

SEQ ID NO: 53426 - protein, 911 aa, Mannheimia succiniciproducens MBEL55E; identical to SEQ ID NO: 27387

SEQ ID NO: 53427 - DNA, 1461 bp, Bacteroides fragilis YCH46; identical to SEQ ID NO: 27388
  CDS (1)..(1461): transl_table=11

SEQ ID NO: 53428 - protein, 486 aa, Bacteroides fragilis YCH46; identical to SEQ ID NO: 27389

SEQ ID NO: 53429 - DNA, 1455 bp, Bacteroides fragilis YCH46; identical to SEQ ID NO: 27390
  CDS (1)..(1455): transl_table=11

SEQ ID NO: 53430 - protein, 484 aa, Bacteroides fragilis YCH46; identical to SEQ ID NO: 27391

SEQ ID NO: 53431 - DNA, 1650 bp, Burkholderia mallei ATCC 23344; identical to SEQ ID NO: 27392
  CDS (1)..(1650): transl_table=11

SEQ ID NO: 53432 - protein, 549 aa, Burkholderia mallei ATCC 23344; identical to SEQ ID NO: 27393

SEQ ID NO: 53433 - DNA, 3216 bp, Burkholderia mallei ATCC 23344; identical to SEQ ID NO: 27394
  CDS (1)..(3216): transl_table=11

SEQ ID NO: 53434 - protein, 1071 aa, Burkholderia mallei ATCC 23344; identical to SEQ ID NO: 27395

SEQ ID NO: 53435 - DNA, 3225 bp, Burkholderia pseudomallei K96243; identical to SEQ ID NO: 27396
  CDS (1)..(3225): transl_table=11

SEQ ID NO: 53436 - protein, 1074 aa, Burkholderia pseudomallei K96243; identical to SEQ ID NO: 27397

SEQ ID NO: 53437 - DNA, 1641 bp, Methylococcus capsulatus str. Bath; identical to SEQ ID NO: 27398
  CDS (1)..(1641): transl_table=11

SEQ ID NO: 53438 - protein, 546 aa, Methylococcus capsulatus str. Bath; identical to SEQ ID NO: 27399

SEQ ID NO: 53439 - DNA, 2724 bp, Methylococcus capsulatus str. Bath; identical to SEQ ID NO: 27400
  CDS (1)..(2724): transl_table=11

SEQ ID NO: 53440 - protein, 907 aa, Methylococcus capsulatus str. Bath; identical to SEQ ID NO: 27401

SEQ ID NO: 53441 - DNA, 1446 bp, Mycoplasma hyopneumoniae 232; identical to SEQ ID NO: 27402
  CDS (1)..(1446): transl_table=4

SEQ ID NO: 53442 - protein, 481 aa, Mycoplasma hyopneumoniae 232; identical to SEQ ID NO: 27403

SEQ ID NO: 53443 - DNA, 1686 bp, Nocardia farcinica IFM 10152; identical to SEQ ID NO: 27404
  CDS (1)..(1686): transl_table=11

SEQ ID NO: 53444 - protein, 561 aa, Nocardia farcinica IFM 10152; identical to SEQ ID NO: 27405

SEQ ID NO: 53445 - DNA, 783 bp, Streptococcus thermophilus LMG 18311; identical to SEQ ID NO: 27406
  CDS (1)..(783): transl_table=11

SEQ ID NO: 53446 - protein, 260 aa, Streptococcus thermophilus LMG 18311; identical to SEQ ID NO: 27407

SEQ ID NO: 53447 - DNA, 1707 bp, Streptococcus thermophilus CNRZ1066; identical to SEQ ID NO: 27408
  CDS (1)..(1707): transl_table=11

SEQ ID NO: 53448 - protein, 568 aa, Streptococcus thermophilus CNRZ1066; identical to SEQ ID NO: 27409

SEQ ID NO: 53449 - DNA, 1590 bp, Salmonella enterica subsp. enterica serovar Paratyphi A str. ATCC; identical to SEQ ID NO: 27410
  CDS (1)..(1590): transl_table=11

SEQ ID NO: 53450 - protein, 529 aa, Salmonella enterica subsp. enterica serovar Paratyphi A str. ATCC; identical to SEQ ID NO: 27411

SEQ ID NO: 53451 - DNA, 1572 bp, Salmonella enterica subsp. enterica serovar Paratyphi A str. ATCC; identical to SEQ ID NO: 27412
  CDS (1)..(1572): transl_table=11

SEQ ID NO: 53452 - protein, 523 aa, Salmonella enterica subsp. enterica serovar Paratyphi A str. ATCC; identical to SEQ ID NO: 27413

SEQ ID NO: 53453 - DNA, 1476 bp, Salmonella enterica subsp. enterica serovar Paratyphi A str. ATCC; identical to SEQ ID NO: 27414
  CDS (1)..(1476): transl_table=11

SEQ ID NO: 53454 - protein, 491 aa, Salmonella enterica subsp. enterica serovar Paratyphi A str. ATCC; identical to SEQ ID NO: 27415

SEQ ID NO: 53455 - DNA, 1536 bp, Salmonella enterica subsp. enterica serovar Paratyphi A str. ATCC; identical to SEQ ID NO: 27416
  CDS (1)..(1536): transl_table=11

SEQ ID NO: 53456 - protein, 511 aa, Salmonella enterica subsp. enterica serovar Paratyphi A str. ATCC; identical to SEQ ID NO: 27417

SEQ ID NO: 53457 - DNA, 1614 bp, Idiomarina loihiensis L2TR; identical to SEQ ID NO: 27418
  CDS (1)..(1614): transl_table=11

SEQ ID NO: 53458 - protein, 537 aa, Idiomarina loihiensis L2TR; identical to SEQ ID NO: 27419

SEQ ID NO: 53459 - DNA, 2919 bp, Azoarcus sp. EbN1; identical to SEQ ID NO: 27420
  CDS (1)..(2919): transl_table=11

SEQ ID NO: 53460 - protein, 972 aa, Azoarcus sp. EbN1; identical to SEQ ID NO: 27421

SEQ ID NO: 53461 - DNA, 2829 bp, Zymomonas mobilis subsp. mobilis ZM4; identical to SEQ ID NO: 27422
  CDS (1)..(2829): transl_table=11

SEQ ID NO: 53462 - protein, 942 aa, Zymomonas mobilis subsp. mobilis ZM4; identical to SEQ ID NO: 27423

SEQ ID NO: 53463 - DNA, 1593 bp, Zymomonas mobilis subsp. mobilis ZM4; identical to SEQ ID NO: 27424
  CDS (1)..(1593): transl_table=11

SEQ ID NO: 53464 - protein, 530 aa, Zymomonas mobilis subsp. mobilis ZM4; identical to SEQ ID NO: 27425

SEQ ID NO: 53465 - DNA, 1599 bp, Silicibacter pomeroyi DSS-3; identical to SEQ ID NO: 27426
  CDS (1)..(1599): transl_table=11

SEQ ID NO: 53466 - protein, 532 aa, Silicibacter pomeroyi DSS-3; identical to SEQ ID NO: 27427

SEQ ID NO: 53467 - DNA, 2727 bp, Silicibacter pomeroyi DSS-3; identical to SEQ ID NO: 27428
  CDS (1)..(2727): transl_table=11

SEQ ID NO: 53468 - protein, 908 aa, Silicibacter pomeroyi DSS-3; identical to SEQ ID NO: 27429

SEQ ID NO: 53469 - DNA, 1665 bp, Synechococcus elongatus PCC 6301; identical to SEQ ID NO: 27430
  CDS (1)..(1665): transl_table=11

SEQ ID NO: 53470 - protein, 554 aa, Synechococcus elongatus PCC 6301; identical to SEQ ID NO: 27431

SEQ ID NO: 53471 - DNA, 1593 bp, Staphylococcus aureus subsp. aureus COL; identical to SEQ ID NO: 27432
  CDS (1)..(1593): transl_table=11

SEQ ID NO: 53472 - protein, 530 aa, Staphylococcus aureus subsp. aureus COL; identical to SEQ ID NO: 27433

SEQ ID NO: 53473 - DNA, 1701 bp, Lactobacillus acidophilus NCFM; identical to SEQ ID NO: 27434
  CDS (1)..(1701): transl_table=11

SEQ ID NO: 53474 - protein, 566 aa, Lactobacillus acidophilus NCFM; identical to SEQ ID NO: 27435

SEQ ID NO: 53475 - DNA, 1560 bp, Salmonella enterica subsp. enterica serovar Choleraesuis str; identical to SEQ ID NO: 27436
  CDS (1)..(1560): transl_table=11

SEQ ID NO: 53476 - protein, 519 aa, Salmonella enterica subsp. enterica serovar Choleraesuis str; identical to SEQ ID NO: 27437

SEQ ID NO: 53477 - DNA, 1596 bp, Salmonella enterica subsp. enterica serovar Choleraesuis str; identical to SEQ ID NO: 27438
  CDS (1)..(1596): transl_table=11

SEQ ID NO: 53478 - protein, 531 aa, Salmonella enterica subsp. enterica serovar Choleraesuis str; identical to SEQ ID NO: 27439

SEQ ID NO: 53479 - DNA, 1590 bp, Salmonella enterica subsp. enterica serovar Choleraesuis str; identical to SEQ ID NO: 27440
  CDS (1)..(1590): transl_table=11

SEQ ID NO: 53480 - protein, 529 aa, Salmonella enterica subsp. enterica serovar Choleraesuis str; identical to SEQ ID NO: 27441

SEQ ID NO: 53481 - DNA, 2742 bp, Salmonella enterica subsp. enterica serovar Choleraesuis str; identical to SEQ ID NO: 27442
  CDS (1)..(2742): transl_table=11

SEQ ID NO: 53482 - protein, 913 aa, Salmonella enterica subsp. enterica serovar Choleraesuis str; identical to SEQ ID NO: 27443

SEQ ID NO: 53483 - DNA, 1584 bp, Pseudomonas syringae pv. syringae B728a; identical to SEQ ID NO: 27444
  CDS (1)..(1584)

SEQ ID NO: 53484 - protein, 527 aa, Pseudomonas syringae pv. syringae B728a; identical to SEQ ID NO: 27445

SEQ ID NO: 53485 - DNA, 1578 bp, Sulfolobus acidocaldarius DSM 639; identical to SEQ ID NO: 27446
  CDS (1)..(1578): transl_table=11

SEQ ID NO: 53486 - protein, 525 aa, Sulfolobus acidocaldarius DSM 639; identical to SEQ ID NO: 27447

SEQ ID NO: 53487 - DNA, 1374 bp, Leuconostoc mesenteroides subsp. mesenteroides ATCC 8293; identical to SEQ ID NO: 27448
  CDS (1)..(1374)

SEQ ID NO: 53488 - protein, 457 aa, Leuconostoc mesenteroides subsp. mesenteroides ATCC 8293; identical to SEQ ID NO: 27449

SEQ ID NO: 53489 - DNA, 1677 bp, Leuconostoc mesenteroides subsp. mesenteroides ATCC 8293; identical to SEQ ID NO: 27450
  CDS (1)..(1677)

SEQ ID NO: 53490 - protein, 558 aa, Leuconostoc mesenteroides subsp. mesenteroides ATCC 8293; identical to SEQ ID NO: 27451

SEQ ID NO: 53491 - DNA, 1674 bp, Bifidobacterium longum DJO10A; identical to SEQ ID NO: 27452
  CDS (1)..(1674)

SEQ ID NO: 53492 - protein, 557 aa, Bifidobacterium longum DJO10A; identical to SEQ ID NO: 27453

SEQ ID NO: 53493 - DNA, 1518 bp, Haemophilus somnus 129PT; identical to SEQ ID NO: 27454
  CDS (1)..(1518)

SEQ ID NO: 53494 - protein, 505 aa, Haemophilus somnus 129PT; identical to SEQ ID NO: 27455

SEQ ID NO: 53495 - DNA, 1566 bp, Pseudomonas syringae pv. syringae B728a; identical to SEQ ID NO: 27456
  CDS (1)..(1566)

SEQ ID NO: 53496 - protein, 521 aa, Pseudomonas syringae pv. syringae B728a; identical to SEQ ID NO: 27457

SEQ ID NO: 53497 - DNA, 1545 bp, Desulfovibrio desulfuricans G20; identical to SEQ ID NO: 27458
  CDS (1)..(1545)

SEQ ID NO: 53498 - protein, 514 aa, Desulfovibrio desulfuricans G20; identical to SEQ ID NO: 27459

SEQ ID NO: 53499 - DNA, 1473 bp, Actinobacillus pleuropneumoniae serovar 1 str. 4074; identical to SEQ ID NO: 27460
  CDS (1)..(1473)

SEQ ID NO: 53500 - protein, 490 aa, Actinobacillus pleuropneumoniae serovar 1 str. 4074; identical to SEQ ID NO: 27461

SEQ ID NO: 53501 - DNA, 2613 bp, Actinobacillus pleuropneumoniae serovar 1 str. 4074; identical to SEQ ID NO: 27462
  CDS (1)..(2613)

SEQ ID NO: 53502 - protein, 870 aa, Actinobacillus pleuropneumoniae serovar 1 str. 4074; identical to SEQ ID NO: 27463

SEQ ID NO: 53503 - DNA, 2763 bp, Dechloromonas aromatica RCB; identical to SEQ ID NO: 27464
  CDS (1)..(2763)

SEQ ID NO: 53504 - protein, 920 aa, Dechloromonas aromatica RCB; identical to SEQ ID NO: 27465

SEQ ID NO: 53505 - DNA, 1632 bp, Rhodobacter sphaeroides 2.4.1; identical to SEQ ID NO: 27466
  CDS (1)..(1632)

SEQ ID NO: 53506 - protein, 543 aa, Rhodobacter sphaeroides 2.4.1; identical to SEQ ID NO: 27467

SEQ ID NO: 53507 - DNA, 1557 bp, Burkholderia cepacia R18194; identical to SEQ ID NO: 27468
  CDS (1)..(1557)

SEQ ID NO: 53508 - protein, 518 aa, Burkholderia cepacia R18194; identical to SEQ ID NO: 27469

SEQ ID NO: 53509 - DNA, 1614 bp, Pseudomonas fluorescens PfO-1; identical to SEQ ID NO: 27470
  CDS (1)..(1614)

SEQ ID NO: 53510 - protein, 537 aa, Pseudomonas fluorescens PfO-1; identical to SEQ ID NO: 27471

SEQ ID NO: 53511 - DNA, 2721 bp, Pseudomonas fluorescens PfO-1; identical to SEQ ID NO: 27472
  CDS (1)..(2721)

SEQ ID NO: 53512 - protein, 906 aa, Pseudomonas fluorescens PfO-1; identical to SEQ ID NO: 27473

SEQ ID NO: 53513 - DNA, 1911 bp, Pseudomonas fluorescens PfO-1; identical to SEQ ID NO: 27474
  CDS (1)..(1911)

SEQ ID NO: 53514 - protein, 636 aa, Pseudomonas fluorescens PfO-1; identical to SEQ ID NO: 27475

SEQ ID NO: 53515 - DNA, 1563 bp, Pseudomonas fluorescens PfO-1; identical to SEQ ID NO: 27476
  CDS (1)..(1563)

SEQ ID NO: 53516 - protein, 520 aa, Pseudomonas fluorescens PfO-1; identical to SEQ ID NO: 27477

SEQ ID NO: 53517 - DNA, 1662 bp, Rhodospirillum rubrum; identical to SEQ ID NO: 27478
  CDS (1)..(1662)

SEQ ID NO: 53518 - protein, 553 aa, Rhodospirillum rubrum; identical to SEQ ID NO: 27479

SEQ ID NO: 53519 - DNA, 1569 bp, Burkholderia fungorum LB400; identical to SEQ ID NO: 27480
  CDS (1)..(1569)

SEQ ID NO: 53520 - protein, 522 aa, Burkholderia fungorum LB400; identical to SEQ ID NO: 27481

SEQ ID NO: 53521 - DNA, 786 bp, Thermobifida fusca; identical to SEQ ID NO: 27482
  CDS (1)..(786)

SEQ ID NO: 53522 - protein, 261 aa, Thermobifida fusca; identical to SEQ ID NO: 27483

SEQ ID NO: 53523 - DNA, 1506 bp, Cytophaga hutchinsonii; identical to SEQ ID NO: 27484
  CDS (1)..(1506)

SEQ ID NO: 53524 - protein, 501 aa, Cytophaga hutchinsonii; identical to SEQ ID NO: 27485

SEQ ID NO: 53525 - DNA, 1377 bp, Oenococcus oeni PSU-1; identical to SEQ ID NO: 27486
  CDS (1)..(1377)

SEQ ID NO: 53526 - protein, 458 aa, Oenococcus oeni PSU-1; identical to SEQ ID NO: 27487

SEQ ID NO: 53527 - DNA, 1689 bp, Oenococcus oeni PSU-1; identical to SEQ ID NO: 27488
  CDS (1)..(1689)

SEQ ID NO: 53528 - protein, 562 aa, Oenococcus oeni PSU-1; identical to SEQ ID NO: 27489

SEQ ID NO: 53529 - DNA, 1587 bp, Oenococcus oeni PSU-1; identical to SEQ ID NO: 27490
  CDS (1)..(1587)

SEQ ID NO: 53530 - protein, 528 aa, Oenococcus oeni PSU-1; identical to SEQ ID NO: 27491

SEQ ID NO: 53531 - DNA, 1653 bp, Streptococcus suis 89/1591; identical to SEQ ID NO: 27492
  CDS (1)..(1653)

SEQ ID NO: 53532 - protein, 550 aa, Streptococcus suis 89/1591; identical to SEQ ID NO: 27493

SEQ ID NO: 53533 - DNA, 2751 bp, Pseudomonas aeruginosa UCBPP-PA14; identical to SEQ ID NO: 27494
  CDS (1)..(2751)

SEQ ID NO: 53534 - protein, 916 aa, Pseudomonas aeruginosa UCBPP-PA14; identical to SEQ ID NO: 27495

SEQ ID NO: 53535 - DNA, 1671 bp, Ralstonia eutropha JMP134; identical to SEQ ID NO: 27496
  CDS (1)..(1671)

SEQ ID NO: 53536 - protein, 556 aa, Ralstonia eutropha JMP134; identical to SEQ ID NO: 27497

SEQ ID NO: 53537 - DNA, 1524 bp, Chloroflexus aurantiacus; identical to SEQ ID NO: 27498
  CDS (1)..(1524)

SEQ ID NO: 53538 - protein, 507 aa, Chloroflexus aurantiacus; identical to SEQ ID NO: 27499

SEQ ID NO: 53539 - DNA, 1845 bp, Chloroflexus aurantiacus; identical to SEQ ID NO: 27500
  CDS (1)..(1845)

SEQ ID NO: 53540 - protein, 614 aa, Chloroflexus aurantiacus; identical to SEQ ID NO: 27501

SEQ ID NO: 53541 - DNA, 1356 bp, Lactobacillus delbrueckii subsp. bulgaricus ATCC BAA-365; identical to SEQ ID NO: 27502
  CDS (1)..(1356)

SEQ ID NO: 53542 - protein, 451 aa, Lactobacillus delbrueckii subsp. bulgaricus ATCC BAA-365; identical to SEQ ID NO: 27503

SEQ ID NO: 53543 - DNA, 1677 bp, Streptococcus thermophilus LMD-9; identical to SEQ ID NO: 27504
  CDS (1)..(1677)

SEQ ID NO: 53544 - protein, 558 aa, Streptococcus thermophilus LMD-9; identical to SEQ ID NO: 27505

SEQ ID NO: 53545 - DNA, 1452 bp, Deinococcus geothermalis DSM 11300 [sequence omitted]

SEQ ID NO: 53546 - protein, 483 aa, Deinococcus geothermalis DSM 11300; identical to SEQ ID NO: 27507

SEQ ID NO: 53547 - DNA, 1437 bp, Anaeromyxobacter dehalogenans 2CP-C; identical to SEQ ID NO: 27508
  CDS (1)..(1437): transl_table=11

SEQ ID NO: 53548 - protein, 478 aa, Anaeromyxobacter dehalogenans 2CP-C; identical to SEQ ID NO: 27509

SEQ ID NO: 53549 - DNA, 2736 bp, Azotobacter vinelandii AvOP; identical to SEQ ID NO: 27510
  CDS (1)..(2736): transl_table=11

SEQ ID NO: 53550 - protein, 911 aa, Azotobacter vinelandii AvOP; identical to SEQ ID NO: 27511

SEQ ID NO: 53551 - DNA, 1590 bp, Azotobacter vinelandii AvOP; identical to SEQ ID NO: 27512
  CDS (1)..(1590): transl_table=11

SEQ ID NO: 53552 - protein, 529 aa, Azotobacter vinelandii AvOP; identical to SEQ ID NO: 27513

SEQ ID NO: 53553 - DNA, 1638 bp, Azotobacter vinelandii AvOP; identical to SEQ ID NO: 27514
  CDS (1)..(1638): transl_table=11

SEQ ID NO: 53554 - protein, 545 aa, Azotobacter vinelandii AvOP; identical to SEQ ID NO: 27515

SEQ ID NO: 53555 - DNA, 1623 bp, Burkholderia vietnamiensis G4; identical to SEQ ID NO: 27516
  CDS (1)..(1623): transl_table=11

SEQ ID NO: 53556 - protein, 540 aa, Burkholderia vietnamiensis G4; identical to SEQ ID NO: 27517

SEQ ID NO: 53557 - DNA, 2832 bp, Burkholderia vietnamiensis G4; identical to SEQ ID NO: 27518
  CDS (1)..(2832): transl_table=11

SEQ ID NO: 53558 - protein, 943 aa, Burkholderia vietnamiensis G4; identical to SEQ ID NO: 27519

SEQ ID NO: 53559 - DNA, 2829 bp, Burkholderia vietnamiensis G4; identical to SEQ ID NO: 27520
  CDS (1)..(2829): transl_table=11

SEQ ID NO: 53560 - protein, 942 aa, Burkholderia vietnamiensis G4; identical to SEQ ID NO: 27521

SEQ ID NO: 53561 - DNA, 3240 bp, Burkholderia mallei NCTC 10247; identical to SEQ ID NO: 27522
  CDS (1)..(3240)

SEQ ID NO: 53562 - protein, 1079 aa, Burkholderia mallei NCTC 10247; identical to SEQ ID NO: 27523

SEQ ID NO: 53563 - DNA, 1635 bp, Burkholderia cenocepacia AU 1054; identical to SEQ ID NO: 27524
  CDS (1)..(1635): transl_table=11

SEQ ID NO: 53564 - protein, 544 aa, Burkholderia cenocepacia AU 1054; identical to SEQ ID NO: 27525

SEQ ID NO: 53565 - DNA, 1632 bp, Burkholderia pseudomallei 1655; identical to SEQ ID NO: 27526
  CDS (1)..(1632)

SEQ ID NO: 53566 - protein, 543 aa, Burkholderia pseudomallei 1655; identical to SEQ ID NO: 27527

SEQ ID NO: 53567 - DNA, 2727 bp, Chromohalobacter salexigens DSM 3043; identical to SEQ ID NO: 27528
  CDS (1)..(2727): transl_table=11

SEQ ID NO: 53568 - protein, 908 aa, Chromohalobacter salexigens DSM 3043; identical to SEQ ID NO: 27529

SEQ ID NO: 53569 - DNA, 1680 bp, Chromohalobacter salexigens DSM 3043; identical to SEQ ID NO: 27530
  CDS (1)..(1680): transl_table=11

SEQ ID NO: 53570 - protein, 559 aa, Chromohalobacter salexigens DSM 3043; identical to SEQ ID NO: 27531

SEQ ID NO: 53571 - DNA, 1650 bp, Burkholderia pseudomallei 1710a; identical to SEQ ID NO: 27532
  CDS (1)..(1650)

SEQ ID NO: 53572 - protein, 549 aa, Burkholderia pseudomallei 1710a; identical to SEQ ID NO: 27533

SEQ ID NO: 53573 - DNA, 1650 bp, Burkholderia pseudomallei 668; identical to SEQ ID NO: 27534
  CDS (1)..(1650)

SEQ ID NO: 53574 - protein, 549 aa, Burkholderia pseudomallei 668; identical to SEQ ID NO: 27535

SEQ ID NO: 53575 - DNA, 3261 bp, Burkholderia pseudomallei Pasteur; identical to SEQ ID NO: 27536
  CDS (1)..(3261): Xaa of translated CDS can stand for any naturally occuring amino acid which can be translated from respective CDS-codon

SEQ ID NO: 53576 - protein, 1086 aa, Burkholderia pseudomallei Pasteur; identical to SEQ ID NO: 27537
  misc_feature (459)..(459): Xaa can be any naturally occuring amino acid
  misc_feature (489)..(489): Xaa can be any naturally occuring amino acid

SEQ ID NO: 53577 - DNA, 1692 bp, Polaromonas sp. JS666; identical to SEQ ID NO: 27538
  CDS (1)..(1692): transl_table=11

SEQ ID NO: 53578 - protein, 563 aa, Polaromonas sp. JS666; identical to SEQ ID NO: 27539

SEQ ID NO: 53579 - DNA, 1668 bp, Polaromonas sp. JS666; identical to SEQ ID NO: 27540
  CDS (1)..(1668): transl_table=11

SEQ ID NO: 53580 - protein, 555 aa, Polaromonas sp. JS666; identical to SEQ ID NO: 27541

SEQ ID NO: 53581 - DNA, 1560 bp, Exiguobacterium sp. 255-15; identical to SEQ ID NO: 27542
  CDS (1)..(1560): transl_table=11

SEQ ID NO: 53582 - protein, 519 aa, Exiguobacterium sp. 255-15; identical to SEQ ID NO: 27543

SEQ ID NO: 53583 - DNA, 1506 bp, Methanosarcina barkeri str. fusaro; identical to SEQ ID NO: 27544
  CDS (1)..(1506): transl_table=11

SEQ ID NO: 53584 - protein, 501 aa, Methanosarcina barkeri str. fusaro; identical to SEQ ID NO: 27545

SEQ ID NO: 53585 - DNA, 1449 bp, Desulfuromonas acetoxidans DSM 684; identical to SEQ ID NO: 27546
  CDS (1)..(1449): transl_table=11

SEQ ID NO: 53586 - protein, 482 aa, Desulfuromonas acetoxidans DSM 684; identical to SEQ ID NO: 27547

SEQ ID NO: 53587 - DNA, 1584 bp, Jannaschia sp. CCS1; identical to SEQ ID NO: 27548
  CDS (1)..(1584): transl_table=11

SEQ ID NO: 53588 - protein, 527 aa, Jannaschia sp. CCS1; identical to SEQ ID NO: 27549

SEQ ID NO: 53589 - DNA, 1503 bp, Desulfitobacterium hafniense DCB-2; identical to SEQ ID NO: 27550
  CDS (1)..(1503): transl_table=11

SEQ ID NO: 53590 - protein, 500 aa, Desulfitobacterium hafniense DCB-2; identical to SEQ ID NO: 27551

SEQ ID NO: 53591 - DNA, 2766 bp, Methylobacillus flagellatus KT; identical to SEQ ID NO: 27552
  CDS (1)..(2766): transl_table=11

SEQ ID NO: 53592 - protein, 921 aa, Methylobacillus flagellatus KT; identical to SEQ ID NO: 27553

SEQ ID NO: 53593 - DNA, 1602 bp, Methylobacillus flagellatus KT; identical to SEQ ID NO: 27554
  CDS (1)..(1602): transl_table=11

SEQ ID NO: 53594 - protein, 533 aa, Methylobacillus flagellatus KT; identical to SEQ ID NO: 27555

SEQ ID NO: 53595 - DNA, 1518 bp, Frankia sp. EAN1pec; identical to SEQ ID NO: 27556
  CDS (1)..(1518): transl_table=11

SEQ ID NO: 53596 - protein, 505 aa, Frankia sp. EAN1pec; identical to SEQ ID NO: 27557

SEQ ID NO: 53597 - DNA, 1497 bp, Shewanella baltica OS155; identical to SEQ ID NO: 27558
  CDS (1)..(1497): transl_table=11

SEQ ID NO: 53598 - protein, 498 aa, Shewanella baltica OS155; identical to SEQ ID NO: 27559

SEQ ID NO: 53599 - DNA, 1596 bp, Shewanella amazonensis SB2B; identical to SEQ ID NO: 27560
  CDS (1)..(1596): transl_table=11

SEQ ID NO: 53600 - protein, 531 aa, Shewanella amazonensis SB2B; identical to SEQ ID NO: 27561

SEQ ID NO: 53601 - DNA, 2760 bp, Ralstonia metallidurans CH34; identical to SEQ ID NO: 27562
  CDS (1)..(2760): transl_table=11

SEQ ID NO: 53602 - protein, 919 aa, Ralstonia metallidurans CH34; identical to SEQ ID NO: 27563

SEQ ID NO: 53603 - DNA, 1635 bp, Mesorhizobium sp. BNC1; identical to SEQ ID NO: 27564
  CDS (1)..(1635): transl_table=11

SEQ ID NO: 53604 - protein, 544 aa, Mesorhizobium sp. BNC1; identical to SEQ ID NO: 27565

SEQ ID NO: 53605 - DNA, 1629 bp, Mesorhizobium sp. BNC1; identical to SEQ ID NO: 27566
  CDS (1)..(1629): transl_table=11

SEQ ID NO: 53606 - protein, 542 aa, Mesorhizobium sp. BNC1; identical to SEQ ID NO: 27567

SEQ ID NO: 53607 - DNA, 1656 bp, Kineococcus radiotolerans SRS30216; identical to SEQ ID NO: 27568
  CDS (1)..(1656): transl_table=11

SEQ ID NO: 53608 - protein, 551 aa, Kineococcus radiotolerans SRS30216; identical to SEQ ID NO: 27569

SEQ ID NO: 53609 - DNA, 1593 bp, Silicibacter sp. TM1040; identical to SEQ ID NO: 27570
  CDS (1)..(1593): transl_table=11

SEQ ID NO: 53610 - protein, 530 aa, Silicibacter sp. TM1040; identical to SEQ ID NO: 27571

SEQ ID NO: 53611 - DNA, 1614 bp, Paracoccus denitrificans PD1222; identical to SEQ ID NO: 27572
  CDS (1)..(1614): transl_table=11

SEQ ID NO: 53612 - protein, 537 aa, Paracoccus denitrificans PD1222; identical to SEQ ID NO: 27573

SEQ ID NO: 53613 - DNA, 2517 bp, Paracoccus denitrificans PD1222; identical to SEQ ID NO: 27574
  CDS (1)..(2517): transl_table=11

SEQ ID NO: 53614 - protein, 838 aa, Paracoccus denitrificans PD1222; identical to SEQ ID NO: 27575

SEQ ID NO: 53615 - DNA, 1383 bp, Paracoccus denitrificans PD1222; identical to SEQ ID NO: 27576
  CDS (1)..(1383): transl_table=11

SEQ ID NO: 53616 - protein, 460 aa, Paracoccus denitrificans PD1222; identical to SEQ ID NO: 27577

SEQ ID NO: 53617 - DNA, 1470 bp, Shewanella frigidimarina NCIMB 400; identical to SEQ ID NO: 27578
  CDS (1)..(1470): transl_table=11

SEQ ID NO: 53618 - protein, 489 aa, Shewanella frigidimarina NCIMB 400; identical to SEQ ID NO: 27579

SEQ ID NO: 53619 - DNA, 2757 bp, Shewanella frigidimarina NCIMB 400; identical to SEQ ID NO: 27580
  CDS (1)..(2757): transl_table=11

SEQ ID NO: 53620 - protein, 918 aa, Shewanella frigidimarina NCIMB 400; identical to SEQ ID NO: 27581

SEQ ID NO: 53621 - DNA, 1611 bp, Burkholderia mallei JHU; identical to SEQ ID NO: 27582
  CDS (1)..(1611)

SEQ ID NO: 53622 - protein, 536 aa, Burkholderia mallei JHU; identical to SEQ ID NO: 27583

SEQ ID NO: 53623 - DNA, 1587 bp, Pseudomonas fluorescens; identical to SEQ ID NO: 27584
  CDS (1)..(1587): transl_table=11

SEQ ID NO: 53624 - protein, 528 aa, Pseudomonas fluorescens; identical to SEQ ID NO: 27585

SEQ ID NO: 53625 - DNA, 1632 bp, Cryptococcus neoformans var; identical to SEQ ID NO: 27586
  CDS (1)..(1632)

SEQ ID NO: 53626 - protein, 543 aa, Cryptococcus neoformans var; identical to SEQ ID NO: 27587

SEQ ID NO: 53627 - DNA, 1518 bp, Thermoanaerobacter ethanolicus; identical to SEQ ID NO: 27588
  CDS (1)..(1518): transl_table=11

SEQ ID NO: 53628 - protein, 505 aa, Thermoanaerobacter ethanolicus; identical to SEQ ID NO: 27589

SEQ ID NO: 53629 - DNA, 1515 bp, Bifidobacterium longum bv; identical to SEQ ID NO: 27590
  CDS (1)..(1515): transl_table=11

SEQ ID NO: 53630 - protein, 504 aa, Bifidobacterium longum bv; identical to SEQ ID NO: 27591

SEQ ID NO: 53631 - DNA, 2691 bp, Salmonella typhimurium; identical to SEQ ID NO: 27592
  CDS (1)..(2691): transl_table=11

SEQ ID NO: 53632 - protein, 896 aa, Salmonella typhimurium; identical to SEQ ID NO: 27593

SEQ ID NO: 53633 - DNA, 1476 bp, Treponema denticola; identical to SEQ ID NO: 27594
  CDS (1)..(1476): transl_table=11

SEQ ID NO: 53634 - protein, 491 aa, Treponema denticola; identical to SEQ ID NO: 27595

SEQ ID NO: 53635 - DNA, 1473 bp, Bacillus subtilis; identical to SEQ ID NO: 27596
  CDS (1)..(1473): transl_table=11

SEQ ID NO: 53636 - protein, 490 aa, Bacillus subtilis; identical to SEQ ID NO: 27597

SEQ ID NO: 53637 - DNA, 1707 bp, Enterococcus faecalis; identical to SEQ ID NO: 27598
  CDS (1)..(1707): transl_table=11

SEQ ID NO: 53638 - protein, 568 aa, Enterococcus faecalis; identical to SEQ ID NO: 27599

SEQ ID NO: 53639 - DNA, 1722 bp, Lactobacillus johnsonii; identical to SEQ ID NO: 27600
  CDS (1)..(1722): transl_table=11

SEQ ID NO: 53640 - protein, 573 aa, Lactobacillus johnsonii; identical to SEQ ID NO: 27601

SEQ ID NO: 53641 - DNA, 1584 bp, Oceanobacillus iheyensis; identical to SEQ ID NO: 27602
  CDS (1)..(1584): transl_table=11

SEQ ID NO: 53642 - protein, 527 aa, Oceanobacillus iheyensis; identical to SEQ ID NO: 27603

SEQ ID NO: 53643 - DNA, 1677 bp, Streptococcus agalactiae serotype III; identical to SEQ ID NO: 27604
  CDS (1)..(1677): transl_table=11

SEQ ID NO: 53644 - protein, 558 aa, Streptococcus agalactiae serotype III; identical to SEQ ID NO: 27605

SEQ ID NO: 53645 - DNA, 1677 bp, Streptococcus agalactiae serotype V; identical to SEQ ID NO: 27606
  CDS (1)..(1677): transl_table=11

SEQ ID NO: 53646 - protein, 558 aa, Streptococcus agalactiae serotype V; identical to SEQ ID NO: 27607

SEQ ID NO: 53647 - DNA, 1677 bp, Streptococcus mutans; identical to SEQ ID NO: 27608
  CDS (1)..(1677): transl_table=11

SEQ ID NO: 53648 - protein, 558 aa, Streptococcus mutans; identical to SEQ ID NO: 27609

SEQ ID NO: 53649 - DNA, 1683 bp, Streptococcus pneumoniae; identical to SEQ ID NO: 27610
  CDS (1)..(1683)

SEQ ID NO: 53650 - protein, 560 aa, Streptococcus pneumoniae; identical to SEQ ID NO: 27611

SEQ ID NO: 53651 - DNA, 1683 bp, Streptococcus pneumoniae; identical to SEQ ID NO: 27612
  CDS (1)..(1683): transl_table=11

SEQ ID NO: 53652 - protein, 560 aa, Streptococcus pneumoniae; identical to SEQ ID NO: 27613

SEQ ID NO: 53653 - DNA, 1707 bp, Clostridium perfringens; identical to SEQ ID NO: 27614
  CDS (1)..(1707): transl_table=11

SEQ ID NO: 53654 - protein, 568 aa, Clostridium perfringens; identical to SEQ ID NO: 27615

SEQ ID NO: 53655 - DNA, 1701 bp, Lactobacillus plantarum; identical to SEQ ID NO: 27616
  CDS (1)..(1701): transl_table=11

SEQ ID NO: 53656 - protein, 566 aa, Lactobacillus plantarum; identical to SEQ ID NO: 27617

SEQ ID NO: 53657 - DNA, 1587 bp, Methanosarcina acetivorans; identical to SEQ ID NO: 27618
  CDS (1)..(1587): transl_table=11

SEQ ID NO: 53658 - protein, 528 aa, Methanosarcina acetivorans; identical to SEQ ID NO: 27619

SEQ ID NO: 53659 - DNA, 2343 bp, Bifidobacterium longum; identical to SEQ ID NO: 27620
  CDS (1)..(2343)

SEQ ID NO: 53660 - protein, 780 aa, Bifidobacterium longum; identical to SEQ ID NO: 27621

SEQ ID NO: 53661 - DNA, 1695 bp, Photobacterium profundum; identical to SEQ ID NO: 27622
  CDS (1)..(1695): transl_table=11

SEQ ID NO: 53662 - protein, 564 aa, Photobacterium profundum; identical to SEQ ID NO: 27623

SEQ ID NO: 53663 - DNA, 1740 bp, Vibrio parahaemolyticus; identical to SEQ ID NO: 27624
  CDS (1)..(1740): transl_table=11

SEQ ID NO: 53664 - protein, 579 aa, Vibrio parahaemolyticus; identical to SEQ ID NO: 27625

SEQ ID NO: 53665 - DNA, 1725 bp, Vibrio vulnificus; identical to SEQ ID NO: 27626
  CDS (1)..(1725): transl_table=11

SEQ ID NO: 53666 - protein, 574 aa, Vibrio vulnificus; identical to SEQ ID NO: 27627

SEQ ID NO: 53667 - DNA, 1593 bp, Escherichia coli O157; identical to SEQ ID NO: 27628
  CDS (1)..(1593): transl_table=11

SEQ ID NO: 53668 - protein, 530 aa, Escherichia coli O157; identical to SEQ ID NO: 27629

SEQ ID NO: 53669 - DNA, 1590 bp, Escherichia coli; identical to SEQ ID NO: 27630
  CDS (1)..(1590): transl_table=11

SEQ ID NO: 53670 - protein, 529 aa, Escherichia coli; identical to SEQ ID NO: 27631

SEQ ID NO: 53671 - DNA, 1512 bp, Escherichia coli; identical to SEQ ID NO: 27632
  CDS (1)..(1512): transl_table=11

SEQ ID NO: 53672 - protein, 503 aa, Escherichia coli; identical to SEQ ID NO: 27633

SEQ ID NO: 53673 - DNA, 25 bp, Artificial sequence
  Primer sequence
atgtcatcgttgcaaattttgcaag

SEQ ID NO: 53674 - DNA, 28 bp, Artificial sequence
  Primer sequence
ttaatatatttttgtcagcacatagcga

SEQ ID NO: 53675 - protein, 762 aa, Artificial sequence; identical to SEQ ID NO: 27636
  Consensus
  Variant (2)..(4): Xaa in position 2 to 4 is any amino acid
  Variant (6)..(7): Xaa in position 6 to 7 is any amino acid
  Variant (9)..(12): Xaa in position 9 to 12 is any amino acid
  Variant (16)..(17): Xaa in position 16 to 17 is any amino acid
  Variant (18)..(21): Xaa in position 18 to 21 is any or no amino acid
  Variant (23)..(23): Xaa in position 23 is any amino acid
  Variant (27)..(31): Xaa in position 27 to 31 is any amino acid
  Variant (33)..(73): Xaa in position 33 to 73 is any amino acid
  Variant (74)..(118): Xaa in position 74 to 118 is any or no amino acid
  Variant (120)..(133): Xaa in position 120 to 133 is any amino acid
  Variant (134)..(185): Xaa in position 134 to 185 is any or no amino acid
  Variant (187)..(192): Xaa in position 187 to 192 is any amino acid
  Variant (193)..(203): Xaa in position 193 to 203 is any or no amino acid
  Variant (206)..(206): Xaa in position 206 is any amino acid
  Variant (208)..(210): Xaa in position 208 to 210 is any amino acid
  Variant (212)..(213): Xaa in position 212 to 213 is any amino acid
  Variant (215)..(217): Xaa in position 215 to 217 is any amino acid
  Variant (219)..(223): Xaa in position 219 to 223 is any amino acid
  Variant (227)..(227): Xaa in position 227 is any amino acid
  Variant (231)..(233): Xaa in position 231 to 233 is any amino acid
  Variant (236)..(245): Xaa in position 236 to 245 is any amino acid
  Variant (247)..(248): Xaa in position 247 to 248 is any amino acid
  Variant (250)..(253): Xaa in position 250 to 253 is any amino acid
  Variant (254)..(264): Xaa in position 254 to 264 is any or no amino acid
  Variant (266)..(280): Xaa in position 266 to 280 is any amino acid
  Variant (282)..(283): Xaa in position 282 to 283 is any amino acid
  Variant (285)..(314): Xaa in position 285 to 314 is any amino acid
  Variant (315)..(412): Xaa in position 315 to 412 is any or no amino acid
  Variant (414)..(417): Xaa in position 414 to 417 is any amino acid
  Variant (419)..(428): Xaa in position 419 to 428 is any amino acid
  Variant (429)..(444): Xaa in position 429 to 444 is any or no amino acid
  Variant (446)..(447): Xaa in position 446 to 447 is any amino acid
  Variant (448)..(448): Xaa in position 448 is any or no amino acid
  Variant (450)..(451): Xaa in position 450 to 451 is any amino acid
  Variant (453)..(456): Xaa in position 453 to 456 is any amino acid
  Variant (458)..(458): Xaa in position 458 is any amino acid
  Variant (460)..(461): Xaa in position 460 to 461 is any amino acid
  Variant (463)..(463): Xaa in position 463 is any amino acid
  Variant (468)..(471): Xaa in position 468 to 471 is any amino acid
  Variant (473)..(478): Xaa in position 473 to 478 is any amino acid
  Variant (479)..(482): Xaa in position 479 to 482 is any or no amino acid
  Variant (484)..(485): Xaa in position 484 to 485 is any amino acid
  Variant (486)..(518): Xaa in position 486 to 518 is any or no amino acid
  Variant (520)..(521): Xaa in position 520 to 521 is any amino acid
  Variant (523)..(531): Xaa in position 523 to 531 is any amino acid
  Variant (532)..(561): Xaa in position 532 to 561 is any or no amino acid
  Variant (563)..(577): Xaa in position 563 to 577 is any amino acid
  Variant (578)..(596): Xaa in position 578 to 596 is any or no amino acid
  Variant (598)..(601): Xaa in position 598 to 601 is any amino acid
  Variant (603)..(609): Xaa in position 603 to 609 is any amino acid
  Variant (610)..(640): Xaa in position 610 to 640 is any or no amino acid
  Variant (643)..(643): Xaa in position 643 is any amino acid
  Variant (645)..(647): Xaa in position 645 to 647 is any amino acid
  Variant (650)..(650): Xaa in position 650 is any amino acid
  Variant (653)..(654): Xaa in position 653 to 654 is any amino acid
  Variant (656)..(658): Xaa in position 656 to 658 is any amino acid
  Variant (660)..(660): Xaa in position 660 is any amino acid
  Variant (668)..(669): Xaa in position 668 to 669 is any amino acid
  Variant (673)..(682): Xaa in position 673 to 682 is any amino acid
  Variant (684)..(690): Xaa in position 684 to 690 is any amino acid
  Variant (691)..(742): Xaa in position 691 to 742 is any or no amino acid
  Variant (744)..(744): Xaa in position 744 is any amino acid
  Variant (747)..(761): Xaa in position 747 to 761 is any amino acid

SEQ ID NO: 53676 - protein, 9 aa, Artificial sequence
  Consensus
  Variant (2)..(2): Xaa in position 2 is any amino acid
  Variant (3)..(3): Xaa in position 3 is Asp, Asn or Ser
  Variant (5)..(5): Xaa in position 5 is any amino acid
  Variant (8)..(8): Xaa in position 8 is Ser or Thr
  Variant (9)..(9): Xaa in position 9 is Ala, Ser, Thr or Val
GXXGXGKXX

SEQ ID NO: 53677 - protein, 29 aa, Artificial sequence
  Consensus
  Variant (2)..(4): Xaa in position 2 to 4 is any amino acid
  Variant (5)..(5): Xaa in position 5 is Lys or Arg
  Variant (6)..(19): Xaa in position 6 to 19 is any amino acid
  Variant (20)..(20): Xaa in position 20 is Phe, Ile, Leu or Val
  Variant (21)..(21): Xaa in position 21 is any amino acid
  Variant (23)..(23): Xaa in position 23 is Asp, Glu, Asn or Gln
  Variant (25)..(27): Xaa in position 25 to 27 is any amino acid
  Variant (28)..(28): Xaa in position 28 is Ile, Leu or Val
  Variant (29)..(29): Xaa in position 29 is Asp or Thr
GXXXXXXXXXXXXXXXXXXXXDXPXXXXX

SEQ ID NO: 53678 - protein, 16 aa, Artificial sequence
  Consensus
  Variant (2)..(5): Xaa in position 2 to 5 is any amino acid
  Variant (6)..(6): Xaa in position 6 is Phe, Ile, Leu or Val
  Variant (7)..(7): Xaa in position 7 is any amino acid
  Variant (9)..(9): Xaa in position 9 is any amino acid
  Variant (10)..(10): Xaa in position 10 is Asn or Ser
  Variant (12)..(12): Xaa in position 12 is any amino acid
  Variant (15)..(15): Xaa in position 15 is any or no amino acid
GXXXXXXGXXGXGKXT

SEQ ID NO: 53679 - protein, 29 aa, Artificial sequence
  Consensus
  Variant (2)..(5): Xaa in position 2 to 5 is any amino acid
  Variant (6)..(6): Xaa in position 6 is Ile, Leu, Met or Val
  Variant (7)..(7): Xaa in position 7 is any amino acid
  Variant (8)..(8): Xaa in position 8 is Phe, Ile, Leu or Val
  Variant (9)..(17): Xaa in position 9 to 17 is any amino acid
  Variant (18)..(18): Xaa in position 18 is Phe, Ile, Leu, Met or Val
  Variant (19)..(19): Xaa in position 19 is any amino acid
  Variant (20)..(20): Xaa in position 20 is Phe, Ile, Leu or Val
  Variant (21)..(21): Xaa in position 21 is any amino acid
  Variant (24)..(28): Xaa in position 24 to 28 is any amino acid
GXXXXXXXXXXXXXXXXXXXXDEXXXXXD

SEQ ID NO: 53680 - protein, 7 aa, Artificial sequence
  Consensus
  Variant (2)..(2): Xaa in position 2 is any amino acid
  Variant (3)..(6): Xaa in position 3 to 6 is any or no amino acid
IXXXXXH

SEQ ID NO: 53681 - DNA, 1482 bp, Escherichia coli; identical to SEQ ID NO: 14192
  CDS (1)..(1482)

SEQ ID NO: 53682 - protein, 493 aa, Escherichia coli; identical to SEQ ID NO: 14193

SEQ ID NO: 53683 - DNA, 1401 bp, Mesorhizobium loti MAFF303099; identical to SEQ ID NO: 14194
  CDS (1)..(1401): transl_table=11

SEQ ID NO: 53684 - protein, 466 aa, Mesorhizobium loti MAFF303099; identical to SEQ ID NO: 14195

SEQ ID NO: 53685 - DNA, 1401 bp, Mesorhizobium loti MAFF303099; identical to SEQ ID NO: 14196
  CDS (1)..(1401): transl_table=11

SEQ ID NO: 53686 - protein, 466 aa, Mesorhizobium loti MAFF303099; identical to SEQ ID NO: 14197

SEQ ID NO: 53687 - DNA, 1197 bp, Bacillus halodurans C-125; identical to SEQ ID NO: 14198
  CDS (1)..(1197): transl_table=11

SEQ ID NO: 53688 - protein, 398 aa, Bacillus halodurans C-125; identical to SEQ ID NO: 14199

SEQ ID NO: 53689 - DNA, 1545 bp, Pasteurella multocida subsp. multocida str. Pm70; identical to SEQ ID NO: 14200
  CDS (1)..(1545): transl_table=11

SEQ ID NO: 53690 - protein, 514 aa, Pasteurella multocida subsp. multocida str. Pm70; identical to SEQ ID NO: 14201

SEQ ID NO: 53691 - DNA, 1206 bp, Pseudomonas aeruginosa PAO1; identical to SEQ ID NO: 14202
  CDS (1)..(1206): transl_table=11

SEQ ID NO: 53692 - protein, 401 aa, Pseudomonas aeruginosa PAO1; identical to SEQ ID NO: 14203

SEQ ID NO: 53693 - DNA, 1080 bp, Pseudomonas aeruginosa PAO1; identical to SEQ ID NO: 14204
  CDS (1)..(1080): transl_table=11

SEQ ID NO: 53694 - protein, 359 aa, Pseudomonas aeruginosa PAO1; identical to SEQ ID NO: 14205

SEQ ID NO: 53695 - DNA, 1590 bp, Pseudomonas aeruginosa PAO1; identical to SEQ ID NO: 14206
  CDS (1)..(1590): transl_table=11

SEQ ID NO: 53696 - protein, 529 aa, Pseudomonas aeruginosa PAO1; identical to SEQ ID NO: 14207

SEQ ID NO: 53697 - DNA, 1446 bp, Lactococcus lactis subsp. lactis Il1403; identical to SEQ ID NO: 14208
  CDS (1)..(1446): transl_table=11

SEQ ID NO: 53698 - protein, 481 aa, Lactococcus lactis subsp. lactis Il1403; identical to SEQ ID NO: 14209

SEQ ID NO: 53699 - DNA, 1464 bp, Lactococcus lactis subsp. lactis Il1403; identical to SEQ ID NO: 14210
  CDS (1)..(1464): transl_table=11

SEQ ID NO: 53700 - protein, 487 aa, Lactococcus lactis subsp. lactis Il1403; identical to SEQ ID NO: 14211

SEQ ID NO: 53701 - DNA, 1527 bp, Neisseria meningitidis MC58; identical to SEQ ID NO: 14212
  CDS (1)..(1527): transl_table=11

SEQ ID NO: 53702 - protein, 508 aa, Neisseria meningitidis MC58; identical to SEQ ID NO: 14213

SEQ ID NO: 53703 - DNA, 1959 bp, Xylella fastidiosa 9a5c; identical to SEQ ID NO: 14214
  CDS (1)..(1959): transl_table=11

SEQ ID NO: 53704 - protein, 652 aa, Xylella fastidiosa 9a5c; identical to SEQ ID NO: 14215

SEQ ID NO: 53705 - DNA, 1404 bp, Xylella fastidiosa 9a5c; identical to SEQ ID NO: 14216
  CDS (1)..(1404): transl_table=11

SEQ ID NO: 53706 - protein, 467 aa, Xylella fastidiosa 9a5c; identical to SEQ ID NO: 14217

SEQ ID NO: 53707 - DNA, 1506 bp, Mycoplasma pulmonis UAB CTIP; identical to SEQ ID NO: 14218
  CDS (1)..(1506): transl_table=4

SEQ ID NO: 53708 - protein, 501 aa, Mycoplasma pulmonis UAB CTIP; identical to SEQ ID NO: 14219

SEQ ID NO: 53709 - DNA, 1533 bp, Clostridium acetobutylicum ATCC 824; identical to SEQ ID NO: 14220
  CDS (1)..(1533): transl_table=11

SEQ ID NO: 53710 - protein, 510 aa, Clostridium acetobutylicum ATCC 824; identical to SEQ ID NO: 14221

SEQ ID NO: 53711 - DNA, 1518 bp, Staphylococcus aureus subsp. aureus Mu50; identical to SEQ ID NO: 14222
  CDS (1)..(1518): transl_table=11

SEQ ID NO: 53712 - protein, 505 aa, Staphylococcus aureus subsp. aureus Mu50; identical to SEQ ID NO: 14223

SEQ ID NO: 53713 - DNA, 1566 bp, Sinorhizobium meliloti 1021; identical to SEQ ID NO: 14224
  CDS (1)..(1566): transl_table=11

SEQ ID NO: 53714 - protein, 521 aa, Sinorhizobium meliloti 1021; identical to SEQ ID NO: 14225

SEQ ID NO: 53715 - DNA, 1464 bp, Sinorhizobium meliloti 1021; identical to SEQ ID NO: 14226
  CDS (1)..(1464): transl_table=11

SEQ ID NO: 53716 - protein, 487 aa, Sinorhizobium meliloti 1021; identical to SEQ ID NO: 14227

SEQ ID NO: 53717 - DNA, 1488 bp, Salmonella typhimurium LT2; identical to SEQ ID NO: 14228
  CDS (1)..(1488): transl_table=11

SEQ ID NO: 53718 - protein, 495 aa, Salmonella typhimurium LT2; identical to SEQ ID NO: 14229

SEQ ID NO: 53719 - DNA, 1515 bp, Listeria monocytogenes EGD-e; identical to SEQ ID NO: 14230
  CDS (1)..(1515): transl_table=11

SEQ ID NO: 53720 - protein, 504 aa, Listeria monocytogenes EGD-e; identical to SEQ ID NO: 14231

SEQ ID NO: 53721 - DNA, 1515 bp, Listeria innocua Clip11262; identical to SEQ ID NO: 14232
  CDS (1)..(1515): transl_table=11

SEQ ID NO: 53722 - protein, 504 aa, Listeria innocua Clip11262; identical to SEQ ID NO: 14233

SEQ ID NO: 53723 - DNA, 1443 bp, Nostoc sp. PCC 7120; identical to SEQ ID NO: 14234
  CDS (1)..(1443): transl_table=11

SEQ ID NO: 53724 - protein, 480 aa, Nostoc sp. PCC 7120; identical to SEQ ID NO: 14235

SEQ ID NO: 53725 - DNA, 1269 bp, Ralstonia solanacearum GMI1000; identical to SEQ ID NO: 14236
  CDS (1)..(1269): transl_table=11

SEQ ID NO: 53726 - protein, 422 aa, Ralstonia solanacearum GMI1000; identical to SEQ ID NO: 14237

SEQ ID NO: 53727 - DNA, 1557 bp, Agrobacterium tumefaciens str. C58; identical to SEQ ID NO: 14238
  CDS (1)..(1557): transl_table=11

SEQ ID NO: 53728 - protein, 518 aa, Agrobacterium tumefaciens str. C58; identical to SEQ ID NO: 14239

SEQ ID NO: 53729 - DNA, 1479 bp, Agrobacterium tumefaciens str. C58; identical to SEQ ID NO: 14240
  CDS (1)..(1479): transl_table=11

SEQ ID NO: 53730 - protein, 492 aa, Agrobacterium tumefaciens str. C58; identical to SEQ ID NO: 14241

SEQ ID NO: 53731 - DNA, 1479 bp, Brucella melitensis 16M; identical to SEQ ID NO: 14242
  CDS (1)..(1479): transl_table=11

SEQ ID NO: 53732 - protein, 492 aa, Brucella melitensis 16M; identical to SEQ ID NO: 14243

SEQ ID NO: 53733 - DNA, 1443 bp, Clostridium perfringens str. 13; identical to SEQ ID NO: 14244
  CDS (1)..(1443): transl_table=11

SEQ ID NO: 53734 - protein, 480 aa, Clostridium perfringens str. 13; identical to SEQ ID NO: 14245

SEQ ID NO: 53735 - DNA, 1536 bp, Clostridium perfringens str. 13; identical to SEQ ID NO: 14246
  CDS (1)..(1536): transl_table=11

SEQ ID NO: 53736 - protein, 511 aa, Clostridium perfringens str. 13; identical to SEQ ID NO: 14247

SEQ ID NO: 53737 - DNA, 1458 bp, Clostridium perfringens str. 13; identical to SEQ ID NO: 14248
  CDS (1)..(1458): transl_table=11

SEQ ID NO: 53738 - protein, 485 aa, Clostridium perfringens str. 13; identical to SEQ ID NO: 14249

SEQ ID NO: 53739 - DNA, 1503 bp, Corynebacterium glutamicum ATCC 13032; identical to SEQ ID NO: 14250
  CDS (1)..(1503): transl_table=11

SEQ ID NO: 53740 - protein, 500 aa, Corynebacterium glutamicum ATCC 13032; identical to SEQ ID NO: 14251

SEQ ID NO: 53741 - DNA, 1440 bp, Fusobacterium nucleatum subsp. nucleatum ATCC 25586; identical to SEQ ID NO: 14252
  CDS (1)..(1440): transl_table=11

SEQ ID NO: 53742 - protein, 479 aa, Fusobacterium nucleatum subsp. nucleatum ATCC 25586; identical to SEQ ID NO: 14253

SEQ ID NO: 53743 - DNA, 1188 bp, Streptomyces coelicolor A3(2); identical to SEQ ID NO: 14254
  CDS (1)..(1188)

SEQ ID NO: 53744 - protein, 395 aa, Streptomyces coelicolor A3(2); identical to SEQ ID NO: 14255

SEQ ID NO: 53745 - DNA, 1461 bp, Xanthomonas campestris pv. campestris str. ATCC 33913; identical to SEQ ID NO: 14256
  CDS (1)..(1461): transl_table=11

SEQ ID NO: 53746 - protein, 486 aa, Xanthomonas campestris pv. campestris str. ATCC 33913; identical to SEQ ID NO: 14257

SEQ ID NO: 53747 - DNA, 1983 bp, Xanthomonas campestris pv. campestris str. ATCC 33913; identical to SEQ ID NO: 14258
  CDS (1)..(1983): transl_table=11

SEQ ID NO: 53748 - protein, 660 aa, Xanthomonas campestris pv. campestris str. ATCC 33913; identical to SEQ ID NO: 14259

SEQ ID NO: 53749 - DNA, 1020 bp, Xanthomonas campestris pv. campestris str. ATCC 33913; identical to SEQ ID NO: 14260
  CDS (1)..(1020): transl_table=11

SEQ ID NO: 53750 - protein, 339 aa, Xanthomonas campestris pv. campestris str. ATCC 33913; identical to SEQ ID NO: 14261

SEQ ID NO: 53751 - DNA, 1563 bp, Xanthomonas campestris pv. campestris str. ATCC 33913; identical to SEQ ID NO: 14262
  CDS (1)..(1563): transl_table=11

SEQ ID NO: 53752 - protein, 520 aa, Xanthomonas campestris pv. campestris str. ATCC 33913; identical to SEQ ID NO: 14263

SEQ ID NO: 53753 - DNA, 1425 bp, Xanthomonas campestris pv. campestris str. ATCC 33913; identical to SEQ ID NO: 14264
  CDS (1)..(1425): transl_table=11

SEQ ID NO: 53754 - protein, 474 aa, Xanthomonas campestris pv. campestris str. ATCC 33913; identical to SEQ ID NO: 14265

SEQ ID NO: 53755 - DNA, 1461 bp, Xanthomonas axonopodis pv. citri str. 306; identical to SEQ ID NO: 14266
  CDS (1)..(1461): transl_table=11

SEQ ID NO: 53756 - protein, 486 aa, Xanthomonas axonopodis pv. citri str. 306; identical to SEQ ID NO: 14267

SEQ ID NO: 53757 - DNA, 2019 bp, Xanthomonas axonopodis pv. citri str. 306; identical to SEQ ID NO: 14268
  CDS (1)..(2019): transl_table=11

SEQ ID NO: 53758 - protein, 672 aa, Xanthomonas axonopodis pv. citri str. 306; identical to SEQ ID NO: 14269

SEQ ID NO: 53759 - DNA, 1563 bp, Xanthomonas axonopodis pv. citri str. 306; identical to SEQ ID NO: 14270
  CDS (1)..(1563): transl_table=11

SEQ ID NO: 53760 - protein, 520 aa, Xanthomonas axonopodis pv. citri str. 306; identical to SEQ ID NO: 14271

SEQ ID NO: 53761 - DNA, 1416 bp, Xanthomonas axonopodis pv. citri str. 306; identical to SEQ ID NO: 14272
  CDS (1)..(1416): transl_table=11

SEQ ID NO: 53762 - protein, 471 aa, Xanthomonas axonopodis pv. citri str. 306; identical to SEQ ID NO: 14273

SEQ ID NO: 53763 - DNA, 1224 bp, Xanthomonas axonopodis pv. citri str. 306; identical to SEQ ID NO: 14274
  CDS (1)..(1224): transl_table=11

SEQ ID NO: 53764 - protein, 407 aa, Xanthomonas axonopodis pv. citri str. 306; identical to SEQ ID NO: 14275

SEQ ID NO: 53765 - DNA, 1518 bp, Staphylococcus aureus subsp. aureus MW2; identical to SEQ ID NO: 14276
  CDS (1)..(1518): transl_table=11

SEQ ID NO: 53766 - protein, 505 aa, Staphylococcus aureus subsp. aureus MW2; identical to SEQ ID NO: 14277

SEQ ID NO: 53767 - DNA, 1482 bp, Yersinia pestis KIM; identical to SEQ ID NO: 14278
  CDS (1)..(1482): transl_table=11

SEQ ID NO: 53768 - protein, 493 aa, Yersinia pestis KIM; identical to SEQ ID NO: 14279

SEQ ID NO: 53769 - DNA, 1461 bp, Brucella suis 1330; identical to SEQ ID NO: 14280
  CDS (1)..(1461): transl_table=11

SEQ ID NO: 53770 - protein, 486 aa, Brucella suis 1330; identical to SEQ ID NO: 14281

SEQ ID NO: 53771 - DNA, 1503 bp, Corynebacterium efficiens YS-314; identical to SEQ ID NO: 14282
  CDS (1)..(1503): transl_table=11

SEQ ID NO: 53772 - protein, 500 aa, Corynebacterium efficiens YS-314; identical to SEQ ID NO: 14283

SEQ ID NO: 53773 - DNA, 1158 bp, Pseudomonas putida KT2440; identical to SEQ ID NO: 14284
  CDS (1)..(1158): transl_table=11

SEQ ID NO: 53774 - protein, 385 aa, Pseudomonas putida KT2440; identical to SEQ ID NO: 14285

SEQ ID NO: 53775 - DNA, 1554 bp, Pseudomonas putida KT2440; identical to SEQ ID NO: 14286
  CDS (1)..(1554): transl_table=11

SEQ ID NO: 53776 - protein, 517 aa, Pseudomonas putida KT2440; identical to SEQ ID NO: 14287

SEQ ID NO: 53777 - DNA, 1575 bp, Vibrio vulnificus CMCP6; identical to SEQ ID NO: 14288
  CDS (1)..(1575): transl_table=11

SEQ ID NO: 53778 - protein, 524 aa, Vibrio vulnificus CMCP6; identical to SEQ ID NO: 14289

SEQ ID NO: 53779 - DNA, 1485 bp, Staphylococcus epidermidis ATCC 12228; identical to SEQ ID NO: 14290
  CDS (1)..(1485): transl_table=11

SEQ ID NO: 53780 - protein, 494 aa, Staphylococcus epidermidis ATCC 12228; identical to SEQ ID NO: 14291

SEQ ID NO: 53781 - DNA, 1959 bp, Xylella fastidiosa Temecula1; identical to SEQ ID NO: 14292
  CDS (1)..(1959): transl_table=11

SEQ ID NO: 53782 - protein, 652 aa, Xylella fastidiosa Temecula1; identical to SEQ ID NO: 14293

SEQ ID NO: 53783 - DNA, 1404 bp, Xylella fastidiosa Temecula1; identical to SEQ ID NO: 14294
  CDS (1)..(1404): transl_table=11

SEQ ID NO: 53784 - protein, 467 aa, Xylella fastidiosa Temecula1; identical to SEQ ID NO: 14295

SEQ ID NO: 53785 - DNA, 1437 bp, Clostridium tetani E88; identical to SEQ ID NO: 14296
  CDS (1)..(1437): transl_table=11

SEQ ID NO: 53786 - protein, 478 aa, Clostridium tetani E88; identical to SEQ ID NO: 14297

SEQ ID NO: 53787 - DNA, 1458 bp, Lactobacillus plantarum WCFS1; identical to SEQ ID NO: 14298
  CDS (1)..(1458): transl_table=11

SEQ ID NO: 53788 - protein, 485 aa, Lactobacillus plantarum WCFS1; identical to SEQ ID NO: 14299

SEQ ID NO: 53789 - DNA, 1497 bp, Tropheryma whipplei str. Twist; identical to SEQ ID NO: 14300
  CDS (1)..(1497): transl_table=11

SEQ ID NO: 53790 - protein, 498 aa, Tropheryma whipplei str. Twist; identical to SEQ ID NO: 14301

SEQ ID NO: 53791 - DNA, 1497 bp, Tropheryma whipplei TW08/27; identical to SEQ ID NO: 14302
  CDS (1)..(1497): transl_table=11

SEQ ID NO: 53792 - protein, 498 aa, Tropheryma whipplei TW08/27; identical to SEQ ID NO: 14303

SEQ ID NO: 53793 - DNA, 1629 bp, Pseudomonas syringae pv. tomato str. DC3000; identical to SEQ ID NO: 14304
  CDS (1)..(1629): transl_table=11

SEQ ID NO: 53794 - protein, 542 aa, Pseudomonas syringae pv. tomato str. DC3000; identical to SEQ ID NO: 14305

SEQ ID NO: 53795 - DNA, 1251 bp, Pseudomonas syringae pv. tomato str. DC3000; identical to SEQ ID NO: 14306
  CDS (1)..(1251): transl_table=11

SEQ ID NO: 53796 - protein, 416 aa, Pseudomonas syringae pv. tomato str. DC3000; identical to SEQ ID NO: 14307

SEQ ID NO: 53797 - DNA, 1158 bp, Pseudomonas syringae pv. tomato str. DC3000; identical to SEQ ID NO: 14308
  CDS (1)..(1158): transl_table=11

SEQ ID NO: 53798 - protein, 385 aa, Pseudomonas syringae pv. tomato str. DC3000; identical to SEQ ID NO: 14309

SEQ ID NO: 53799 - DNA, 1197 bp, Bacteroides thetaiotaomicron VPI-5482; identical to SEQ ID NO: 14310
  CDS (1)..(1197): transl_table=11

SEQ ID NO: 53800 - protein, 398 aa, Bacteroides thetaiotaomicron VPI-5482; identical to SEQ ID NO: 14311

SEQ ID NO: 53801 - DNA, 1425 bp, Bacteroides thetaiotaomicron VPI-5482; identical to SEQ ID NO: 14312
  CDS (1)..(1425): transl_table=11

SEQ ID NO: 53802 - protein, 474 aa, Bacteroides thetaiotaomicron VPI-5482; identical to SEQ ID NO: 14313

SEQ ID NO: 53803 - DNA, 1440 bp, Bacteroides thetaiotaomicron VPI-5482; identical to SEQ ID NO: 14314
  CDS (1)..(1440): transl_table=11

SEQ ID NO: 53804 - protein, 479 aa, Bacteroides thetaiotaomicron VPI-5482; identical to SEQ ID NO: 14315

SEQ ID NO: 53805 - DNA, 1446 bp, Enterococcus faecalis V583; identical to SEQ ID NO: 14316
  CDS (1)..(1446): transl_table=11

SEQ ID NO: 53806 - protein, 481 aa, Enterococcus faecalis V583; identical to SEQ ID NO: 14317

SEQ ID NO: 53807 - DNA, 1461 bp, Enterococcus faecalis V583; identical to SEQ ID NO: 14318
  CDS (1)..(1461): transl_table=11

SEQ ID NO: 53808 - protein, 486 aa, Enterococcus faecalis V583; identical to SEQ ID NO: 14319

SEQ ID NO: 53809 - DNA, 1176 bp, Coxiella burnetii RSA 493; identical to SEQ ID NO: 14320
  CDS (1)..(1176): transl_table=11

SEQ ID NO: 53810 - protein, 391 aa, Coxiella burnetii RSA 493; identical to SEQ ID NO: 14321

SEQ ID NO: 53811 - DNA, 1215 bp, Streptomyces avermitilis MA-4680; identical to SEQ ID NO: 14322
  CDS (1)..(1215)

SEQ ID NO: 53812 - protein, 404 aa, Streptomyces avermitilis MA-4680; identical to SEQ ID NO: 14323

SEQ ID NO: 53813 - DNA, 1098 bp, Bacillus cereus ATCC 14579; identical to SEQ ID NO: 14324
  CDS (1)..(1098): transl_table=11

SEQ ID NO: 53814 - protein, 365 aa, Bacillus cereus ATCC 14579; identical to SEQ ID NO: 14325

SEQ ID NO: 53815 - DNA, 1194 bp, Bacillus cereus ATCC 14579; identical to SEQ ID NO: 14326
  CDS (1)..(1194): transl_table=11

SEQ ID NO: 53816 - protein, 397 aa, Bacillus cereus ATCC 14579; identical to SEQ ID NO: 14327

SEQ ID NO: 53817 - DNA, 1242 bp, Shigella flexneri 2a str. 2457T; identical to SEQ ID NO: 14328
  CDS (1)..(1242): transl_table=11

SEQ ID NO: 53818 - protein, 413 aa, Shigella flexneri 2a str. 2457T; identical to SEQ ID NO: 14329

SEQ ID NO: 53819 - DNA, 1158 bp, Nitrosomonas europaea ATCC 19718; identical to SEQ ID NO: 14330
  CDS (1)..(1158): transl_table=11

SEQ ID NO: 53820 - protein, 385 aa, Nitrosomonas europaea ATCC 19718; identical to SEQ ID NO: 14331

SEQ ID NO: 53821 - DNA, 1218 bp, Bacillus anthracis str. Ames; identical to SEQ ID NO: 14332
  CDS (1)..(1218): transl_table=11

SEQ ID NO: 53822 - protein, 405 aa, Bacillus anthracis str. Ames; identical to SEQ ID NO: 14333

SEQ ID NO: 53823 - DNA, 1104 bp, Bacillus anthracis str. Ames; identical to SEQ ID NO: 14334
  CDS (1)..(1104): transl_table=11

SEQ ID NO: 53824 - protein, 367 aa, Bacillus anthracis str. Ames; identical to SEQ ID NO: 14335

SEQ ID NO: 53825 - DNA, 1194 bp, Bacillus anthracis str. Ames; identical to SEQ ID NO: 14336
  CDS (1)..(1194): transl_table=11

SEQ ID NO: 53826 - protein, 397 aa, Bacillus anthracis str. Ames; identical to SEQ ID NO: 14337

SEQ ID NO: 53827 - DNA, 1563 bp, Helicobacter hepaticus ATCC 51449; identical to SEQ ID NO: 14338
  CDS (1)..(1563): transl_table=11

SEQ ID NO: 53828 - protein, 520 aa, Helicobacter hepaticus ATCC 51449; identical to SEQ ID NO: 14339

SEQ ID NO: 53829 - DNA, 1476 bp, Rhodopirellula baltica SH 1; identical to SEQ ID NO: 14340
  CDS (1)..(1476): transl_table=11

SEQ ID NO: 53830 - protein, 491 aa, Rhodopirellula baltica SH 1; identical to SEQ ID NO: 14341

SEQ ID NO: 53831 - DNA, 1476 bp, Candidatus Blochmannia floridanus; identical to SEQ ID NO: 14342
  CDS (1)..(1476): transl_table=11

SEQ ID NO: 53832 - protein, 491 aa, Candidatus Blochmannia floridanus; identical to SEQ ID NO: 14343

SEQ ID NO: 53833 - DNA, 1206 bp, Bordetella pertussis Tohama I; identical to SEQ ID NO: 14344
  CDS (1)..(1206): transl_table=11

SEQ ID NO: 53834 - protein, 401 aa, Bordetella pertussis Tohama I; identical to SEQ ID NO: 14345

SEQ ID NO: 53835 - DNA, 1458 bp, Bordetella pertussis Tohama I; identical to SEQ ID NO: 14346
  CDS (1)..(1458): transl_table=11

SEQ ID NO: 53836 - protein, 485 aa, Bordetella pertussis Tohama I; identical to SEQ ID NO: 14347

SEQ ID NO: 53837 - DNA, 1575 bp, Bordetella pertussis Tohama I; identical to SEQ ID NO: 14348
  CDS (1)..(1575): transl_table=11

SEQ ID NO: 53838 - protein, 524 aa, Bordetella pertussis Tohama I; identical to SEQ ID NO: 14349

SEQ ID NO: 53839 - DNA, 1263 bp, Bordetella parapertussis 12822; identical to SEQ ID NO: 14350
  CDS (1)..(1263)

SEQ ID NO: 53840 - protein, 420 aa, Bordetella parapertussis 12822; identical to SEQ ID NO: 14351

SEQ ID NO: 53841 - DNA, 1431 bp, Bordetella parapertussis 12822; identical to SEQ ID NO: 14352
  CDS (1)..(1431)

SEQ ID NO: 53842 - protein, 476 aa, Bordetella parapertussis 12822; identical to SEQ ID NO: 14353

SEQ ID NO: 53843 - DNA, 1479 bp, Bordetella bronchiseptica RB50; identical to SEQ ID NO: 14354
  CDS (1)..(1479)

SEQ ID NO: 53844 - protein, 492 aa, Bordetella bronchiseptica RB50; identical to SEQ ID NO: 14355

SEQ ID NO: 53845 - DNA, 1545 bp, Bordetella bronchiseptica RB50; identical to SEQ ID NO: 14356
  CDS (1)..(1545)

SEQ ID NO: 53846 - protein, 514 aa, Bordetella bronchiseptica RB50; identical to SEQ ID NO: 14357

SEQ ID NO: 53847 - DNA, 1518 bp, Chromobacterium violaceum ATCC 12472; identical to SEQ ID NO: 14358
  CDS (1)..(1518): transl_table=11

SEQ ID NO: 53848 - protein, 505 aa, Chromobacterium violaceum ATCC 12472; identical to SEQ ID NO: 14359

SEQ ID NO: 53849 - DNA, 1422 bp, Porphyromonas gingivalis W83; identical to SEQ ID NO: 14360
  CDS (1)..(1422): transl_table=11

SEQ ID NO: 53850 - protein, 473 aa, Porphyromonas gingivalis W83; identical to SEQ ID NO: 14361

SEQ ID NO: 53851 - DNA, 1443 bp, Gloeobacter violaceus PCC 7421; identical to SEQ ID NO: 14362
  CDS (1)..(1443): transl_table=11

SEQ ID NO: 53852 - protein, 480 aa, Gloeobacter violaceus PCC 7421; identical to SEQ ID NO: 14363

SEQ ID NO: 53853 - DNA, 1470 bp, Photorhabdus luminescens subsp. laumondii TTO1; identical to SEQ ID NO: 14364
  CDS (1)..(1470): transl_table=11

SEQ ID NO: 53854 - protein, 489 aa, Photorhabdus luminescens subsp. laumondii TTO1; identical to SEQ ID NO: 14365

SEQ ID NO: 53855 - DNA, 1455 bp, Vibrio vulnificus YJ016; identical to SEQ ID NO: 14366
  CDS (1)..(1455): transl_table=11

SEQ ID NO: 53856 - protein, 484 aa, Vibrio vulnificus YJ016; identical to SEQ ID NO: 14367

SEQ ID NO: 53857 - DNA, 1191 bp, Geobacter sulfurreducens PCA; identical to SEQ ID NO: 14368
  CDS (1)..(1191): transl_table=11

SEQ ID NO: 53858 - protein, 396 aa, Geobacter sulfurreducens PCA; identical to SEQ ID NO: 14369

SEQ ID NO: 53859 - DNA, 1443 bp, Geobacter sulfurreducens PCA; identical to SEQ ID NO: 14370
  CDS (1)..(1443): transl_table=11

SEQ ID NO: 53860 - protein, 480 aa, Geobacter sulfurreducens PCA; identical to SEQ ID NO: 14371

SEQ ID NO: 53861 - DNA, 1578 bp, Geobacter sulfurreducens PCA; identical to SEQ ID NO: 14372
  CDS (1)..(1578): transl_table=11

SEQ ID NO: 53862 - protein, 525 aa, Geobacter sulfurreducens PCA; identical to SEQ ID NO: 14373

SEQ ID NO: 53863 - DNA, 1470 bp, Lactobacillus johnsonii NCC 533; identical to SEQ ID NO: 14374
  CDS (1)..(1470): transl_table=11

SEQ ID NO: 53864 - protein, 489 aa, Lactobacillus johnsonii NCC 533; identical to SEQ ID NO: 14375

SEQ ID NO: 53865 - DNA, 1488 bp, Lactobacillus johnsonii NCC 533; identical to SEQ ID NO: 14376
  CDS (1)..(1488): transl_table=11

SEQ ID NO: 53866 - protein, 495 aa, Lactobacillus johnsonii NCC 533; identical to SEQ ID NO: 14377

SEQ ID NO: 53867 - DNA, 1593 bp, Bdellovibrio bacteriovorus HD100; identical to SEQ ID NO: 14378
  CDS (1)..(1593): transl_table=11

SEQ ID NO: 53868 - protein, 530 aa, Bdellovibrio bacteriovorus HD100; identical to SEQ ID NO: 14379

SEQ ID NO: 53869 - DNA, 1212 bp, Bacillus cereus ATCC 10987; identical to SEQ ID NO: 14380
  CDS (1)..(1212): transl_table=11

SEQ ID NO: 53870 - protein, 403 aa, Bacillus cereus ATCC 10987; identical to SEQ ID NO: 14381

SEQ ID NO: 53871 - DNA, 1446 bp, Desulfovibrio vulgaris subsp. vulgaris str. Hildenborough; identical to SEQ ID NO: 14382
  CDS (1)..(1446): transl_table=11

SEQ ID NO: 53872 - protein, 481 aa, Desulfovibrio vulgaris subsp. vulgaris str. Hildenborough; identical to SEQ ID NO: 14383

SEQ ID NO: 53873 - DNA, 1137 bp, Bacillus anthracis str. Sterne; identical to SEQ ID NO: 14384
  CDS (1)..(1137): transl_table=11

SEQ ID NO: 53874 - protein, 378 aa, Bacillus anthracis str. Sterne; identical to SEQ ID NO: 14385

SEQ ID NO: 53875 - DNA, 1572 bp, Bartonella quintana str. Toulouse; identical to SEQ ID NO: 14386
  CDS (1)..(1572): transl_table=11

SEQ ID NO: 53876 - protein, 523 aa, Bartonella quintana str. Toulouse; identical to SEQ ID NO: 14387

SEQ ID NO: 53877 - DNA, 1572 bp, Bartonella henselae str. Houston-1; identical to SEQ ID NO: 14388
  CDS (1)..(1572): transl_table=11

SEQ ID NO: 53878 - protein, 523 aa, Bartonella henselae str. Houston-1; identical to SEQ ID NO: 14389

SEQ ID NO: 53879 - DNA, 1530 bp, Bacillus thuringiensis serovar konkukian str. 97-27; identical to SEQ ID NO: 14390
  CDS (1)..(1530): transl_table=11

SEQ ID NO: 53880 - protein, 509 aa, Bacillus thuringiensis serovar konkukian str. 97-27; identical to SEQ ID NO: 14391

SEQ ID NO: 53881 - DNA, 1218 bp, Bacillus thuringiensis serovar konkukian str. 97-27; identical to SEQ ID NO: 14392
  CDS (1)..(1218): transl_table=11

SEQ ID NO: 53882 - protein, 405 aa, Bacillus thuringiensis serovar konkukian str. 97-27; identical to SEQ ID NO: 14393

SEQ ID NO: 53883 - DNA, 1134 bp, Bacillus thuringiensis serovar konkukian str. 97-27; identical to SEQ ID NO: 14394
  CDS (1)..(1134): transl_table=11

SEQ ID NO: 53884 - protein, 377 aa, Bacillus thuringiensis serovar konkukian str. 97-27; identical to SEQ ID NO: 14395

SEQ ID NO: 53885 - DNA, 1482 bp, Staphylococcus aureus subsp. aureus MSSA476; identical to SEQ ID NO: 14396
  CDS (1)..(1482): transl_table=11

SEQ ID NO: 53886 - protein, 493 aa, Staphylococcus aureus subsp. aureus MSSA476; identical to SEQ ID NO: 14397

SEQ ID NO: 53887 - DNA, 1563 bp, Acinetobacter sp. ADP1; identical to SEQ ID NO: 14398
  CDS (1)..(1563): transl_table=11

SEQ ID NO: 53888 - protein, 520 aa, Acinetobacter sp. ADP1; identical to SEQ ID NO: 14399

SEQ ID NO: 53889 - DNA, 1560 bp, Acinetobacter sp. ADP1; identical to SEQ ID NO: 14400
  CDS (1)..(1560): transl_table=11

SEQ ID NO: 53890 - protein, 519 aa, Acinetobacter sp. ADP1; identical to SEQ ID NO: 14401

SEQ ID NO: 53891 - DNA, 1461 bp, Erwinia carotovora subsp. atroseptica SCRI1043; identical to SEQ ID NO: 14402
  CDS (1)..(1461)

SEQ ID NO: 53892 - protein, 486 aa, Erwinia carotovora subsp. atroseptica SCRI1043; identical to SEQ ID NO: 14403

SEQ ID NO: 53893 - DNA, 1269 bp, Propionibacterium acnes KPA171202; identical to SEQ ID NO: 14404
  CDS (1)..(1269): transl_table=11

SEQ ID NO: 53894 - protein, 422 aa, Propionibacterium acnes KPA171202; identical to SEQ ID NO: 14405

SEQ ID NO: 53895 - DNA, 1464 bp, Leifsonia xyli subsp. xyli str. CTCB07; identical to SEQ ID NO: 14406
  CDS (1)..(1464): transl_table=11

SEQ ID NO: 53896 - protein, 487 aa, Leifsonia xyli subsp. xyli str. CTCB07; identical to SEQ ID NO: 14407

SEQ ID NO: 53897 - DNA, 1533 bp, Desulfotalea psychrophila LSv54; identical to SEQ ID NO: 14408
  CDS (1)..(1533): transl_table=11

SEQ ID NO: 53898 - protein, 510 aa, Desulfotalea psychrophila LSv54; identical to SEQ ID NO: 14409

SEQ ID NO: 53899 - DNA, 1461 bp, Yersinia pseudotuberculosis IP 32953; identical to SEQ ID NO: 14410
  CDS (1)..(1461): transl_table=11

SEQ ID NO: 53900 - protein, 486 aa, Yersinia pseudotuberculosis IP 32953; identical to SEQ ID NO: 14411

SEQ ID NO: 53901 - DNA, 1545 bp, Bacillus cereus E33L; identical to SEQ ID NO: 14412
  CDS (1)..(1545): transl_table=11

SEQ ID NO: 53902 - protein, 514 aa, Bacillus cereus E33L; identical to SEQ ID NO: 14413

SEQ ID NO: 53903 - DNA, 1212 bp, Bacillus cereus E33L; identical to SEQ ID NO: 14414
  CDS (1)..(1212): transl_table=11

SEQ ID NO: 53904 - protein, 403 aa, Bacillus cereus E33L; identical to SEQ ID NO: 14415

SEQ ID NO: 53905 - DNA, 1104 bp, Bacillus cereus E33L; identical to SEQ ID NO: 14416
  CDS (1)..(1104): transl_table=11

SEQ ID NO: 53906 - protein, 367 aa, Bacillus cereus E33L; identical to SEQ ID NO: 14417

SEQ ID NO: 53907 - DNA, 1536 bp, Mannheimia succiniciproducens MBEL55E; identical to SEQ ID NO: 14418
  CDS (1)..(1536): transl_table=11

SEQ ID NO: 53908 - protein, 511 aa, Mannheimia succiniciproducens MBEL55E; identical to SEQ ID NO: 14419

SEQ ID NO: 53909 - DNA, 1197 bp, Bacteroides fragilis YCH46; identical to SEQ ID NO: 14420
  CDS (1)..(1197): transl_table=11

SEQ ID NO: 53910 - protein, 398 aa, Bacteroides fragilis YCH46; identical to SEQ ID NO: 14421

SEQ ID NO: 53911 - DNA, 1440 bp, Burkholderia mallei ATCC 23344; identical to SEQ ID NO: 14422
  CDS (1)..(1440): transl_table=11

SEQ ID NO: 53912 - protein, 479 aa, Burkholderia mallei ATCC 23344; identical to SEQ ID NO: 14423

SEQ ID NO: 53913 - DNA, 1275 bp, Burkholderia pseudomallei K96243; identical to SEQ ID NO: 14424
  CDS (1)..(1275): transl_table=11

SEQ ID NO: 53914 - protein, 424 aa, Burkholderia pseudomallei K96243; identical to SEQ ID NO: 14425

SEQ ID NO: 53915 - DNA, 1653 bp, Burkholderia pseudomallei K96243; identical to SEQ ID NO: 14426
  CDS (1)..(1653): transl_table=11

SEQ ID NO: 53916 - protein, 550 aa, Burkholderia pseudomallei K96243; identical to SEQ ID NO: 14427

SEQ ID NO: 53917 - DNA, 1458 bp, Photobacterium profundum SS9; identical to SEQ ID NO: 14428
  CDS (1)..(1458): transl_table=11

SEQ ID NO: 53918 - protein, 485 aa, Photobacterium profundum SS9; identical to SEQ ID NO: 14429

SEQ ID NO: 53919 - DNA, 1533 bp, Photobacterium profundum SS9; identical to SEQ ID NO: 14430
  CDS (1)..(1533): transl_table=11

SEQ ID NO: 53920 - protein, 510 aa, Photobacterium profundum SS9; identical to SEQ ID NO: 14431

SEQ ID NO: 53921 - DNA, 1509 bp, Geobacillus kaustophilus HTA426; identical to SEQ ID NO: 14432
  CDS (1)..(1509): transl_table=11

SEQ ID NO: 53922 - protein, 502 aa, Geobacillus kaustophilus HTA426; identical to SEQ ID NO: 14433

SEQ ID NO: 53923 - DNA, 1242 bp, Salmonella enterica subsp. enterica serovar Paratyphi A str. ATCC; identical to SEQ ID NO: 14434
  CDS (1)..(1242): transl_table=11

SEQ ID NO: 53924 - protein, 413 aa, Salmonella enterica subsp. enterica serovar Paratyphi A str. ATCC; identical to SEQ ID NO: 14435

SEQ ID NO: 53925 - DNA, 1395 bp, Idiomarina loihiensis L2TR; identical to SEQ ID NO: 14436
  CDS (1)..(1395): transl_table=11

SEQ ID NO: 53926 - protein, 464 aa, Idiomarina loihiensis L2TR; identical to SEQ ID NO: 14437

SEQ ID NO: 53927 - DNA, 1383 bp, Azoarcus sp. EbN1; identical to SEQ ID NO: 14438
  CDS (1)..(1383): transl_table=11

SEQ ID NO: 53928 - protein, 460 aa, Azoarcus sp. EbN1; identical to SEQ ID NO: 14439

SEQ ID NO: 53929 - DNA, 1458 bp, Azoarcus sp. EbN1; identical to SEQ ID NO: 14440
  CDS (1)..(1458): transl_table=11

SEQ ID NO: 53930 - protein, 485 aa, Azoarcus sp. EbN1; identical to SEQ ID NO: 14441

SEQ ID NO: 53931 - DNA, 1419 bp, Zymomonas mobilis subsp. mobilis ZM4; identical to SEQ ID NO: 14442
  CDS (1)..(1419): transl_table=11

SEQ ID NO: 53932 - protein, 472 aa, Zymomonas mobilis subsp. mobilis ZM4; identical to SEQ ID NO: 14443

SEQ ID NO: 53933 - DNA, 1413 bp, Silicibacter pomeroyi DSS-3; identical to SEQ ID NO: 14444
  CDS (1)..(1413): transl_table=11

SEQ ID NO: 53934 - protein, 470 aa, Silicibacter pomeroyi DSS-3; identical to SEQ ID NO: 14445

SEQ ID NO: 53935 - DNA, 1467 bp, Bacillus clausii KSM-K16; identical to SEQ ID NO: 14446
  CDS (1)..(1467): transl_table=11

SEQ ID NO: 53936 - protein, 488 aa, Bacillus clausii KSM-K16; identical to SEQ ID NO: 14447

SEQ ID NO: 53937 - DNA, 1197 bp, Bacillus clausii KSM-K16; identical to SEQ ID NO: 14448
  CDS (1)..(1197): transl_table=11

SEQ ID NO: 53938 - protein, 398 aa, Bacillus clausii KSM-K16; identical to SEQ ID NO: 14449

SEQ ID NO: 53939 - DNA, 1482 bp, Staphylococcus aureus subsp. aureus COL; identical to SEQ ID NO: 14450
  CDS (1)..(1482): transl_table=11

SEQ ID NO: 53940 - protein, 493 aa, Staphylococcus aureus subsp. aureus COL; identical to SEQ ID NO: 14451

SEQ ID NO: 53941 - DNA, 2016 bp, Xanthomonas oryzae pv. oryzae KACC10331; identical to SEQ ID NO: 14452
  CDS (1)..(2016): transl_table=11

SEQ ID NO: 53942 - protein, 671 aa, Xanthomonas oryzae pv. oryzae KACC10331; identical to SEQ ID NO: 14453

SEQ ID NO: 53943 - DNA, 1419 bp, Xanthomonas oryzae pv. oryzae KACC10331; identical to SEQ ID NO: 14454
  CDS (1)..(1419): transl_table=11

SEQ ID NO: 53944 - protein, 472 aa, Xanthomonas oryzae pv. oryzae KACC10331; identical to SEQ ID NO: 14455

SEQ ID NO: 53945 - DNA, 1548 bp, Vibrio fischeri ES114; identical to SEQ ID NO: 14456
  CDS (1)..(1548): transl_table=11

SEQ ID NO: 53946 - protein, 515 aa, Vibrio fischeri ES114; identical to SEQ ID NO: 14457

SEQ ID NO: 53947 - DNA, 1455 bp, Vibrio fischeri ES114; identical to SEQ ID NO: 14458
  CDS (1)..(1455): transl_table=11

SEQ ID NO: 53948 - protein, 484 aa, Vibrio fischeri ES114; identical to SEQ ID NO: 14459

SEQ ID NO: 53949 - DNA, 1578 bp, Neisseria gonorrhoeae FA 1090; identical to SEQ ID NO: 14460
  CDS (1)..(1578): transl_table=11

SEQ ID NO: 53950 - protein, 525 aa, Neisseria gonorrhoeae FA 1090; identical to SEQ ID NO: 14461

SEQ ID NO: 53951 - DNA, 1440 bp, Bacteroides fragilis NCTC 9343; identical to SEQ ID NO: 14462
  CDS (1)..(1440): transl_table=11

SEQ ID NO: 53952 - protein, 479 aa, Bacteroides fragilis NCTC 9343; identical to SEQ ID NO: 14463

SEQ ID NO: 53953 - DNA, 1275 bp, Bacteroides fragilis NCTC 9343; identical to SEQ ID NO: 14464
  CDS (1)..(1275): transl_table=11

SEQ ID NO: 53954 - protein, 424 aa, Bacteroides fragilis NCTC 9343; identical to SEQ ID NO: 14465

SEQ ID NO: 53955 - DNA, 1242 bp, Salmonella enterica subsp. enterica serovar Choleraesuis str; identical to SEQ ID NO: 14466
  CDS (1)..(1242): transl_table=11

SEQ ID NO: 53956 - protein, 413 aa, Salmonella enterica subsp. enterica serovar Choleraesuis str; identical to SEQ ID NO: 14467

SEQ ID NO: 53957 - DNA, 1587 bp, Salmonella enterica subsp. enterica serovar Choleraesuis str; identical to SEQ ID NO: 14468
  CDS (1)..(1587): transl_table=11

SEQ ID NO: 53958 - protein, 528 aa, Salmonella enterica subsp. enterica serovar Choleraesuis str; identical to SEQ ID NO: 14469

SEQ ID NO: 53959 - DNA, 1581 bp, Pseudomonas syringae pv. syringae B728a; identical to SEQ ID NO: 14470
  CDS (1)..(1581)

SEQ ID NO: 53960 - protein, 526 aa, Pseudomonas syringae pv. syringae B728a; identical to SEQ ID NO: 14471

SEQ ID NO: 53961 - DNA, 1251 bp, Pseudomonas syringae pv. syringae B728a; identical to SEQ ID NO: 14472
  CDS (1)..(1251)

SEQ ID NO: 53962 - protein, 416 aa, Pseudomonas syringae pv. syringae B728a; identical to SEQ ID NO: 14473

SEQ ID NO: 53963 - DNA, 1158 bp, Pseudomonas syringae pv. syringae B728a; identical to SEQ ID NO: 14474
  CDS (1)..(1158)

SEQ ID NO: 53964 - protein, 385 aa, Pseudomonas syringae pv. syringae B728a; identical to SEQ ID NO: 14475

SEQ ID NO: 53965 - DNA, 1440 bp, Pseudomonas syringae pv. syringae B728a; identical to SEQ ID NO: 14476
  CDS (1)..(1440)

SEQ ID NO: 53966 - protein, 479 aa, Pseudomonas syringae pv. syringae B728a; identical to SEQ ID NO: 14477

SEQ ID NO: 53967 - DNA, 1512 bp, Corynebacterium jeikeium K411; identical to SEQ ID NO: 14478
  CDS (1)..(1512): transl_table=11

SEQ ID NO: 53968 - protein, 503 aa, Corynebacterium jeikeium K411; identical to SEQ ID NO: 14479

SEQ ID NO: 53969 - DNA, 1404 bp, Xylella fastidiosa Ann-1; identical to SEQ ID NO: 14480
  CDS (1)..(1404)

SEQ ID NO: 53970 - protein, 467 aa, Xylella fastidiosa Ann-1; identical to SEQ ID NO: 14481

SEQ ID NO: 53971 - DNA, 1488 bp, Lactobacillus gasseri; identical to SEQ ID NO: 14482
  CDS (1)..(1488)

SEQ ID NO: 53972 - protein, 495 aa, Lactobacillus gasseri; identical to SEQ ID NO: 14483

SEQ ID NO: 53973 - DNA, 1416 bp, Leuconostoc mesenteroides subsp. mesenteroides ATCC 8293; identical to SEQ ID NO: 14484
  CDS (1)..(1416)

SEQ ID NO: 53974 - protein, 471 aa, Leuconostoc mesenteroides subsp. mesenteroides ATCC 8293; identical to SEQ ID NO: 14485

SEQ ID NO: 53975 - DNA, 1455 bp, Desulfovibrio desulfuricans G20; identical to SEQ ID NO: 14486
  CDS (1)..(1455)

SEQ ID NO: 53976 - protein, 484 aa, Desulfovibrio desulfuricans G20; identical to SEQ ID NO: 14487

SEQ ID NO: 53977 - DNA, 1434 bp, Pseudomonas aeruginosa UCBPP-PA14; identical to SEQ ID NO: 14488
  CDS (1)..(1434)

SEQ ID NO: 53978 - protein, 477 aa, Pseudomonas aeruginosa UCBPP-PA14; identical to SEQ ID NO: 14489

SEQ ID NO: 53979 - DNA, 1440 bp, Fusobacterium nucleatum subsp. vincentii ATCC 49256; identical to SEQ ID NO: 14490
  CDS (1)..(1440): transl_table=11

SEQ ID NO: 53980 - protein, 479 aa, Fusobacterium nucleatum subsp. vincentii ATCC 49256; identical to SEQ ID NO: 14491

SEQ ID NO: 53981 - DNA, 1713 bp, Psychrobacter sp. 273-4; identical to SEQ ID NO: 14492
  CDS (1)..(1713)

SEQ ID NO: 53982 - protein, 570 aa, Psychrobacter sp. 273-4; identical to SEQ ID NO: 14493

SEQ ID NO: 53983 - DNA, 1644 bp, Psychrobacter sp. 273-4; identical to SEQ ID NO: 14494
  CDS (1)..(1644)

SEQ ID NO: 53984 - protein, 547 aa, Psychrobacter sp. 273-4; identical to SEQ ID NO: 14495

SEQ ID NO: 53985 - DNA, 1470 bp, Ralstonia eutropha JMP134; identical to SEQ ID NO: 14496
  CDS (1)..(1470)

SEQ ID NO: 53986 - protein, 489 aa, Ralstonia eutropha JMP134; identical to SEQ ID NO: 14497

SEQ ID NO: 53987 - DNA, 1617 bp, Ralstonia eutropha JMP134; identical to SEQ ID NO: 14498
  CDS (1)..(1617)

SEQ ID NO: 53988 - protein, 538 aa, Ralstonia eutropha JMP134; identical to SEQ ID NO: 14499

SEQ ID NO: 53989 - DNA, 1809 bp, Ralstonia eutropha JMP134; identical to SEQ ID NO: 14500
  CDS (1)..(1809)

SEQ ID NO: 53990 - protein, 602 aa, Ralstonia eutropha JMP134; identical to SEQ ID NO: 14501

SEQ ID NO: 53991 - DNA, 1329 bp, Ralstonia eutropha JMP134; identical to SEQ ID NO: 14502
  CDS (1)..(1329)

SEQ ID NO: 53992 - protein, 442 aa, Ralstonia eutropha JMP134; identical to SEQ ID NO: 14503

SEQ ID NO: 53993 - DNA, 1254 bp, Ralstonia eutropha JMP134; identical to SEQ ID NO: 14504
  CDS (1)..(1254)

SEQ ID NO: 53994 - protein, 417 aa, Ralstonia eutropha JMP134; identical to SEQ ID NO: 14505

SEQ ID NO: 53995 - DNA, 1551 bp, Burkholderia cepacia R18194; identical to SEQ ID NO: 14506
  CDS (1)..(1551)

SEQ ID NO: 53996 - protein, 516 aa, Burkholderia cepacia R18194; identical to SEQ ID NO: 14507

SEQ ID NO: 53997 - DNA, 1275 bp, Burkholderia cepacia R18194; identical to SEQ ID NO: 14508
  CDS (1)..(1275)

SEQ ID NO: 53998 - protein, 424 aa, Burkholderia cepacia R18194; identical to SEQ ID NO: 14509

SEQ ID NO: 53999 - DNA, 1515 bp, Listeria monocytogenes str. 4b H7858; identical to SEQ ID NO: 14510
  CDS (1)..(1515): transl_table=11

SEQ ID NO: 54000 - protein, 504 aa, Listeria monocytogenes str. 4b H7858; identical to SEQ ID NO: 14511

SEQ ID NO: 54001 - DNA, 1212 bp, Bacillus cereus G9241; identical to SEQ ID NO: 14512
  CDS (1)..(1212): transl_table=11

SEQ ID NO: 54002 - protein, 403 aa, Bacillus cereus G9241; identical to SEQ ID NO: 14513

SEQ ID NO: 54003 - DNA, 1530 bp, Bacillus cereus G9241; identical to SEQ ID NO: 14514
  CDS (1)..(1530): transl_table=11

SEQ ID NO: 54004 - protein, 509 aa, Bacillus cereus G9241; identical to SEQ ID NO: 14515

SEQ ID NO: 54005 - DNA, 1545 bp, Bacillus cereus G9241; identical to SEQ ID NO: 14516
  CDS (1)..(1545): transl_table=11

SEQ ID NO: 54006 - protein, 514 aa, Bacillus cereus G9241; identical to SEQ ID NO: 14517

SEQ ID NO: 54007 - DNA, 1167 bp, Bacillus cereus G9241; identical to SEQ ID NO: 14518
  CDS (1)..(1167): transl_table=11

SEQ ID NO: 54008 - protein, 388 aa, Bacillus cereus G9241; identical to SEQ ID NO: 14519

SEQ ID NO: 54009 - DNA, 1194 bp, Bacillus cereus G9241; identical to SEQ ID NO: 14520
  CDS (1)..(1194): transl_table=11

SEQ ID NO: 54010 - protein, 397 aa, Bacillus cereus G9241; identical to SEQ ID NO: 14521

SEQ ID NO: 54011 - DNA, 1314 bp, Rubrivivax gelatinosus PM1; identical to SEQ ID NO: 14522
  CDS (1)..(1314)

SEQ ID NO: 54012 - protein, 437 aa, Rubrivivax gelatinosus PM1; identical to SEQ ID NO: 14523

SEQ ID NO: 54013 - DNA, 1647 bp, Rubrivivax gelatinosus PM1; identical to SEQ ID NO: 14524
  CDS (1)..(1647)

SEQ ID NO: 54014 - protein, 548 aa, Rubrivivax gelatinosus PM1; identical to SEQ ID NO: 14525

SEQ ID NO: 54015 - DNA, 1287 bp, Pseudomonas fluorescens PfO-1; identical to SEQ ID NO: 14526
  CDS (1)..(1287)

SEQ ID NO: 54016 - protein, 428 aa, Pseudomonas fluorescens PfO-1; identical to SEQ ID NO: 14527

SEQ ID NO: 54017 - DNA, 1158 bp, Pseudomonas fluorescens PfO-1; identical to SEQ ID NO: 14528
  CDS (1)..(1158)

SEQ ID NO: 54018 - protein, 385 aa, Pseudomonas fluorescens PfO-1; identical to SEQ ID NO: 14529

SEQ ID NO: 54019 - DNA, 1263 bp, Burkholderia fungorum LB400; identical to SEQ ID NO: 14530
  CDS (1)..(1263)

SEQ ID NO: 54020 - protein, 420 aa, Burkholderia fungorum LB400; identical to SEQ ID NO: 14531

SEQ ID NO: 54021 - DNA, 1554 bp, Burkholderia fungorum LB400; identical to SEQ ID NO: 14532
  CDS (1)..(1554)

SEQ ID NO: 54022 - protein, 517 aa, Burkholderia fungorum LB400; identical to SEQ ID NO: 14533

SEQ ID NO: 54023 - DNA, 1452 bp, Burkholderia fungorum LB400; identical to SEQ ID NO: 14534
  CDS (1)..(1452)

SEQ ID NO: 54024 - protein, 483 aa, Burkholderia fungorum LB400; identical to SEQ ID NO: 14535

SEQ ID NO: 54025 - DNA, 1503 bp, Cytophaga hutchinsonii; identical to SEQ ID NO: 14536
  CDS (1)..(1503)

SEQ ID NO: 54026 - protein, 500 aa, Cytophaga hutchinsonii; identical to SEQ ID NO: 14537

SEQ ID NO: 54027 - DNA, 1434 bp, Oenococcus oeni PSU-1; identical to SEQ ID NO: 14538
  CDS (1)..(1434)

SEQ ID NO: 54028 - protein, 477 aa, Oenococcus oeni PSU-1; identical to SEQ ID NO: 14539

SEQ ID NO: 54029 - DNA, 1464 bp, Pediococcus pentosaceus ATCC 25745; identical to SEQ ID NO: 14540
  CDS (1)..(1464)

SEQ ID NO: 54030 - protein, 487 aa, Pediococcus pentosaceus ATCC 25745; identical to SEQ ID NO: 14541

SEQ ID NO: 54031 - DNA, 1365 bp, Pediococcus pentosaceus ATCC 25745; identical to SEQ ID NO: 14542
  CDS (1)..(1365)

SEQ ID NO: 54032 - protein, 454 aa, Pediococcus pentosaceus ATCC 25745; identical to SEQ ID NO: 14543

SEQ ID NO: 54033 - DNA, 1191 bp, Thiobacillus denitrificans ATCC 25259; identical to SEQ ID NO: 14544
  CDS (1)..(1191)

SEQ ID NO: 54034 - protein, 396 aa, Thiobacillus denitrificans ATCC 25259; identical to SEQ ID NO: 14545

SEQ ID NO: 54035 - DNA, 1443 bp, Thiobacillus denitrificans ATCC 25259; identical to SEQ ID NO: 14546
  CDS (1)..(1443)

SEQ ID NO: 54036 - protein, 480 aa, Thiobacillus denitrificans ATCC 25259; identical to SEQ ID NO: 14547

SEQ ID NO: 54037 - DNA, 1260 bp, Thiobacillus denitrificans ATCC 25259; identical to SEQ ID NO: 14548
  CDS (1)..(1260)

SEQ ID NO: 54038 - protein, 419 aa, Thiobacillus denitrificans ATCC 25259; identical to SEQ ID NO: 14549

SEQ ID NO: 54039 - DNA, 1959 bp, Xylella fastidiosa Ann-1; identical to SEQ ID NO: 14550
  CDS (1)..(1959)

SEQ ID NO: 54040 - protein, 652 aa, Xylella fastidiosa Ann-1; identical to SEQ ID NO: 14551

SEQ ID NO: 54041 - DNA, 1206 bp, Pseudomonas aeruginosa UCBPP-PA14; identical to SEQ ID NO: 14552
  CDS (1)..(1206)

SEQ ID NO: 54042 - protein, 401 aa, Pseudomonas aeruginosa UCBPP-PA14; identical to SEQ ID NO: 14553

SEQ ID NO: 54043 - DNA, 1203 bp, Erythrobacter litoralis HTCC2594; identical to SEQ ID NO: 14554
  CDS (1)..(1203): transl_table=11

SEQ ID NO: 54044 - protein, 400 aa, Erythrobacter litoralis HTCC2594; identical to SEQ ID NO: 14555

SEQ ID NO: 54045 - DNA, 1497 bp, Brevibacterium linens BL2; identical to SEQ ID NO: 14556
  CDS (1)..(1497)

SEQ ID NO: 54046 - protein, 498 aa, Brevibacterium linens BL2; identical to SEQ ID NO: 14557

SEQ ID NO: 54047 - DNA, 1446 bp, Lactococcus lactis subsp. cremoris SK11; identical to SEQ ID NO: 14558
  CDS (1)..(1446)

SEQ ID NO: 54048 - protein, 481 aa, Lactococcus lactis subsp. cremoris SK11; identical to SEQ ID NO: 14559

SEQ ID NO: 54049 - DNA, 1470 bp, Lactobacillus casei ATCC 334; identical to SEQ ID NO: 14560
  CDS (1)..(1470)

SEQ ID NO: 54050 - protein, 489 aa, Lactobacillus casei ATCC 334; identical to SEQ ID NO: 14561

SEQ ID NO: 54051 - DNA, 1212 bp, Bacillus anthracis str. A2012; identical to SEQ ID NO: 14562
  CDS (1)..(1212)

SEQ ID NO: 54052 - protein, 403 aa, Bacillus anthracis str. A2012; identical to SEQ ID NO: 14563

SEQ ID NO: 54053 - DNA, 2703 bp, Anaeromyxobacter dehalogenans 2CP-C; identical to SEQ ID NO: 14564
  CDS (1)..(2703): transl_table=11

SEQ ID NO: 54054 - protein, 900 aa, Anaeromyxobacter dehalogenans 2CP-C; identical to SEQ ID NO: 14565

SEQ ID NO: 54055 - DNA, 1461 bp, Anaeromyxobacter dehalogenans 2CP-C; identical to SEQ ID NO: 14566
  CDS (1)..(1461): transl_table=11

SEQ ID NO: 54056 - protein, 486 aa, Anaeromyxobacter dehalogenans 2CP-C; identical to SEQ ID NO: 14567

SEQ ID NO: 54057 - DNA, 1509 bp, Anaeromyxobacter dehalogenans 2CP-C; identical to SEQ ID NO: 14568
  CDS (1)..(1509): transl_table=11

SEQ ID NO: 54058 - protein, 502 aa, Anaeromyxobacter dehalogenans 2CP-C; identical to SEQ ID NO: 14569

SEQ ID NO: 54059 - DNA, 1533 bp, Arthrobacter sp. FB24; identical to SEQ ID NO: 14570
  CDS (1)..(1533): transl_table=11

SEQ ID NO: 54060 - protein, 510 aa, Arthrobacter sp. FB24; identical to SEQ ID NO: 14571

SEQ ID NO: 54061 - DNA, 1161 bp, Azotobacter vinelandii AvOP; identical to SEQ ID NO: 14572
  CDS (1)..(1161): transl_table=11

SEQ ID NO: 54062 - protein, 386 aa, Azotobacter vinelandii AvOP; identical to SEQ ID NO: 14573

SEQ ID NO: 54063 - DNA, 1446 bp, Azotobacter vinelandii AvOP; identical to SEQ ID NO: 14574
  CDS (1)..(1446): transl_table=11

SEQ ID NO: 54064 - protein, 481 aa, Azotobacter vinelandii AvOP; identical to SEQ ID NO: 14575

SEQ ID NO: 54065 - DNA, 1623 bp, Burkholderia vietnamiensis G4; identical to SEQ ID NO: 14576
  CDS (1)..(1623): transl_table=11

SEQ ID NO: 54066 - protein, 540 aa, Burkholderia vietnamiensis G4; identical to SEQ ID NO: 14577

SEQ ID NO: 54067 - DNA, 1452 bp, Burkholderia vietnamiensis G4; identical to SEQ ID NO: 14578
  CDS (1)..(1452): transl_table=11

SEQ ID NO: 54068 - protein, 483 aa, Burkholderia vietnamiensis G4; identical to SEQ ID NO: 14579

SEQ ID NO: 54069 - DNA, 1275 bp, Burkholderia mallei 10229; identical to SEQ ID NO: 14580
  CDS (1)..(1275)

SEQ ID NO: 54070 - protein, 424 aa, Burkholderia mallei 10229; identical to SEQ ID NO: 14581

SEQ ID NO: 54071 - DNA, 1275 bp, Burkholderia mallei 10399; identical to SEQ ID NO: 14582
  CDS (1)..(1275)

SEQ ID NO: 54072 - protein, 424 aa, Burkholderia mallei 10399; identical to SEQ ID NO: 14583

SEQ ID NO: 54073 - DNA, 1275 bp, Burkholderia cenocepacia AU 1054; identical to SEQ ID NO: 14621
  CDS (1)..(1275): transl_table=11

SEQ ID NO: 54074 - protein, 424 aa, Burkholderia cenocepacia AU 1054; identical to SEQ ID NO: 14622

SEQ ID NO: 54075 - DNA, 1623 bp, Burkholderia cenocepacia AU 1054; identical to SEQ ID NO: 14623
  CDS (1)..(1623): transl_table=11

SEQ ID NO: 54076 - protein, 540 aa, Burkholderia cenocepacia AU 1054; identical to SEQ ID NO: 14624

SEQ ID NO: 54077 - DNA, 1440 bp, Burkholderia cenocepacia AU 1054; identical to SEQ ID NO: 14625
  CDS (1)..(1440): transl_table=11

SEQ ID NO: 54078 - protein, 479 aa, Burkholderia cenocepacia AU 1054; identical to SEQ ID NO: 14626

SEQ ID NO: 54079 - DNA, 1077 bp, Burkholderia cenocepacia HI2424; identical to SEQ ID NO: 14627
  CDS (1)..(1077): transl_table=11

SEQ ID NO: 54080 - protein, 358 aa, Burkholderia cenocepacia HI2424; identical to SEQ ID NO: 14628

SEQ ID NO: 54081 - DNA, 1551 bp, Burkholderia cenocepacia HI2424; identical to SEQ ID NO: 14629
  CDS (1)..(1551): transl_table=11

SEQ ID NO: 54082 - protein, 516 aa, Burkholderia cenocepacia HI2424; identical to SEQ ID NO: 14630

SEQ ID NO: 54083 - DNA, 1425 bp, Chromohalobacter salexigens DSM 3043; identical to SEQ ID NO: 14631
  CDS (1)..(1425): transl_table=11

SEQ ID NO: 54084 - protein, 474 aa, Chromohalobacter salexigens DSM 3043; identical to SEQ ID NO: 14632

SEQ ID NO: 54085 - DNA, 1440 bp, Burkholderia pseudomallei 668; identical to SEQ ID NO: 14633
  CDS (1)..(1440)

SEQ ID NO: 54086 - protein, 479 aa, Burkholderia pseudomallei 668; identical to SEQ ID NO: 14634

SEQ ID NO: 54087 - DNA, 1719 bp, Polaromonas sp. JS666; identical to SEQ ID NO: 14635
  CDS (1)..(1719): transl_table=11

SEQ ID NO: 54088 - protein, 572 aa, Polaromonas sp. JS666; identical to SEQ ID NO: 14636

SEQ ID NO: 54089 - DNA, 1284 bp, Solibacter usitatus Ellin6076; identical to SEQ ID NO: 14637
  CDS (1)..(1284): transl_table=11

SEQ ID NO: 54090 - protein, 427 aa, Solibacter usitatus Ellin6076; identical to SEQ ID NO: 14638

SEQ ID NO: 54091 - DNA, 1191 bp, Geobacter metallireducens GS-15; identical to SEQ ID NO: 14639
  CDS (1)..(1191): transl_table=11

SEQ ID NO: 54092 - protein, 396 aa, Geobacter metallireducens GS-15; identical to SEQ ID NO: 14640

SEQ ID NO: 54093 - DNA, 1509 bp, Geobacter metallireducens GS-15; identical to SEQ ID NO: 14641
  CDS (1)..(1509): transl_table=11

SEQ ID NO: 54094 - protein, 502 aa, Geobacter metallireducens GS-15; identical to SEQ ID NO: 14642

SEQ ID NO: 54095 - DNA, 1524 bp, Exiguobacterium sp. 255-15; identical to SEQ ID NO: 14643
  CDS (1)..(1524): transl_table=11

SEQ ID NO: 54096 - protein, 507 aa, Exiguobacterium sp. 255-15; identical to SEQ ID NO: 14644

SEQ ID NO: 54097 - DNA, 1440 bp, Exiguobacterium sp. 255-15; identical to SEQ ID NO: 14645
  CDS (1)..(1440): transl_table=11

SEQ ID NO: 54098 - protein, 479 aa, Exiguobacterium sp. 255-15; identical to SEQ ID NO: 14646

SEQ ID NO: 54099 - DNA, 1512 bp, Exiguobacterium sp. 255-15; identical to SEQ ID NO: 14647
  CDS (1)..(1512): transl_table=11

SEQ ID NO: 54100 - protein, 503 aa, Exiguobacterium sp. 255-15; identical to SEQ ID NO: 14648

SEQ ID NO: 54101 - DNA, 1467 bp, Desulfuromonas acetoxidans DSM 684; identical to SEQ ID NO: 14649
  CDS (1)..(1467): transl_table=11

SEQ ID NO: 54102 - protein, 488 aa, Desulfuromonas acetoxidans DSM 684; identical to SEQ ID NO: 14650

SEQ ID NO: 54103 - DNA, 1443 bp, Desulfuromonas acetoxidans DSM 684; identical to SEQ ID NO: 14651
  CDS (1)..(1443): transl_table=11

SEQ ID NO: 54104 - protein, 480 aa, Desulfuromonas acetoxidans DSM 684; identical to SEQ ID NO: 14652

SEQ ID NO: 54105 - DNA, 1437 bp, Desulfitobacterium hafniense DCB-2; identical to SEQ ID NO: 14653
  CDS (1)..(1437): transl_table=11

SEQ ID NO: 54106 - protein, 478 aa, Desulfitobacterium hafniense DCB-2; identical to SEQ ID NO: 14654

SEQ ID NO: 54107 - DNA, 1608 bp, Methylobacillus flagellatus KT; identical to SEQ ID NO: 14655
  CDS (1)..(1608): transl_table=11

SEQ ID NO: 54108 - protein, 535 aa, Methylobacillus flagellatus KT; identical to SEQ ID NO: 14656

SEQ ID NO: 54109 - DNA, 1152 bp, Methylobacillus flagellatus KT; identical to SEQ ID NO: 14657
  CDS (1)..(1152): transl_table=11

SEQ ID NO: 54110 - protein, 383 aa, Methylobacillus flagellatus KT; identical to SEQ ID NO: 14658

SEQ ID NO: 54111 - DNA, 1173 bp, Sphingopyxis alaskensis RB2256; identical to SEQ ID NO: 14659
  CDS (1)..(1173): transl_table=11

SEQ ID NO: 54112 - protein, 390 aa, Sphingopyxis alaskensis RB2256; identical to SEQ ID NO: 14660

SEQ ID NO: 54113 - DNA, 1140 bp, Sphingopyxis alaskensis RB2256; identical to SEQ ID NO: 14661
  CDS (1)..(1140): transl_table=11

SEQ ID NO: 54114 - protein, 379 aa, Sphingopyxis alaskensis RB2256; identical to SEQ ID NO: 14662

SEQ ID NO: 54115 - DNA, 1527 bp, Shewanella amazonensis SB2B; identical to SEQ ID NO: 14663
  CDS (1)..(1527): transl_table=11

SEQ ID NO: 54116 - protein, 508 aa, Shewanella amazonensis SB2B; identical to SEQ ID NO: 14664

SEQ ID NO: 54117 - DNA, 1518 bp, Ralstonia metallidurans CH34; identical to SEQ ID NO: 14665
  CDS (1)..(1518): transl_table=11

SEQ ID NO: 54118 - protein, 505 aa, Ralstonia metallidurans CH34; identical to SEQ ID NO: 14666

SEQ ID NO: 54119 - DNA, 1605 bp, Ralstonia metallidurans CH34; identical to SEQ ID NO: 14667
  CDS (1)..(1605): transl_table=11

SEQ ID NO: 54120 - protein, 534 aa, Ralstonia metallidurans CH34; identical to SEQ ID NO: 14668

SEQ ID NO: 54121 - DNA, 1599 bp, Ralstonia metallidurans CH34; identical to SEQ ID NO: 14669
  CDS (1)..(1599): transl_table=11

SEQ ID NO: 54122 - protein, 532 aa, Ralstonia metallidurans CH34; identical to SEQ ID NO: 14670

SEQ ID NO: 54123 - DNA, 1281 bp, Rubrobacter xylanophilus DSM 9941; identical to SEQ ID NO: 14671
  CDS (1)..(1281): transl_table=11

SEQ ID NO: 54124 - protein, 426 aa, Rubrobacter xylanophilus DSM 9941; identical to SEQ ID NO: 14672

SEQ ID NO: 54125 - DNA, 1437 bp, Mesorhizobium sp. BNC1; identical to SEQ ID NO: 14673
  CDS (1)..(1437): transl_table=11

SEQ ID NO: 54126 - protein, 478 aa, Mesorhizobium sp. BNC1; identical to SEQ ID NO: 14674

SEQ ID NO: 54127 - DNA, 1404 bp, Kineococcus radiotolerans SRS30216; identical to SEQ ID NO: 14675
  CDS (1)..(1404): transl_table=11

SEQ ID NO: 54128 - protein, 467 aa, Kineococcus radiotolerans SRS30216; identical to SEQ ID NO: 14676

SEQ ID NO: 54129 - DNA, 1476 bp, Kineococcus radiotolerans SRS30216; identical to SEQ ID NO: 14677
  CDS (1)..(1476): transl_table=11

SEQ ID NO: 54130 - protein, 491 aa, Kineococcus radiotolerans SRS30216; identical to SEQ ID NO: 14678

SEQ ID NO: 54131 - DNA, 1551 bp, Silicibacter sp. TM1040; identical to SEQ ID NO: 14679
  CDS (1)..(1551): transl_table=11

SEQ ID NO: 54132 - protein, 516 aa, Silicibacter sp. TM1040; identical to SEQ ID NO: 14680

SEQ ID NO: 54133 - DNA, 1554 bp, Nitrobacter hamburgensis X14; identical to SEQ ID NO: 14681
  CDS (1)..(1554): transl_table=11

SEQ ID NO: 54134 - protein, 517 aa, Nitrobacter hamburgensis X14; identical to SEQ ID NO: 14682

SEQ ID NO: 54135 - DNA, 1428 bp, Paracoccus denitrificans PD1222; identical to SEQ ID NO: 14683
  CDS (1)..(1428): transl_table=11

SEQ ID NO: 54136 - protein, 475 aa, Paracoccus denitrificans PD1222; identical to SEQ ID NO: 14684

SEQ ID NO: 54137 - DNA, 1569 bp, Pseudomonas fluorescens; identical to SEQ ID NO: 14685
  CDS (1)..(1569): transl_table=11

SEQ ID NO: 54138 - protein, 522 aa, Pseudomonas fluorescens; identical to SEQ ID NO: 14686

SEQ ID NO: 54139 - DNA, 1158 bp, Pseudomonas fluorescens; identical to SEQ ID NO: 14687
  CDS (1)..(1158): transl_table=11

SEQ ID NO: 54140 - protein, 385 aa, Pseudomonas fluorescens; identical to SEQ ID NO: 14688

SEQ ID NO: 54141 - DNA, 1485 bp, Staphylococcus haemolyticus; identical to SEQ ID NO: 14689
  CDS (1)..(1485): transl_table=11

SEQ ID NO: 54142 - protein, 494 aa, Staphylococcus haemolyticus; identical to SEQ ID NO: 14690

SEQ ID NO: 54143 - DNA, 1515 bp, Listeria monocytogenes; identical to SEQ ID NO: 14691
  CDS (1)..(1515): transl_table=11

SEQ ID NO: 54144 - protein, 504 aa, Listeria monocytogenes; identical to SEQ ID NO: 14692

SEQ ID NO: 54145 - DNA, 1485 bp, Salmonella typhimurium; identical to SEQ ID NO: 14693
  CDS (1)..(1485): transl_table=11

SEQ ID NO: 54146 - protein, 494 aa, Salmonella typhimurium; identical to SEQ ID NO: 14694

SEQ ID NO: 54147 - DNA, 1530 bp, Bacillus anthracis; identical to SEQ ID NO: 14695
  CDS (1)..(1530): transl_table=11

SEQ ID NO: 54148 - protein, 509 aa, Bacillus anthracis; identical to SEQ ID NO: 14696

SEQ ID NO: 54149 - DNA, 1530 bp, Bacillus cereus; identical to SEQ ID NO: 14697
  CDS (1)..(1530): transl_table=11

SEQ ID NO: 54150 - protein, 509 aa, Bacillus cereus; identical to SEQ ID NO: 14698

SEQ ID NO: 54151 - DNA, 1503 bp, Bacillus subtilis; identical to SEQ ID NO: 14699
  CDS (1)..(1503): transl_table=11

SEQ ID NO: 54152 - protein, 500 aa, Bacillus subtilis; identical to SEQ ID NO: 14700

SEQ ID NO: 54153 - DNA, 1482 bp, Staphylococcus aureus; identical to SEQ ID NO: 14701
  CDS (1)..(1482): transl_table=11

SEQ ID NO: 54154 - protein, 493 aa, Staphylococcus aureus; identical to SEQ ID NO: 14702

SEQ ID NO: 54155 - DNA, 1473 bp, Staphylococcus epidermidis; identical to SEQ ID NO: 14703
  CDS (1)..(1473): transl_table=11

SEQ ID NO: 54156 - protein, 490 aa, Staphylococcus epidermidis; identical to SEQ ID NO: 14704

SEQ ID NO: 54157 - DNA, 1473 bp, Staphylococcus epidermidis; identical to SEQ ID NO: 14705
  CDS (1)..(1473): transl_table=11

SEQ ID NO: 54158 - protein, 490 aa, Staphylococcus epidermidis; identical to SEQ ID NO: 14706

SEQ ID NO: 54159 - DNA, 1545 bp, Bacillus cereus; identical to SEQ ID NO: 14707
  CDS (1)..(1545): transl_table=11

SEQ ID NO: 54160 - protein, 514 aa, Bacillus cereus; identical to SEQ ID NO: 14708

SEQ ID NO: 54161 - DNA, 1449 bp, Bacillus subtilis; identical to SEQ ID NO: 14709
  CDS (1)..(1449): transl_table=11

SEQ ID NO: 54162 - protein, 482 aa, Bacillus subtilis; identical to SEQ ID NO: 14710

SEQ ID NO: 54163 - DNA, 1485 bp, Staphylococcus aureus; identical to SEQ ID NO: 14711
  CDS (1)..(1485): transl_table=11

SEQ ID NO: 54164 - protein, 494 aa, Staphylococcus aureus; identical to SEQ ID NO: 14712

SEQ ID NO: 54165 - DNA, 1467 bp, Staphylococcus epidermidis; identical to SEQ ID NO: 14713
  CDS (1)..(1467)

SEQ ID NO: 54166 - protein, 488 aa, Staphylococcus epidermidis; identical to SEQ ID NO: 14714

SEQ ID NO: 54167 - DNA, 1512 bp, Bacillus halodurans; identical to SEQ ID NO: 14715
  CDS (1)..(1512): transl_table=11

SEQ ID NO: 54168 - protein, 503 aa, Bacillus halodurans; identical to SEQ ID NO: 14716

SEQ ID NO: 54169 - DNA, 1512 bp, Bacillus pseudofirmus; identical to SEQ ID NO: 14717
  CDS (1)..(1512): transl_table=11

SEQ ID NO: 54170 - protein, 503 aa, Bacillus pseudofirmus; identical to SEQ ID NO: 14718

SEQ ID NO: 54171 - DNA, 1473 bp, Buchnera aphidicola; identical to SEQ ID NO: 14719
  CDS (1)..(1473): transl_table=11

SEQ ID NO: 54172 - protein, 490 aa, Buchnera aphidicola; identical to SEQ ID NO: 14720

SEQ ID NO: 54173 - DNA, 1431 bp, Clostridium perfringens; identical to SEQ ID NO: 14721
  CDS (1)..(1431): transl_table=11

SEQ ID NO: 54174 - protein, 476 aa, Clostridium perfringens; identical to SEQ ID NO: 14722

SEQ ID NO: 54175 - DNA, 1461 bp, Escherichia coli O157; identical to SEQ ID NO: 14723
  CDS (1)..(1461): transl_table=11

SEQ ID NO: 54176 - protein, 486 aa, Escherichia coli O157; identical to SEQ ID NO: 14724

SEQ ID NO: 54177 - DNA, 1449 bp, Listeria monocytogenes; identical to SEQ ID NO: 14725
  CDS (1)..(1449): transl_table=11

SEQ ID NO: 54178 - protein, 482 aa, Listeria monocytogenes; identical to SEQ ID NO: 14726

SEQ ID NO: 54179 - DNA, 1473 bp, Pseudomonas aeruginosa; identical to SEQ ID NO: 14727
  CDS (1)..(1473): transl_table=11

SEQ ID NO: 54180 - protein, 490 aa, Pseudomonas aeruginosa; identical to SEQ ID NO: 14728

SEQ ID NO: 54181 - DNA, 1446 bp, Pseudomonas putida; identical to SEQ ID NO: 14729
  CDS (1)..(1446): transl_table=11

SEQ ID NO: 54182 - protein, 481 aa, Pseudomonas putida; identical to SEQ ID NO: 14730

SEQ ID NO: 54183 - DNA, 1446 bp, Pseudomonas putida; identical to SEQ ID NO: 14731
  CDS (1)..(1446): transl_table=11

SEQ ID NO: 54184 - protein, 481 aa, Pseudomonas putida; identical to SEQ ID NO: 14732

SEQ ID NO: 54185 - DNA, 1440 bp, Pseudomonas syringae; identical to SEQ ID NO: 14733
  CDS (1)..(1440): transl_table=11

SEQ ID NO: 54186 - protein, 479 aa, Pseudomonas syringae; identical to SEQ ID NO: 14734

SEQ ID NO: 54187 - DNA, 1461 bp, Salmonella typhi; identical to SEQ ID NO: 14735
  CDS (1)..(1461): transl_table=11

SEQ ID NO: 54188 - protein, 486 aa, Salmonella typhi; identical to SEQ ID NO: 14736

SEQ ID NO: 54189 - DNA, 1461 bp, Shigella flexneri; identical to SEQ ID NO: 14737
  CDS (1)..(1461): transl_table=11

SEQ ID NO: 54190 - protein, 486 aa, Shigella flexneri; identical to SEQ ID NO: 14738

SEQ ID NO: 54191 - DNA, 1485 bp, Staphylococcus aureus; identical to SEQ ID NO: 14739
  CDS (1)..(1485): transl_table=11

SEQ ID NO: 54192 - protein, 494 aa, Staphylococcus aureus; identical to SEQ ID NO: 14740

SEQ ID NO: 54193 - DNA, 1461 bp, Yersinia pestis; identical to SEQ ID NO: 14741
  CDS (1)..(1461): transl_table=11

SEQ ID NO: 54194 - protein, 486 aa, Yersinia pestis; identical to SEQ ID NO: 14742

SEQ ID NO: 54195 - DNA, 1509 bp, Helicobacter pylori J99; identical to SEQ ID NO: 14743
  CDS (1)..(1509): transl_table=11

SEQ ID NO: 54196 - protein, 502 aa, Helicobacter pylori J99; identical to SEQ ID NO: 14744

SEQ ID NO: 54197 - DNA, 1509 bp, Helicobacter pylori; identical to SEQ ID NO: 14745
  CDS (1)..(1509): transl_table=11

SEQ ID NO: 54198 - protein, 502 aa, Helicobacter pylori; identical to SEQ ID NO: 14746

SEQ ID NO: 54199 - DNA, 1242 bp, Escherichia coli; identical to SEQ ID NO: 14747
  CDS (1)..(1242): transl_table=11

SEQ ID NO: 54200 - protein, 413 aa, Escherichia coli; identical to SEQ ID NO: 14748

SEQ ID NO: 54201 - DNA, 1242 bp, Salmonella typhimurium; identical to SEQ ID NO: 14749
  CDS (1)..(1242): transl_table=11

SEQ ID NO: 54202 - protein, 413 aa, Salmonella typhimurium; identical to SEQ ID NO: 14750

SEQ ID NO: 54203 - DNA, 1242 bp, Shigella flexneri; identical to SEQ ID NO: 14751
  CDS (1)..(1242): transl_table=11

SEQ ID NO: 54204 - protein, 413 aa, Shigella flexneri; identical to SEQ ID NO: 14752

SEQ ID NO: 54205 - DNA, 23 bp, Artificial sequence
  Primer sequence
atgatgaagaaaacgcccacctc

SEQ ID NO: 54206 - DNA, 24 bp, Artificial sequence
  Primer sequence
ttacaataaccattccacgggcaa

SEQ ID NO: 54207 - protein, 736 aa, Artificial sequence; identical to SEQ ID NO: 14755
  Consensus
  Variant (3)..(4): Xaa in position 3 to 4 is any amino acid
  Variant (6)..(7): Xaa in position 6 to 7 is any amino acid
  Variant (9)..(10): Xaa in position 9 to 10 is any amino acid
  Variant (12)..(16): Xaa in position 12 to 16 is any amino acid
  Variant (18)..(19): Xaa in position 18 to 19 is any or no amino acid
  Variant (21)..(21): Xaa in position 21 is any amino acid
  Variant (22)..(93): Xaa in position 22 to 93 is any or no amino acid
  Variant (95)..(105): Xaa in position 95 to 105 is any amino acid
  Variant (106)..(109): Xaa in position 106 to 109 is any or no amino acid
  Variant (111)..(111): Xaa in position 111 is any amino acid
  Variant (113)..(113): Xaa in position 113 is any amino acid
  Variant (116)..(117): Xaa in position 116 to 117 is any amino acid
  Variant (119)..(119): Xaa in position 119 is any or no amino acid
  Variant (121)..(121): Xaa in position 121 is any amino acid
  Variant (123)..(123): Xaa in position 123 is any amino acid
  Variant (127)..(128): Xaa in position 127 to 128 is any amino acid
  Variant (130)..(131): Xaa in position 130 to 131 is any amino acid
  Variant (133)..(135): Xaa in position 133 to 135 is any amino acid
  Variant (137)..(137): Xaa in position 137 is any amino acid
  Variant (139)..(139): Xaa in position 139 is any amino acid
  Variant (144)..(145): Xaa in position 144 to 145 is any amino acid
  Variant (147)..(147): Xaa in position 147 is any amino acid
  Variant (150)..(151): Xaa in position 150 to 151 is any amino acid
  Variant (153)..(154): Xaa in position 153 to 154 is any amino acid
  Variant (158)..(158): Xaa in position 158 is any amino acid
  Variant (161)..(161): Xaa in position 161 is any amino acid
  Variant (165)..(165): Xaa in position 165 is any amino acid
  Variant (172)..(172): Xaa in position 172 is any amino acid
  Variant (176)..(183): Xaa in position 176 to 183 is any amino acid
  Variant (184)..(190): Xaa in position 184 to 190 is any or no amino acid
  Variant (192)..(194): Xaa in position 192 to 194 is any amino acid
  Variant (197)..(197): Xaa in position 197 is any amino acid
  Variant (199)..(200): Xaa in position 199 to 200 is any amino acid
  Variant (202)..(202): Xaa in position 202 is any amino acid
  Variant (204)..(209): Xaa in position 204 to 209 is any amino acid
  Variant (210)..(229): Xaa in position 210 to 229 is any or no amino acid
  Variant (233)..(233): Xaa in position 233 is any amino acid
  Variant (235)..(235): Xaa in position 235 is any amino acid
  Variant (245)..(245): Xaa in position 245 is any amino acid
  Variant (252)..(252): Xaa in position 252 is any amino acid
  Variant (259)..(261): Xaa in position 259 to 261 is any amino acid
  Variant (262)..(286): Xaa in position 262 to 286 is any or no amino acid
  Variant (288)..(288): Xaa in position 288 is any or no amino acid
  Variant (290)..(291): Xaa in position 290 to 291 is any amino acid
  Variant (295)..(295): Xaa in position 295 is any amino acid
  Variant (298)..(298): Xaa in position 298 is any amino acid
  Variant (300)..(301): Xaa in position 300 to 301 is any amino acid
  Variant (303)..(305): Xaa in position 303 to 305 is any amino acid
  Variant (307)..(308): Xaa in position 307 to 308 is any amino acid
  Variant (311)..(313): Xaa in position 311 to 313 is any amino acid
  Variant (315)..(327): Xaa in position 315 to 327 is any amino acid
  Variant (328)..(382): Xaa in position 328 to 382 is any or no amino acid
  Variant (384)..(384): Xaa in position 384 is any or no amino acid
  Variant (388)..(388): Xaa in position 388 is any amino acid
  Variant (391)..(396): Xaa in position 391 to 396 is any amino acid
  Variant (398)..(400): Xaa in position 398 to 400 is any amino acid
  Variant (401)..(413): Xaa in position 401 to 413 is any or no amino acid
  Variant (415)..(415): Xaa in position 415 is any or no amino acid
  Variant (418)..(419): Xaa in position 418 to 419 is any amino acid
  Variant (423)..(423): Xaa in position 423 is any or no amino acid
  Variant (425)..(425): Xaa in position 425 is any or no amino acid
  Variant (427)..(427): Xaa in position 427 is any or no amino acid
  Variant (434)..(436): Xaa in position 434 to 436 is any amino acid
  Variant (439)..(439): Xaa in position 439 is any amino acid
  Variant (442)..(443): Xaa in position 442 to 443 is any amino acid
  Variant (446)..(446): Xaa in position 446 is any amino acid
  Variant (450)..(454): Xaa in position 450 to 454 is any or no amino acid
  Variant (456)..(456): Xaa in position 456 is any amino acid
  Variant (461)..(463): Xaa in position 461 to 463 is any amino acid
  Variant (465)..(466): Xaa in position 465 to 466 is any amino acid
  Variant (469)..(470): Xaa in position 469 to 470 is any amino acid
  Variant (472)..(474): Xaa in position 472 to 474 is any amino acid
  Variant (476)..(477): Xaa in position 476 to 477 is any amino acid
  Variant (478)..(488): Xaa in position 478 to 488 is any or no amino acid
  Variant (491)..(491): Xaa in position 491 is any amino acid
  Variant (498)..(498): Xaa in position 498 is any amino acid
  Variant (500)..(503): Xaa in position 500 to 503 is any amino acid
  Variant (504)..(608): Xaa in position 504 to 608 is any or no amino acid
  Variant (613)..(613): Xaa in position 613 is any amino acid
  Variant (618)..(618): Xaa in position 618 is any amino acid
  Variant (619)..(626): Xaa in position 619 to 626 is any or no amino acid
  Variant (629)..(629): Xaa in position 629 is any amino acid
  Variant (637)..(637): Xaa in position 637 is any amino acid
  Variant (640)..(641): Xaa in position 640 to 641 is any amino acid
  Variant (644)..(644): Xaa in position 644 is any amino acid
  Variant (647)..(647): Xaa in position 647 is any amino acid
  Variant (651)..(651): Xaa in position 651 is any amino acid
  Variant (653)..(653): Xaa in position 653 is any amino acid
  Variant (654)..(655): Xaa in position 654 to 655 is any or no amino acid
  Variant (658)..(659): Xaa in position 658 to 659 is any amino acid
  Variant (661)..(666): Xaa in position 661 to 666 is any amino acid
  Variant (669)..(669): Xaa in position 669 is any amino acid
  Variant (670)..(670): Xaa in position 670 is any or no amino acid
  Variant (672)..(672): Xaa in position 672 is any amino acid
  Variant (673)..(673): Xaa in position 673 is any or no amino acid
  Variant (675)..(678): Xaa in position 675 to 678 is any amino acid
  Variant (680)..(681): Xaa in position 680 to 681 is any amino acid
  Variant (683)..(684): Xaa in position 683 to 684 is any amino acid
  Variant (685)..(722): Xaa in position 685 to 722 is any or no amino acid
  Variant (725)..(727): Xaa in position 725 to 727 is any amino acid
  Variant (729)..(729): Xaa in position 729 is any amino acid
  Variant (734)..(734): Xaa in position 734 is any amino acid

SEQ ID NO: 54208 - protein, 17 aa, Artificial sequence
  Consensus
  Variant (2)..(3): Xaa in position 2 to 3 is any amino acid
  Variant (4)..(4): Xaa in position 4 is any or no amino acid
  Variant (6)..(7): Xaa in position 6 to 7 is any amino acid
  Variant (8)..(8): Xaa in position 8 is any or no amino acid
  Variant (10)..(10): Xaa in position 10 is Ile or Val
  Variant (11)..(11): Xaa in position 11 is any amino acid
  Variant (12)..(12): Xaa in position 12 is Ala, Cys, Thr or Val
  Variant (13)..(16): Xaa in position 13 to 16 is any amino acid
LXXXAXXXGXXXXXXXD

SEQ ID NO: 54209 - protein, 20 aa, Artificial sequence
  Consensus
  Variant (2)..(2): Xaa in position 2 is any amino acid
  Variant (4)..(4): Xaa in position 4 is Asn or Arg
  Variant (6)..(8): Xaa in position 6 to 8 is any amino acid
  Variant (9)..(9): Xaa in position 9 is Ala, Ile or Val
  Variant (11)..(13): Xaa in position 11 to 13 is any amino acid
  Variant (14)..(14): Xaa in position 14 is Ala, Gly, Ser, Thr or Val
  Variant (15)..(16): Xaa in position 15 to 16 is any amino acid
  Variant (18)..(18): Xaa in position 18 is Gly or Ser
  Variant (19)..(19): Xaa in position 19 is any amino acid
RXHXKXXXXDXXXXXXGXXN

SEQ ID NO: 54210 - protein, 22 aa, Artificial sequence
  Consensus
  Variant (2)..(2): Xaa in position 2 is Phe or Leu
  Variant (3)..(3): Xaa in position 3 is Phe, Ile, Leu or Val
  Variant (5)..(11): Xaa in position 5 to 11 is any amino acid
  Variant (12)..(12): Xaa in position 12 is Phe, Ile, Leu, Met or Val
  Variant (13)..(18): Xaa in position 13 to 18 is any amino acid
  Variant (20)..(21): Xaa in position 20 to 21 is any or no amino acid
YXXPXXXXXXXXXXXXXXGXXV

SEQ ID NO: 54211 - protein, 29 aa, Artificial sequence
  Consensus
  Variant (2)..(2): Xaa in position 2 is Ala, Gly, Gln, Ser or Thr
  Variant (4)..(7): Xaa in position 4 to 7 is any amino acid
  Variant (9)..(13): Xaa in position 9 to 13 is any amino acid
  Variant (14)..(14): Xaa in position 14 is any or no amino acid
  Variant (16)..(16): Xaa in position 16 is Ser or Thr
  Variant (17)..(17): Xaa in position 17 is any amino acid
  Variant (19)..(19): Xaa in position 19 is any amino acid
  Variant (20)..(20): Xaa in position 20 is Asp, Asn or Thr
  Variant (21)..(21): Xaa in position 21 is any amino acid
  Variant (24)..(28): Xaa in position 24 to 28 is any amino acid
HXKXXXXDXXXXXXGXXNXXXRSXXXXXE

SEQ ID NO: 54212 - DNA, 1242 bp, Escherichia coli K12; identical to SEQ ID NO: 19626
  CDS (1)..(1242): transl_table=11

SEQ ID NO: 54213 - protein, 413 aa, Escherichia coli K12; identical to SEQ ID NO: 19627

SEQ ID NO: 54214 - DNA, 1212 bp, Caenorhabditis elegans; identical to SEQ ID NO: 19628
  CDS (1)..(1212)

SEQ ID NO: 54215 - protein, 403 aa, Caenorhabditis elegans; identical to SEQ ID NO: 19629

SEQ ID NO: 54216 - DNA, 1329 bp, Saccharomyces cerevisiae; identical to SEQ ID NO: 19630
  CDS (1)..(1329)

SEQ ID NO: 54217 - protein, 442 aa, Saccharomyces cerevisiae; identical to SEQ ID NO: 19631

SEQ ID NO: 54218 - DNA, 1380 bp, Homo sapiens; identical to SEQ ID NO: 19632
  CDS (1)..(1380)

SEQ ID NO: 54219 - protein, 459 aa, Homo sapiens; identical to SEQ ID NO: 19633

SEQ ID NO: 54220 - DNA, 1380 bp, Mus musculus; identical to SEQ ID NO: 19634
  CDS (1)..(1380)

SEQ ID NO: 54221 - protein, 459 aa, Mus musculus [sequence omitted]

SEQ ID NO: 54222 - DNA, 1302 bp, Mesorhizobium loti MAFF303099; identical to SEQ ID NO: 19636
  CDS (1)..(1302): transl_table=11

SEQ ID NO: 54223 - protein, 433 aa, Mesorhizobium loti MAFF303099; identical to SEQ ID NO: 19637

SEQ ID NO: 54224 - DNA, 1263 bp, Mesorhizobium loti MAFF303099; identical to SEQ ID NO: 19638
  CDS (1)..(1263): transl_table=11

SEQ ID NO: 54225 - protein, 420 aa, Mesorhizobium loti MAFF303099; identical to SEQ ID NO: 19639

SEQ ID NO: 54226 - DNA, 1245 bp, Clostridium acetobutylicum ATCC 824; identical to SEQ ID NO: 19640
  CDS (1)..(1245): transl_table=11

SEQ ID NO: 54227 - protein, 414 aa, Clostridium acetobutylicum ATCC 824; identical to SEQ ID NO: 19641

SEQ ID NO: 54228 - DNA, 1239 bp, Helicobacter pylori 26695; identical to SEQ ID NO: 19642
  CDS (1)..(1239): transl_table=11

SEQ ID NO: 54229 - protein, 412 aa, Helicobacter pylori 26695; identical to SEQ ID NO: 19643

SEQ ID NO: 54230 - DNA, 1248 bp, Aquifex aeolicus VF5; identical to SEQ ID NO: 19644
  CDS (1)..(1248): transl_table=11

SEQ ID NO: 54231 - protein, 415 aa, Aquifex aeolicus VF5; identical to SEQ ID NO: 19645

SEQ ID NO: 54232 - DNA, 1257 bp, Chlamydia trachomatis D/UW-3/CX; identical to SEQ ID NO: 19646
  CDS (1)..(1257): transl_table=11

SEQ ID NO: 54233 - protein, 418 aa, Chlamydia trachomatis D/UW-3/CX; identical to SEQ ID NO: 19647

SEQ ID NO: 54234 - DNA, 1281 bp, Rickettsia prowazekii str. Madrid E; identical to SEQ ID NO: 19648
  CDS (1)..(1281): transl_table=11

SEQ ID NO: 54235 - protein, 426 aa, Rickettsia prowazekii str. Madrid E; identical to SEQ ID NO: 19649

SEQ ID NO: 54236 - DNA, 1239 bp, Helicobacter pylori J99; identical to SEQ ID NO: 19650
  CDS (1)..(1239): transl_table=11

SEQ ID NO: 54237 - protein, 412 aa, Helicobacter pylori J99; identical to SEQ ID NO: 19651

SEQ ID NO: 54238 - DNA, 1239 bp, Thermotoga maritima MSB8; identical to SEQ ID NO: 19652
  CDS (1)..(1239): transl_table=11

SEQ ID NO: 54239 - protein, 412 aa, Thermotoga maritima MSB8; identical to SEQ ID NO: 19653

SEQ ID NO: 54240 - DNA, 1245 bp, Vibrio cholerae O1 biovar eltor str. N16961; identical to SEQ ID NO: 19654
  CDS (1)..(1245): transl_table=11

SEQ ID NO: 54241 - protein, 414 aa, Vibrio cholerae O1 biovar eltor str. N16961; identical to SEQ ID NO: 19655

SEQ ID NO: 54242 - DNA, 1236 bp, Bacillus halodurans C-125; identical to SEQ ID NO: 19656
  CDS (1)..(1236): transl_table=11

SEQ ID NO: 54243 - protein, 411 aa, Bacillus halodurans C-125; identical to SEQ ID NO: 19657

SEQ ID NO: 54244 - DNA, 1221 bp, Pasteurella multocida subsp. multocida str. Pm70; identical to SEQ ID NO: 19658
  CDS (1)..(1221): transl_table=11

SEQ ID NO: 54245 - protein, 406 aa, Pasteurella multocida subsp. multocida str. Pm70; identical to SEQ ID NO: 19659

SEQ ID NO: 54246 - DNA, 1269 bp, Pseudomonas aeruginosa PAO1; identical to SEQ ID NO: 19660
  CDS (1)..(1269): transl_table=11

SEQ ID NO: 54247 - protein, 422 aa, Pseudomonas aeruginosa PAO1; identical to SEQ ID NO: 19661

SEQ ID NO: 54248 - DNA, 1245 bp, Pseudomonas aeruginosa PAO1; identical to SEQ ID NO: 19662
  CDS (1)..(1245): transl_table=11

SEQ ID NO: 54249 - protein, 414 aa, Pseudomonas aeruginosa PAO1; identical to SEQ ID NO: 19663

SEQ ID NO: 54250 - DNA, 1230 bp, Lactococcus lactis subsp. lactis Il1403; identical to SEQ ID NO: 19664
  CDS (1)..(1230): transl_table=11

SEQ ID NO: 54251 - protein, 409 aa, Lactococcus lactis subsp. lactis Il1403; identical to SEQ ID NO: 19665

SEQ ID NO: 54252 - DNA, 1248 bp, Neisseria meningitidis MC58; identical to SEQ ID NO: 19666
  CDS (1)..(1248): transl_table=11

SEQ ID NO: 54253 - protein, 415 aa, Neisseria meningitidis MC58; identical to SEQ ID NO: 19667

SEQ ID NO: 54254 - DNA, 1215 bp, Campylobacter jejuni subsp. jejuni NCTC 11168; identical to SEQ ID NO: 19668
  CDS (1)..(1215): transl_table=11

SEQ ID NO: 54255 - protein, 404 aa, Campylobacter jejuni subsp. jejuni NCTC 11168; identical to SEQ ID NO: 19669

SEQ ID NO: 54256 - DNA, 1248 bp, Neisseria meningitidis Z2491; identical to SEQ ID NO: 19670
  CDS (1)..(1248): transl_table=11

SEQ ID NO: 54257 - protein, 415 aa, Neisseria meningitidis Z2491; identical to SEQ ID NO: 19671

SEQ ID NO: 54258 - DNA, 1287 bp, Deinococcus radiodurans R1; identical to SEQ ID NO: 19672
  CDS (1)..(1287): transl_table=11

SEQ ID NO: 54259 - protein, 428 aa, Deinococcus radiodurans R1; identical to SEQ ID NO: 19673

SEQ ID NO: 54260 - DNA, 1257 bp, Chlamydia muridarum Nigg; identical to SEQ ID NO: 19674
  CDS (1)..(1257): transl_table=11

SEQ ID NO: 54261 - protein, 418 aa, Chlamydia muridarum Nigg; identical to SEQ ID NO: 19675

SEQ ID NO: 54262 - DNA, 1236 bp, Xylella fastidiosa 9a5c; identical to SEQ ID NO: 19676
  CDS (1)..(1236): transl_table=11

SEQ ID NO: 54263 - protein, 411 aa, Xylella fastidiosa 9a5c; identical to SEQ ID NO: 19677

SEQ ID NO: 54264 - DNA, 1236 bp, Streptococcus pneumoniae TIGR4; identical to SEQ ID NO: 19678
  CDS (1)..(1236): transl_table=11

SEQ ID NO: 54265 - protein, 411 aa, Streptococcus pneumoniae TIGR4; identical to SEQ ID NO: 19679

SEQ ID NO: 54266 - DNA, 1236 bp, Clostridium acetobutylicum ATCC 824; identical to SEQ ID NO: 19680
  CDS (1)..(1236): transl_table=11

SEQ ID NO: 54267 - protein, 411 aa, Clostridium acetobutylicum ATCC 824; identical to SEQ ID NO: 19681

SEQ ID NO: 54268 - DNA, 1329 bp, Agrobacterium tumefaciens str. C58; identical to SEQ ID NO: 19682
  CDS (1)..(1329): transl_table=11

SEQ ID NO: 54269 - protein, 442 aa, Agrobacterium tumefaciens str. C58; identical to SEQ ID NO: 19683

SEQ ID NO: 54270 - DNA, 1383 bp, Agrobacterium tumefaciens str. C58; identical to SEQ ID NO: 19684
  CDS (1)..(1383): transl_table=11

SEQ ID NO: 54271 - protein, 460 aa, Agrobacterium tumefaciens str. C58; identical to SEQ ID NO: 19685

SEQ ID NO: 54272 - DNA, 1245 bp, Streptococcus pneumoniae R6; identical to SEQ ID NO: 19686
  CDS (1)..(1245): transl_table=11

SEQ ID NO: 54273 - protein, 414 aa, Streptococcus pneumoniae R6; identical to SEQ ID NO: 19687

SEQ ID NO: 54274 - DNA, 1287 bp, Rickettsia conorii str. Malish 7; identical to SEQ ID NO: 19688
  CDS (1)..(1287): transl_table=11

SEQ ID NO: 54275 - protein, 428 aa, Rickettsia conorii str. Malish 7; identical to SEQ ID NO: 19689

SEQ ID NO: 54276 - DNA, 1245 bp, Staphylococcus aureus subsp. aureus Mu50; identical to SEQ ID NO: 19690
  CDS (1)..(1245): transl_table=11

SEQ ID NO: 54277 - protein, 414 aa, Staphylococcus aureus subsp. aureus Mu50; identical to SEQ ID NO: 19691

SEQ ID NO: 54278 - DNA, 1242 bp, Bacillus subtilis subsp. subtilis str. 168; identical to SEQ ID NO: 19692
  CDS (1)..(1242): transl_table=11

SEQ ID NO: 54279 - protein, 413 aa, Bacillus subtilis subsp. subtilis str. 168; identical to SEQ ID NO: 19693

SEQ ID NO: 54280 - DNA, 1281 bp, Caulobacter crescentus CB15; identical to SEQ ID NO: 19694
  CDS (1)..(1281): transl_table=11

SEQ ID NO: 54281 - protein, 426 aa, Caulobacter crescentus CB15; identical to SEQ ID NO: 19695

SEQ ID NO: 54282 - DNA, 1251 bp, Chlamydophila pneumoniae AR39; identical to SEQ ID NO: 19696
  CDS (1)..(1251): transl_table=11

SEQ ID NO: 54283 - protein, 416 aa, Chlamydophila pneumoniae AR39; identical to SEQ ID NO: 19697

SEQ ID NO: 54284 - DNA, 1242 bp, Listeria monocytogenes EGD-e; identical to SEQ ID NO: 19698
  CDS (1)..(1242): transl_table=11

SEQ ID NO: 54285 - protein, 413 aa, Listeria monocytogenes EGD-e; identical to SEQ ID NO: 19699

SEQ ID NO: 54286 - DNA, 1242 bp, Listeria innocua Clip11262; identical to SEQ ID NO: 19700
  CDS (1)..(1242): transl_table=11

SEQ ID NO: 54287 - protein, 413 aa, Listeria innocua Clip11262; identical to SEQ ID NO: 19701

SEQ ID NO: 54288 - DNA, 1251 bp, Nostoc sp. PCC 7120; identical to SEQ ID NO: 19702
  CDS (1)..(1251): transl_table=11

SEQ ID NO: 54289 - protein, 416 aa, Nostoc sp. PCC 7120; identical to SEQ ID NO: 19703

SEQ ID NO: 54290 - DNA, 1233 bp, Ralstonia solanacearum GMI1000; identical to SEQ ID NO: 19704
  CDS (1)..(1233): transl_table=11

SEQ ID NO: 54291 - protein, 410 aa, Ralstonia solanacearum GMI1000; identical to SEQ ID NO: 19705

SEQ ID NO: 54292 - DNA, 1263 bp, Agrobacterium tumefaciens str. C58; identical to SEQ ID NO: 19706
  CDS (1)..(1263): transl_table=11

SEQ ID NO: 54293 - protein, 420 aa, Agrobacterium tumefaciens str. C58; identical to SEQ ID NO: 19707

SEQ ID NO: 54294 - DNA, 1299 bp, Agrobacterium tumefaciens str. C58; identical to SEQ ID NO: 19708
  CDS (1)..(1299): transl_table=11

SEQ ID NO: 54295 - protein, 432 aa, Agrobacterium tumefaciens str. C58; identical to SEQ ID NO: 19709

SEQ ID NO: 54296 - DNA, 1242 bp, Clostridium perfringens str. 13; identical to SEQ ID NO: 19710
  CDS (1)..(1242): transl_table=11

SEQ ID NO: 54297 - protein, 413 aa, Clostridium perfringens str. 13; identical to SEQ ID NO: 19711

SEQ ID NO: 54298 - DNA, 1281 bp, Schizosaccharomyces pombe 972h-; identical to SEQ ID NO: 19712
  CDS (1)..(1281)

SEQ ID NO: 54299 - protein, 426 aa, Schizosaccharomyces pombe 972h-; identical to SEQ ID NO: 19713

SEQ ID NO: 54300 - DNA, 1242 bp, Fusobacterium nucleatum subsp. nucleatum ATCC 25586; identical to SEQ ID NO: 19714
  CDS (1)..(1242): transl_table=11

SEQ ID NO: 54301 - protein, 413 aa, Fusobacterium nucleatum subsp. nucleatum ATCC 25586; identical to SEQ ID NO: 19715

SEQ ID NO: 54302 - DNA, 1230 bp, Thermoanaerobacter tengcongensis MB4; identical to SEQ ID NO: 19716
  CDS (1)..(1230): transl_table=11

SEQ ID NO: 54303 - protein, 409 aa, Thermoanaerobacter tengcongensis MB4; identical to SEQ ID NO: 19717

SEQ ID NO: 54304 - DNA, 1287 bp, Streptomyces coelicolor A3(2); identical to SEQ ID NO: 19718
  CDS (1)..(1287): transl_table=11

SEQ ID NO: 54305 - protein, 428 aa, Streptomyces coelicolor A3(2); identical to SEQ ID NO: 19719

SEQ ID NO: 54306 - DNA, 1269 bp, Streptomyces coelicolor A3(2); identical to SEQ ID NO: 19720
  CDS (1)..(1269): transl_table=11

SEQ ID NO: 54307 - protein, 422 aa, Streptomyces coelicolor A3(2); identical to SEQ ID NO: 19721

SEQ ID NO: 54308 - DNA, 1290 bp, Streptomyces coelicolor A3(2); identical to SEQ ID NO: 19722
  CDS (1)..(1290): transl_table=11

SEQ ID NO: 54309 - protein, 429 aa, Streptomyces coelicolor A3(2); identical to SEQ ID NO: 19723

SEQ ID NO: 54310 - DNA, 1224 bp, Streptomyces coelicolor A3(2); identical to SEQ ID NO: 19724
  CDS (1)..(1224): transl_table=11

SEQ ID NO: 54311 - protein, 407 aa, Streptomyces coelicolor A3(2); identical to SEQ ID NO: 19725

SEQ ID NO: 54312 - DNA, 1236 bp, Xanthomonas axonopodis pv. citri str. 306; identical to SEQ ID NO: 19726
  CDS (1)..(1236): transl_table=11

SEQ ID NO: 54313 - protein, 411 aa, Xanthomonas axonopodis pv. citri str. 306; identical to SEQ ID NO: 19727

SEQ ID NO: 54314 - DNA, 1317 bp, Drosophila melanogaster; identical to SEQ ID NO: 19728
  CDS (1)..(1317)

SEQ ID NO: 54315 - protein, 438 aa, Drosophila melanogaster; identical to SEQ ID NO: 19729

SEQ ID NO: 54316 - DNA, 1242 bp, Chlorobium tepidum TLS; identical to SEQ ID NO: 19730
  CDS (1)..(1242): transl_table=11

SEQ ID NO: 54317 - protein, 413 aa, Chlorobium tepidum TLS; identical to SEQ ID NO: 19731

SEQ ID NO: 54318 - DNA, 1029 bp, Yersinia pestis KIM; identical to SEQ ID NO: 19732
  CDS (1)..(1029): transl_table=11

SEQ ID NO: 54319 - protein, 342 aa, Yersinia pestis KIM; identical to SEQ ID NO: 19733

SEQ ID NO: 54320 - DNA, 1263 bp, Thermosynechococcus elongatus BP-1; identical to SEQ ID NO: 19734
  CDS (1)..(1263): transl_table=11

SEQ ID NO: 54321 - protein, 420 aa, Thermosynechococcus elongatus BP-1; identical to SEQ ID NO: 19735

SEQ ID NO: 54322 - DNA, 1233 bp, Streptococcus agalactiae 2603V/R; identical to SEQ ID NO: 19736
  CDS (1)..(1233): transl_table=11

SEQ ID NO: 54323 - protein, 410 aa, Streptococcus agalactiae 2603V/R; identical to SEQ ID NO: 19737

SEQ ID NO: 54324 - DNA, 1239 bp, Oceanobacillus iheyensis HTE831; identical to SEQ ID NO: 19738
  CDS (1)..(1239): transl_table=11

SEQ ID NO: 54325 - protein, 412 aa, Oceanobacillus iheyensis HTE831; identical to SEQ ID NO: 19739

SEQ ID NO: 54326 - DNA, 1263 bp, Brucella suis 1330; identical to SEQ ID NO: 19740
  CDS (1)..(1263): transl_table=11

SEQ ID NO: 54327 - protein, 420 aa, Brucella suis 1330; identical to SEQ ID NO: 19741

SEQ ID NO: 54328 - DNA, 1425 bp, Plasmodium falciparum 3D7; identical to SEQ ID NO: 19742
  CDS (1)..(1425)

SEQ ID NO: 54329 - protein, 474 aa, Plasmodium falciparum 3D7; identical to SEQ ID NO: 19743

SEQ ID NO: 54330 - DNA, 1239 bp, Shewanella oneidensis MR-1; identical to SEQ ID NO: 19744
  CDS (1)..(1239): transl_table=11

SEQ ID NO: 54331 - protein, 412 aa, Shewanella oneidensis MR-1; identical to SEQ ID NO: 19745

SEQ ID NO: 54332 - DNA, 1233 bp, Streptococcus mutans UA159; identical to SEQ ID NO: 19746
  CDS (1)..(1233): transl_table=11

SEQ ID NO: 54333 - protein, 410 aa, Streptococcus mutans UA159; identical to SEQ ID NO: 19747

SEQ ID NO: 54334 - DNA, 1245 bp, Pseudomonas putida KT2440; identical to SEQ ID NO: 19748
  CDS (1)..(1245): transl_table=11

SEQ ID NO: 54335 - protein, 414 aa, Pseudomonas putida KT2440; identical to SEQ ID NO: 19749

SEQ ID NO: 54336 - DNA, 1314 bp, Pseudomonas putida KT2440; identical to SEQ ID NO: 19750
  CDS (1)..(1314): transl_table=11

SEQ ID NO: 54337 - protein, 437 aa, Pseudomonas putida KT2440; identical to SEQ ID NO: 19751

SEQ ID NO: 54338 - DNA, 1263 bp, Vibrio vulnificus CMCP6; identical to SEQ ID NO: 19752
  CDS (1)..(1263): transl_table=11

SEQ ID NO: 54339 - protein, 420 aa, Vibrio vulnificus CMCP6; identical to SEQ ID NO: 19753

SEQ ID NO: 54340 - DNA, 1263 bp, Bradyrhizobium japonicum USDA 110; identical to SEQ ID NO: 19754
  CDS (1)..(1263): transl_table=11

SEQ ID NO: 54341 - protein, 420 aa, Bradyrhizobium japonicum USDA 110; identical to SEQ ID NO: 19755

SEQ ID NO: 54342 - DNA, 1266 bp, Bradyrhizobium japonicum USDA 110; identical to SEQ ID NO: 19756
  CDS (1)..(1266): transl_table=11

SEQ ID NO: 54343 - protein, 421 aa, Bradyrhizobium japonicum USDA 110; identical to SEQ ID NO: 19757

SEQ ID NO: 54344 - DNA, 1236 bp, Xylella fastidiosa Temecula1; identical to SEQ ID NO: 19758
  CDS (1)..(1236): transl_table=11

SEQ ID NO: 54345 - protein, 411 aa, Xylella fastidiosa Temecula1; identical to SEQ ID NO: 19759

SEQ ID NO: 54346 - DNA, 1245 bp, Clostridium tetani E88; identical to SEQ ID NO: 19760
  CDS (1)..(1245): transl_table=11

SEQ ID NO: 54347 - protein, 414 aa, Clostridium tetani E88; identical to SEQ ID NO: 19761

SEQ ID NO: 54348 - DNA, 1233 bp, Lactobacillus plantarum WCFS1; identical to SEQ ID NO: 19762
  CDS (1)..(1233): transl_table=11

SEQ ID NO: 54349 - protein, 410 aa, Lactobacillus plantarum WCFS1; identical to SEQ ID NO: 19763

SEQ ID NO: 54350 - DNA, 1245 bp, Pseudomonas syringae pv. tomato str. DC3000; identical to SEQ ID NO: 19764
  CDS (1)..(1245): transl_table=11

SEQ ID NO: 54351 - protein, 414 aa, Pseudomonas syringae pv. tomato str. DC3000; identical to SEQ ID NO: 19765

SEQ ID NO: 54352 - DNA, 1251 bp, Vibrio parahaemolyticus RIMD 2210633; identical to SEQ ID NO: 19766
  CDS (1)..(1251): transl_table=11

SEQ ID NO: 54353 - protein, 416 aa, Vibrio parahaemolyticus RIMD 2210633; identical to SEQ ID NO: 19767

SEQ ID NO: 54354 - DNA, 1212 bp, Vibrio parahaemolyticus RIMD 2210633; identical to SEQ ID NO: 19768
  CDS (1)..(1212): transl_table=11

SEQ ID NO: 54355 - protein, 403 aa, Vibrio parahaemolyticus RIMD 2210633; identical to SEQ ID NO: 19769

SEQ ID NO: 54356 - DNA, 1233 bp, Streptococcus pyogenes SSI-1; identical to SEQ ID NO: 19770
  CDS (1)..(1233): transl_table=11

SEQ ID NO: 54357 - protein, 410 aa, Streptococcus pyogenes SSI-1; identical to SEQ ID NO: 19771

SEQ ID NO: 54358 - DNA, 1242 bp, Salmonella enterica subsp. enterica serovar Typhi Ty2; identical to SEQ ID NO: 19772
  CDS (1)..(1242): transl_table=11

SEQ ID NO: 54359 - protein, 413 aa, Salmonella enterica subsp. enterica serovar Typhi Ty2; identical to SEQ ID NO: 19773

SEQ ID NO: 54360 - DNA, 1263 bp, Bacteroides thetaiotaomicron VPI-5482; identical to SEQ ID NO: 19774
  CDS (1)..(1263): transl_table=11

SEQ ID NO: 54361 - protein, 420 aa, Bacteroides thetaiotaomicron VPI-5482; identical to SEQ ID NO: 19775

SEQ ID NO: 54362 - DNA, 1239 bp, Enterococcus faecalis V583; identical to SEQ ID NO: 19776
  CDS (1)..(1239): transl_table=11

SEQ ID NO: 54363 - protein, 412 aa, Enterococcus faecalis V583; identical to SEQ ID NO: 19777

SEQ ID NO: 54364 - DNA, 1236 bp, Enterococcus faecalis V583; identical to SEQ ID NO: 19778
  CDS (1)..(1236): transl_table=11

SEQ ID NO: 54365 - protein, 411 aa, Enterococcus faecalis V583; identical to SEQ ID NO: 19779

SEQ ID NO: 54366 - DNA, 1245 bp, Coxiella burnetii RSA 493; identical to SEQ ID NO: 19780
  CDS (1)..(1245): transl_table=11

SEQ ID NO: 54367 - protein, 414 aa, Coxiella burnetii RSA 493; identical to SEQ ID NO: 19781

SEQ ID NO: 54368 - DNA, 1221 bp, Streptomyces avermitilis MA-4680; identical to SEQ ID NO: 19782
  CDS (1)..(1221): transl_table=11

SEQ ID NO: 54369 - protein, 406 aa, Streptomyces avermitilis MA-4680; identical to SEQ ID NO: 19783

SEQ ID NO: 54370 - DNA, 1251 bp, Streptomyces avermitilis MA-4680; identical to SEQ ID NO: 19784
  CDS (1)..(1251): transl_table=11

SEQ ID NO: 54371 - protein, 416 aa, Streptomyces avermitilis MA-4680; identical to SEQ ID NO: 19785

SEQ ID NO: 54372 - DNA, 1272 bp, Streptomyces avermitilis MA-4680; identical to SEQ ID NO: 19786
  CDS (1)..(1272): transl_table=11

SEQ ID NO: 54373 - protein, 423 aa, Streptomyces avermitilis MA-4680; identical to SEQ ID NO: 19787

SEQ ID NO: 54374 - DNA, 1251 bp, Chlamydophila caviae GPIC; identical to SEQ ID NO: 19788
  CDS (1)..(1251): transl_table=11

SEQ ID NO: 54375 - protein, 416 aa, Chlamydophila caviae GPIC; identical to SEQ ID NO: 19789

SEQ ID NO: 54376 - DNA, 1239 bp, Bacillus cereus ATCC 14579; identical to SEQ ID NO: 19790
  CDS (1)..(1239): transl_table=11

SEQ ID NO: 54377 - protein, 412 aa, Bacillus cereus ATCC 14579; identical to SEQ ID NO: 19791

SEQ ID NO: 54378 - DNA, 1242 bp, Nitrosomonas europaea ATCC 19718; identical to SEQ ID NO: 19792
  CDS (1)..(1242): transl_table=11

SEQ ID NO: 54379 - protein, 413 aa, Nitrosomonas europaea ATCC 19718; identical to SEQ ID NO: 19793

SEQ ID NO: 54380 - DNA, 1626 bp, Arabidopsis thaliana; identical to SEQ ID NO: 19794
  CDS (1)..(1626)

SEQ ID NO: 54381 - protein, 541 aa, Arabidopsis thaliana; identical to SEQ ID NO: 19795

SEQ ID NO: 54382 - DNA, 1266 bp, Streptomyces rochei; identical to SEQ ID NO: 19796
  CDS (1)..(1266): transl_table=11

SEQ ID NO: 54383 - protein, 421 aa, Streptomyces rochei; identical to SEQ ID NO: 19797

SEQ ID NO: 54384 - DNA, 1236 bp, Helicobacter hepaticus ATCC 51449; identical to SEQ ID NO: 19798
  CDS (1)..(1236): transl_table=11

SEQ ID NO: 54385 - protein, 411 aa, Helicobacter hepaticus ATCC 51449; identical to SEQ ID NO: 19799

SEQ ID NO: 54386 - DNA, 1290 bp, Rhodopirellula baltica SH 1; identical to SEQ ID NO: 19800
  CDS (1)..(1290): transl_table=11

SEQ ID NO: 54387 - protein, 429 aa, Rhodopirellula baltica SH 1; identical to SEQ ID NO: 19801

SEQ ID NO: 54388 - DNA, 1290 bp, Rhodopirellula baltica SH 1; identical to SEQ ID NO: 19802
  CDS (1)..(1290): transl_table=11

SEQ ID NO: 54389 - protein, 429 aa, Rhodopirellula baltica SH 1; identical to SEQ ID NO: 19803

SEQ ID NO: 54390 - DNA, 1248 bp, Prochlorococcus marinus subsp. marinus str. CCMP1375; identical to SEQ ID NO: 19804
  CDS (1)..(1248): transl_table=11

SEQ ID NO: 54391 - protein, 415 aa, Prochlorococcus marinus subsp. marinus str. CCMP1375; identical to SEQ ID NO: 19805

SEQ ID NO: 54392 - DNA, 1230 bp, Bordetella bronchiseptica RB50; identical to SEQ ID NO: 19806
  CDS (1)..(1230): transl_table=11

SEQ ID NO: 54393 - protein, 409 aa, Bordetella bronchiseptica RB50; identical to SEQ ID NO: 19807

SEQ ID NO: 54394 - DNA, 1245 bp, Prochlorococcus marinus subsp. pastoris str. CCMP1986; identical to SEQ ID NO: 19808
  CDS (1)..(1245): transl_table=11

SEQ ID NO: 54395 - protein, 414 aa, Prochlorococcus marinus subsp. pastoris str. CCMP1986; identical to SEQ ID NO: 19809

SEQ ID NO: 54396 - DNA, 1248 bp, Prochlorococcus marinus str. MIT 9313; identical to SEQ ID NO: 19810
  CDS (1)..(1248): transl_table=11

SEQ ID NO: 54397 - protein, 415 aa, Prochlorococcus marinus str. MIT 9313; identical to SEQ ID NO: 19811

SEQ ID NO: 54398 - DNA, 1248 bp, Synechococcus sp. WH 8102; identical to SEQ ID NO: 19812
  CDS (1)..(1248): transl_table=11

SEQ ID NO: 54399 - protein, 415 aa, Synechococcus sp. WH 8102; identical to SEQ ID NO: 19813

SEQ ID NO: 54400 - DNA, 1242 bp, Chromobacterium violaceum ATCC 12472; identical to SEQ ID NO: 19814
  CDS (1)..(1242): transl_table=11

SEQ ID NO: 54401 - protein, 413 aa, Chromobacterium violaceum ATCC 12472; identical to SEQ ID NO: 19815

SEQ ID NO: 54402 - DNA, 1257 bp, Porphyromonas gingivalis W83; identical to SEQ ID NO: 19816
  CDS (1)..(1257): transl_table=11

SEQ ID NO: 54403 - protein, 418 aa, Porphyromonas gingivalis W83; identical to SEQ ID NO: 19817

SEQ ID NO: 54404 - DNA, 1242 bp, Wolinella succinogenes DSM 1740; identical to SEQ ID NO: 19818
  CDS (1)..(1242): transl_table=11

SEQ ID NO: 54405 - protein, 413 aa, Wolinella succinogenes DSM 1740; identical to SEQ ID NO: 19819

SEQ ID NO: 54406 - DNA, 1272 bp, Gloeobacter violaceus PCC 7421; identical to SEQ ID NO: 19820
  CDS (1)..(1272): transl_table=11

SEQ ID NO: 54407 - protein, 423 aa, Gloeobacter violaceus PCC 7421; identical to SEQ ID NO: 19821

SEQ ID NO: 54408 - DNA, 1248 bp, Gloeobacter violaceus PCC 7421; identical to SEQ ID NO: 19822
  CDS (1)..(1248): transl_table=11

SEQ ID NO: 54409 - protein, 415 aa, Gloeobacter violaceus PCC 7421; identical to SEQ ID NO: 19823

SEQ ID NO: 54410 - DNA, 1251 bp, Photorhabdus luminescens subsp. laumondii TTO1; identical to SEQ ID NO: 19824
  CDS (1)..(1251): transl_table=11

SEQ ID NO: 54411 - protein, 416 aa, Photorhabdus luminescens subsp. laumondii TTO1; identical to SEQ ID NO: 19825

SEQ ID NO: 54412 - DNA, 1242 bp, Vibrio vulnificus YJ016; identical to SEQ ID NO: 19826
  CDS (1)..(1242): transl_table=11

SEQ ID NO: 54413 - protein, 413 aa, Vibrio vulnificus YJ016; identical to SEQ ID NO: 19827

SEQ ID NO: 54414 - DNA, 1266 bp, Rhodopseudomonas palustris CGA009; identical to SEQ ID NO: 19828
  CDS (1)..(1266): transl_table=11

SEQ ID NO: 54415 - protein, 421 aa, Rhodopseudomonas palustris CGA009; identical to SEQ ID NO: 19829

SEQ ID NO: 54416 - DNA, 1233 bp, Geobacter sulfurreducens PCA; identical to SEQ ID NO: 19830
  CDS (1)..(1233): transl_table=11

SEQ ID NO: 54417 - protein, 410 aa, Geobacter sulfurreducens PCA; identical to SEQ ID NO: 19831

SEQ ID NO: 54418 - DNA, 1251 bp, Mycobacterium avium subsp. paratuberculosis K-10; identical to SEQ ID NO: 19832
  CDS (1)..(1251): transl_table=11

SEQ ID NO: 54419 - protein, 416 aa, Mycobacterium avium subsp. paratuberculosis K-10; identical to SEQ ID NO: 19833

SEQ ID NO: 54420 - DNA, 1272 bp, Wolbachia endosymbiont of Drosophila melanogaster; identical to SEQ ID NO: 19834
  CDS (1)..(1272): transl_table=11

SEQ ID NO: 54421 - protein, 423 aa, Wolbachia endosymbiont of Drosophila melanogaster; identical to SEQ ID NO: 19835

SEQ ID NO: 54422 - DNA, 1272 bp, Bdellovibrio bacteriovorus HD100; identical to SEQ ID NO: 19836
  CDS (1)..(1272): transl_table=11

SEQ ID NO: 54423 - protein, 423 aa, Bdellovibrio bacteriovorus HD100; identical to SEQ ID NO: 19837

SEQ ID NO: 54424 - DNA, 1236 bp, Treponema denticola ATCC 35405; identical to SEQ ID NO: 19838
  CDS (1)..(1236): transl_table=11

SEQ ID NO: 54425 - protein, 411 aa, Treponema denticola ATCC 35405; identical to SEQ ID NO: 19839

SEQ ID NO: 54426 - DNA, 1239 bp, Bacillus cereus ATCC 10987; identical to SEQ ID NO: 19840
  CDS (1)..(1239): transl_table=11

SEQ ID NO: 54427 - protein, 412 aa, Bacillus cereus ATCC 10987; identical to SEQ ID NO: 19841

SEQ ID NO: 54428 - DNA, 1302 bp, Eremothecium gossypii; identical to SEQ ID NO: 19842
  CDS (1)..(1302)

SEQ ID NO: 54429 - protein, 433 aa, Eremothecium gossypii; identical to SEQ ID NO: 19843

SEQ ID NO: 54430 - DNA, 1335 bp, Anopheles gambiae str. PEST; identical to SEQ ID NO: 19844
  CDS (1)..(1335)

SEQ ID NO: 54431 - protein, 444 aa, Anopheles gambiae str. PEST; identical to SEQ ID NO: 19845

SEQ ID NO: 54432 - DNA, 1524 bp, Oryza sativa (japonica cultivar-group); identical to SEQ ID NO: 19846
  CDS (1)..(1524)

SEQ ID NO: 54433 - protein, 507 aa, Oryza sativa (japonica cultivar-group); identical to SEQ ID NO: 19847

SEQ ID NO: 54434 - DNA, 1245 bp, Anopheles gambiae str. PEST; identical to SEQ ID NO: 19848
  CDS (1)..(1245)

SEQ ID NO: 54435 - protein, 414 aa, Anopheles gambiae str. PEST; identical to SEQ ID NO: 19849

SEQ ID NO: 54436 - DNA, 1227 bp, Thermus thermophilus HB27; identical to SEQ ID NO: 19850
  CDS (1)..(1227): transl_table=11

SEQ ID NO: 54437 - protein, 408 aa, Thermus thermophilus HB27; identical to SEQ ID NO: 19851

SEQ ID NO: 54438 - DNA, 1257 bp, Parachlamydia sp. UWE25; identical to SEQ ID NO: 19852
  CDS (1)..(1257): transl_table=11

SEQ ID NO: 54439 - protein, 418 aa, Parachlamydia sp. UWE25; identical to SEQ ID NO: 19853

SEQ ID NO: 54440 - DNA, 1248 bp, Desulfovibrio vulgaris subsp. vulgaris str. Hildenborough; identical to SEQ ID NO: 19854
  CDS (1)..(1248): transl_table=11

SEQ ID NO: 54441 - protein, 415 aa, Desulfovibrio vulgaris subsp. vulgaris str. Hildenborough; identical to SEQ ID NO: 19855

SEQ ID NO: 54442 - DNA, 1242 bp, Listeria monocytogenes str. 4b F2365; identical to SEQ ID NO: 19856
  CDS (1)..(1242): transl_table=11

SEQ ID NO: 54443 - protein, 413 aa, Listeria monocytogenes str. 4b F2365; identical to SEQ ID NO: 19857

SEQ ID NO: 54444 - DNA, 1239 bp, Bacillus anthracis str. Sterne; identical to SEQ ID NO: 19858
  CDS (1)..(1239): transl_table=11

SEQ ID NO: 54445 - protein, 412 aa, Bacillus anthracis str. Sterne; identical to SEQ ID NO: 19859

SEQ ID NO: 54446 - DNA, 1263 bp, Bartonella quintana str. Toulouse; identical to SEQ ID NO: 19860
  CDS (1)..(1263): transl_table=11

SEQ ID NO: 54447 - protein, 420 aa, Bartonella quintana str. Toulouse; identical to SEQ ID NO: 19861

SEQ ID NO: 54448 - DNA, 1263 bp, Bartonella henselae str. Houston-1; identical to SEQ ID NO: 19862
  CDS (1)..(1263): transl_table=11

SEQ ID NO: 54449 - protein, 420 aa, Bartonella henselae str. Houston-1; identical to SEQ ID NO: 19863

SEQ ID NO: 54450 - DNA, 1245 bp, Staphylococcus aureus subsp. aureus MRSA252; identical to SEQ ID NO: 19864
  CDS (1)..(1245): transl_table=11

SEQ ID NO: 54451 - protein, 414 aa, Staphylococcus aureus subsp. aureus MRSA252; identical to SEQ ID NO: 19865

SEQ ID NO: 54452 - DNA, 1245 bp, Staphylococcus aureus subsp. aureus MSSA476; identical to SEQ ID NO: 19866
  CDS (1)..(1245): transl_table=11

SEQ ID NO: 54453 - protein, 414 aa, Staphylococcus aureus subsp. aureus MSSA476; identical to SEQ ID NO: 19867

SEQ ID NO: 54454 - DNA, 1242 bp, Erwinia carotovora subsp. atroseptica SCRI1043; identical to SEQ ID NO: 19868
  CDS (1)..(1242): transl_table=11

SEQ ID NO: 54455 - protein, 413 aa, Erwinia carotovora subsp. atroseptica SCRI1043; identical to SEQ ID NO: 19869

SEQ ID NO: 54456 - DNA, 1290 bp, Erwinia carotovora subsp. atroseptica SCRI1043; identical to SEQ ID NO: 19870
  CDS (1)..(1290): transl_table=11

SEQ ID NO: 54457 - protein, 429 aa, Erwinia carotovora subsp. atroseptica SCRI1043; identical to SEQ ID NO: 19871

SEQ ID NO: 54458 - DNA, 1272 bp, Propionibacterium acnes KPA171202; identical to SEQ ID NO: 19872
  CDS (1)..(1272): transl_table=11

SEQ ID NO: 54459 - protein, 423 aa, Propionibacterium acnes KPA171202; identical to SEQ ID NO: 19873

SEQ ID NO: 54460 - DNA, 1233 bp, Streptococcus pyogenes MGAS10394; identical to SEQ ID NO: 19874
  CDS (1)..(1233): transl_table=11

SEQ ID NO: 54461 - protein, 410 aa, Streptococcus pyogenes MGAS10394; identical to SEQ ID NO: 19875

SEQ ID NO: 54462 - DNA, 1263 bp, Leifsonia xyli subsp. xyli str. CTCB07; identical to SEQ ID NO: 19876
  CDS (1)..(1263): transl_table=11

SEQ ID NO: 54463 - protein, 420 aa, Leifsonia xyli subsp. xyli str. CTCB07; identical to SEQ ID NO: 19877

SEQ ID NO: 54464 - DNA, 1245 bp, Desulfotalea psychrophila LSv54; identical to SEQ ID NO: 19878
  CDS (1)..(1245): transl_table=11

SEQ ID NO: 54465 - protein, 414 aa, Desulfotalea psychrophila LSv54; identical to SEQ ID NO: 19879

SEQ ID NO: 54466 - DNA, 1281 bp, Rickettsia typhi str. Wilmington; identical to SEQ ID NO: 19880
  CDS (1)..(1281): transl_table=11

SEQ ID NO: 54467 - protein, 426 aa, Rickettsia typhi str. Wilmington; identical to SEQ ID NO: 19881

SEQ ID NO: 54468 - DNA, 1275 bp, Yersinia pseudotuberculosis IP 32953; identical to SEQ ID NO: 19882
  CDS (1)..(1275): transl_table=11

SEQ ID NO: 54469 - protein, 424 aa, Yersinia pseudotuberculosis IP 32953; identical to SEQ ID NO: 19883

SEQ ID NO: 54470 - DNA, 1242 bp, Yersinia pseudotuberculosis IP 32953; identical to SEQ ID NO: 19884
  CDS (1)..(1242): transl_table=11

SEQ ID NO: 54471 - protein, 413 aa, Yersinia pseudotuberculosis IP 32953; identical to SEQ ID NO: 19885

SEQ ID NO: 54472 - DNA, 1242 bp, Symbiobacterium thermophilum IAM 14863; identical to SEQ ID NO: 19886
  CDS (1)..(1242): transl_table=11

SEQ ID NO: 54473 - protein, 413 aa, Symbiobacterium thermophilum IAM 14863; identical to SEQ ID NO: 19887

SEQ ID NO: 54474 - DNA, 1239 bp, Bacillus licheniformis ATCC 14580; identical to SEQ ID NO: 19888
  CDS (1)..(1239): transl_table=11

SEQ ID NO: 54475 - protein, 412 aa, Bacillus licheniformis ATCC 14580; identical to SEQ ID NO: 19889

SEQ ID NO: 54476 - DNA, 1221 bp, Mannheimia succiniciproducens MBEL55E; identical to SEQ ID NO: 19890
  CDS (1)..(1221): transl_table=11

SEQ ID NO: 54477 - protein, 406 aa, Mannheimia succiniciproducens MBEL55E; identical to SEQ ID NO: 19891

SEQ ID NO: 54478 - DNA, 1230 bp, Legionella pneumophila subsp. pneumophila str. Philadelphia 1; identical to SEQ ID NO: 19892
  CDS (1)..(1230): transl_table=11

SEQ ID NO: 54479 - protein, 409 aa, Legionella pneumophila subsp. pneumophila str. Philadelphia 1; identical to SEQ ID NO: 19893

SEQ ID NO: 54480 - DNA, 1293 bp, Legionella pneumophila subsp. pneumophila str. Philadelphia 1; identical to SEQ ID NO: 19894
  CDS (1)..(1293): transl_table=11

SEQ ID NO: 54481 - protein, 430 aa, Legionella pneumophila subsp. pneumophila str. Philadelphia 1; identical to SEQ ID NO: 19895

SEQ ID NO: 54482 - DNA, 1239 bp, Legionella pneumophila subsp. pneumophila str. Philadelphia 1; identical to SEQ ID NO: 19896
  CDS (1)..(1239): transl_table=11

SEQ ID NO: 54483 - protein, 412 aa, Legionella pneumophila subsp. pneumophila str. Philadelphia 1; identical to SEQ ID NO: 19897

SEQ ID NO: 54484 - DNA, 1263 bp, Bacteroides fragilis YCH46; identical to SEQ ID NO: 19898
  CDS (1)..(1263): transl_table=11

SEQ ID NO: 54485 - protein, 420 aa, Bacteroides fragilis YCH46; identical to SEQ ID NO: 19899

SEQ ID NO: 54486 - DNA, 1239 bp, Burkholderia mallei ATCC 23344; identical to SEQ ID NO: 19900
  CDS (1)..(1239): transl_table=11

SEQ ID NO: 54487 - protein, 412 aa, Burkholderia mallei ATCC 23344; identical to SEQ ID NO: 19901

SEQ ID NO: 54488 - DNA, 1206 bp, Methylococcus capsulatus str. Bath; identical to SEQ ID NO: 19902
  CDS (1)..(1206): transl_table=11

SEQ ID NO: 54489 - protein, 401 aa, Methylococcus capsulatus str. Bath; identical to SEQ ID NO: 19903

SEQ ID NO: 54490 - DNA, 1251 bp, Nocardia farcinica IFM 10152; identical to SEQ ID NO: 19904
  CDS (1)..(1251): transl_table=11

SEQ ID NO: 54491 - protein, 416 aa, Nocardia farcinica IFM 10152; identical to SEQ ID NO: 19905

SEQ ID NO: 54492 - DNA, 1230 bp, Legionella pneumophila str. Paris; identical to SEQ ID NO: 19906
  CDS (1)..(1230): transl_table=11

SEQ ID NO: 54493 - protein, 409 aa, Legionella pneumophila str. Paris; identical to SEQ ID NO: 19907

SEQ ID NO: 54494 - DNA, 1293 bp, Legionella pneumophila str. Paris; identical to SEQ ID NO: 19908
  CDS (1)..(1293): transl_table=11

SEQ ID NO: 54495 - protein, 430 aa, Legionella pneumophila str. Paris; identical to SEQ ID NO: 19909

SEQ ID NO: 54496 - DNA, 1239 bp, Legionella pneumophila str. Paris; identical to SEQ ID NO: 19910
  CDS (1)..(1239): transl_table=11

SEQ ID NO: 54497 - protein, 412 aa, Legionella pneumophila str. Paris; identical to SEQ ID NO: 19911

SEQ ID NO: 54498 - DNA, 1239 bp, Legionella pneumophila str. Lens; identical to SEQ ID NO: 19912
  CDS (1)..(1239): transl_table=11

SEQ ID NO: 54499 - protein, 412 aa, Legionella pneumophila str. Lens; identical to SEQ ID NO: 19913

SEQ ID NO: 54500 - DNA, 1242 bp, Photobacterium profundum SS9; identical to SEQ ID NO: 19914
  CDS (1)..(1242): transl_table=11

SEQ ID NO: 54501 - protein, 413 aa, Photobacterium profundum SS9; identical to SEQ ID NO: 19915

SEQ ID NO: 54502 - DNA, 1233 bp, Streptococcus thermophilus LMG 18311; identical to SEQ ID NO: 19916
  CDS (1)..(1233): transl_table=11

SEQ ID NO: 54503 - protein, 410 aa, Streptococcus thermophilus LMG 18311; identical to SEQ ID NO: 19917

SEQ ID NO: 54504 - DNA, 1227 bp, Thermus thermophilus HB8; identical to SEQ ID NO: 19918
  CDS (1)..(1227): transl_table=11

SEQ ID NO: 54505 - protein, 408 aa, Thermus thermophilus HB8; identical to SEQ ID NO: 19919

SEQ ID NO: 54506 - DNA, 1239 bp, Geobacillus kaustophilus HTA426; identical to SEQ ID NO: 19920
  CDS (1)..(1239): transl_table=11

SEQ ID NO: 54507 - protein, 412 aa, Geobacillus kaustophilus HTA426; identical to SEQ ID NO: 19921

SEQ ID NO: 54508 - DNA, 1242 bp, Salmonella enterica subsp. enterica serovar Paratyphi A str. ATCC; identical to SEQ ID NO: 19922
  CDS (1)..(1242): transl_table=11

SEQ ID NO: 54509 - protein, 413 aa, Salmonella enterica subsp. enterica serovar Paratyphi A str. ATCC; identical to SEQ ID NO: 19923

SEQ ID NO: 54510 - DNA, 1284 bp, Anaplasma marginale str. St. Maries; identical to SEQ ID NO: 19924
  CDS (1)..(1284): transl_table=11

SEQ ID NO: 54511 - protein, 427 aa, Anaplasma marginale str. St. Maries; identical to SEQ ID NO: 19925

SEQ ID NO: 54512 - DNA, 1239 bp, Azoarcus sp. EbN1; identical to SEQ ID NO: 19926
  CDS (1)..(1239): transl_table=11

SEQ ID NO: 54513 - protein, 412 aa, Azoarcus sp. EbN1; identical to SEQ ID NO: 19927

SEQ ID NO: 54514 - DNA, 1299 bp, Zymomonas mobilis subsp. mobilis ZM4; identical to SEQ ID NO: 19928
  CDS (1)..(1299): transl_table=11

SEQ ID NO: 54515 - protein, 432 aa, Zymomonas mobilis subsp. mobilis ZM4; identical to SEQ ID NO: 19929

SEQ ID NO: 54516 - DNA, 1209 bp, Silicibacter pomeroyi DSS-3; identical to SEQ ID NO: 19930
  CDS (1)..(1209): transl_table=11

SEQ ID NO: 54517 - protein, 402 aa, Silicibacter pomeroyi DSS-3; identical to SEQ ID NO: 19931

SEQ ID NO: 54518 - DNA, 1266 bp, Silicibacter pomeroyi DSS-3; identical to SEQ ID NO: 19932
  CDS (1)..(1266): transl_table=11

SEQ ID NO: 54519 - protein, 421 aa, Silicibacter pomeroyi DSS-3; identical to SEQ ID NO: 19933

SEQ ID NO: 54520 - DNA, 1260 bp, Francisella tularensis subsp. tularensis SCHU S4; identical to SEQ ID NO: 19934
  CDS (1)..(1260): transl_table=11

SEQ ID NO: 54521 - protein, 419 aa, Francisella tularensis subsp. tularensis SCHU S4; identical to SEQ ID NO: 19935

SEQ ID NO: 54522 - DNA, 1254 bp, Synechococcus elongatus PCC 6301; identical to SEQ ID NO: 19936
  CDS (1)..(1254): transl_table=11

SEQ ID NO: 54523 - protein, 417 aa, Synechococcus elongatus PCC 6301; identical to SEQ ID NO: 19937

SEQ ID NO: 54524 - DNA, 1242 bp, Bacillus clausii KSM-K16; identical to SEQ ID NO: 19938
  CDS (1)..(1242): transl_table=11

SEQ ID NO: 54525 - protein, 413 aa, Bacillus clausii KSM-K16; identical to SEQ ID NO: 19939

SEQ ID NO: 54526 - DNA, 1215 bp, Campylobacter jejuni RM1221; identical to SEQ ID NO: 19940
  CDS (1)..(1215): transl_table=11

SEQ ID NO: 54527 - protein, 404 aa, Campylobacter jejuni RM1221; identical to SEQ ID NO: 19941

SEQ ID NO: 54528 - DNA, 1272 bp, Ehrlichia ruminantium str. Welgevonden; identical to SEQ ID NO: 19942
  CDS (1)..(1272): transl_table=11

SEQ ID NO: 54529 - protein, 423 aa, Ehrlichia ruminantium str. Welgevonden; identical to SEQ ID NO: 19943

SEQ ID NO: 54530 - DNA, 1269 bp, Dehalococcoides ethenogenes 195; identical to SEQ ID NO: 19944
  CDS (1)..(1269): transl_table=11

SEQ ID NO: 54531 - protein, 422 aa, Dehalococcoides ethenogenes 195; identical to SEQ ID NO: 19945

SEQ ID NO: 54532 - DNA, 1245 bp, Staphylococcus epidermidis RP62A; identical to SEQ ID NO: 19946
  CDS (1)..(1245): transl_table=11

SEQ ID NO: 54533 - protein, 414 aa, Staphylococcus epidermidis RP62A; identical to SEQ ID NO: 19947

SEQ ID NO: 54534 - DNA, 1287 bp, Gluconobacter oxydans 621H; identical to SEQ ID NO: 19948
  CDS (1)..(1287): transl_table=11

SEQ ID NO: 54535 - protein, 428 aa, Gluconobacter oxydans 621H; identical to SEQ ID NO: 19949

SEQ ID NO: 54536 - DNA, 1272 bp, Ehrlichia ruminantium str. Gardel; identical to SEQ ID NO: 19950
  CDS (1)..(1272): transl_table=11

SEQ ID NO: 54537 - protein, 423 aa, Ehrlichia ruminantium str. Gardel; identical to SEQ ID NO: 19951

SEQ ID NO: 54538 - DNA, 1269 bp, Wolbachia endosymbiont strain TRS of Brugia malayi; identical to SEQ ID NO: 19952
  CDS (1)..(1269): transl_table=11

SEQ ID NO: 54539 - protein, 422 aa, Wolbachia endosymbiont strain TRS of Brugia malayi; identical to SEQ ID NO: 19953

SEQ ID NO: 54540 - DNA, 1299 bp, Xanthomonas oryzae pv. oryzae KACC10331; identical to SEQ ID NO: 19954
  CDS (1)..(1299): transl_table=11

SEQ ID NO: 54541 - protein, 432 aa, Xanthomonas oryzae pv. oryzae KACC10331; identical to SEQ ID NO: 19955

SEQ ID NO: 54542 - DNA, 1245 bp, Vibrio fischeri ES114; identical to SEQ ID NO: 19956
  CDS (1)..(1245): transl_table=11

SEQ ID NO: 54543 - protein, 414 aa, Vibrio fischeri ES114; identical to SEQ ID NO: 19957

SEQ ID NO: 54544 - DNA, 1248 bp, Neisseria gonorrhoeae FA 1090; identical to SEQ ID NO: 19958
  CDS (1)..(1248): transl_table=11

SEQ ID NO: 54545 - protein, 415 aa, Neisseria gonorrhoeae FA 1090; identical to SEQ ID NO: 19959

SEQ ID NO: 54546 - DNA, 1263 bp, Bacteroides fragilis NCTC 9343; identical to SEQ ID NO: 19960
  CDS (1)..(1263): transl_table=11

SEQ ID NO: 54547 - protein, 420 aa, Bacteroides fragilis NCTC 9343; identical to SEQ ID NO: 19961

SEQ ID NO: 54548 - DNA, 1251 bp, Chlamydophila abortus S26/3; identical to SEQ ID NO: 19962
  CDS (1)..(1251): transl_table=11

SEQ ID NO: 54549 - protein, 416 aa, Chlamydophila abortus S26/3; identical to SEQ ID NO: 19963

SEQ ID NO: 54550 - DNA, 1263 bp, Brucella abortus biovar 1 str. 9-941; identical to SEQ ID NO: 19964
  CDS (1)..(1263): transl_table=11

SEQ ID NO: 54551 - protein, 420 aa, Brucella abortus biovar 1 str. 9-941; identical to SEQ ID NO: 19965

SEQ ID NO: 54552 - DNA, 1236 bp, Xanthomonas campestris pv. campestris str. 8004; identical to SEQ ID NO: 19966
  CDS (1)..(1236): transl_table=11

SEQ ID NO: 54553 - protein, 411 aa, Xanthomonas campestris pv. campestris str. 8004; identical to SEQ ID NO: 19967

SEQ ID NO: 54554 - DNA, 1281 bp, Rickettsia felis URRWXCal2; identical to SEQ ID NO: 19968
  CDS (1)..(1281): transl_table=11

SEQ ID NO: 54555 - protein, 426 aa, Rickettsia felis URRWXCal2; identical to SEQ ID NO: 19969

SEQ ID NO: 54556 - DNA, 1245 bp, Staphylococcus haemolyticus JCSC1435; identical to SEQ ID NO: 19970
  CDS (1)..(1245): transl_table=11

SEQ ID NO: 54557 - protein, 414 aa, Staphylococcus haemolyticus JCSC1435; identical to SEQ ID NO: 19971

SEQ ID NO: 54558 - DNA, 1245 bp, Pseudomonas fluorescens Pf-5; identical to SEQ ID NO: 19972
  CDS (1)..(1245): transl_table=11

SEQ ID NO: 54559 - protein, 414 aa, Pseudomonas fluorescens Pf-5; identical to SEQ ID NO: 19973

SEQ ID NO: 54560 - DNA, 1269 bp, Pseudomonas fluorescens Pf-5; identical to SEQ ID NO: 19974
  CDS (1)..(1269): transl_table=11

SEQ ID NO: 54561 - protein, 422 aa, Pseudomonas fluorescens Pf-5; identical to SEQ ID NO: 19975

SEQ ID NO: 54562 - DNA, 1416 bp, Psychrobacter arcticum 273-4; identical to SEQ ID NO: 19976
  CDS (1)..(1416): transl_table=11

SEQ ID NO: 54563 - protein, 471 aa, Psychrobacter arcticum 273-4; identical to SEQ ID NO: 19977

SEQ ID NO: 54564 - DNA, 1239 bp, Colwellia psychrerythraea 34H; identical to SEQ ID NO: 19978
  CDS (1)..(1239): transl_table=11

SEQ ID NO: 54565 - protein, 412 aa, Colwellia psychrerythraea 34H; identical to SEQ ID NO: 19979

SEQ ID NO: 54566 - DNA, 1212 bp, Colwellia psychrerythraea 34H; identical to SEQ ID NO: 19980
  CDS (1)..(1212): transl_table=11

SEQ ID NO: 54567 - protein, 403 aa, Colwellia psychrerythraea 34H; identical to SEQ ID NO: 19981

SEQ ID NO: 54568 - DNA, 1245 bp, Pseudomonas syringae pv. phaseolicola 1448A; identical to SEQ ID NO: 19982
  CDS (1)..(1245): transl_table=11

SEQ ID NO: 54569 - protein, 414 aa, Pseudomonas syringae pv. phaseolicola 1448A; identical to SEQ ID NO: 19983

SEQ ID NO: 54570 - DNA, 1233 bp, Streptococcus pyogenes MGAS5005; identical to SEQ ID NO: 19984
  CDS (1)..(1233): transl_table=11

SEQ ID NO: 54571 - protein, 410 aa, Streptococcus pyogenes MGAS5005; identical to SEQ ID NO: 19985

SEQ ID NO: 54572 - DNA, 1236 bp, Dechloromonas aromatica RCB; identical to SEQ ID NO: 19986
  CDS (1)..(1236): transl_table=11

SEQ ID NO: 54573 - protein, 411 aa, Dechloromonas aromatica RCB; identical to SEQ ID NO: 19987

SEQ ID NO: 54574 - DNA, 1263 bp, Thermobifida fusca YX; identical to SEQ ID NO: 19988
  CDS (1)..(1263): transl_table=11

SEQ ID NO: 54575 - protein, 420 aa, Thermobifida fusca YX; identical to SEQ ID NO: 19989

SEQ ID NO: 54576 - DNA, 1239 bp, Thermobifida fusca YX; identical to SEQ ID NO: 19990
  CDS (1)..(1239): transl_table=11

SEQ ID NO: 54577 - protein, 412 aa, Thermobifida fusca YX; identical to SEQ ID NO: 19991

SEQ ID NO: 54578 - DNA, 1248 bp, Prochlorococcus marinus str. NATL2A; identical to SEQ ID NO: 19992
  CDS (1)..(1248): transl_table=11

SEQ ID NO: 54579 - protein, 415 aa, Prochlorococcus marinus str. NATL2A; identical to SEQ ID NO: 19993

SEQ ID NO: 54580 - DNA, 1233 bp, Ralstonia eutropha JMP134; identical to SEQ ID NO: 19994
  CDS (1)..(1233): transl_table=11

SEQ ID NO: 54581 - protein, 410 aa, Ralstonia eutropha JMP134; identical to SEQ ID NO: 19995

SEQ ID NO: 54582 - DNA, 1245 bp, Staphylococcus saprophyticus subsp. saprophyticus ATCC 15305; identical to SEQ ID NO: 19996
  CDS (1)..(1245): transl_table=11

SEQ ID NO: 54583 - protein, 414 aa, Staphylococcus saprophyticus subsp. saprophyticus ATCC 15305; identical to SEQ ID NO: 19997

SEQ ID NO: 54584 - DNA, 1269 bp, Ehrlichia canis str. Jake; identical to SEQ ID NO: 19998
  CDS (1)..(1269): transl_table=11

SEQ ID NO: 54585 - protein, 422 aa, Ehrlichia canis str. Jake; identical to SEQ ID NO: 19999

SEQ ID NO: 54586 - DNA, 1269 bp, Dehalococcoides sp. CBDB1; identical to SEQ ID NO: 20000
  CDS (1)..(1269): transl_table=11

SEQ ID NO: 54587 - protein, 422 aa, Dehalococcoides sp. CBDB1; identical to SEQ ID NO: 20001

SEQ ID NO: 54588 - DNA, 1233 bp, Thiobacillus denitrificans ATCC 25259; identical to SEQ ID NO: 20002
  CDS (1)..(1233): transl_table=11

SEQ ID NO: 54589 - protein, 410 aa, Thiobacillus denitrificans ATCC 25259; identical to SEQ ID NO: 20003

SEQ ID NO: 54590 - DNA, 1215 bp, Pseudomonas syringae pv. syringae B728a; identical to SEQ ID NO: 20004
  CDS (1)..(1215)

SEQ ID NO: 54591 - protein, 404 aa, Pseudomonas syringae pv. syringae B728a; identical to SEQ ID NO: 20005

SEQ ID NO: 54592 - DNA, 1215 bp, Pseudomonas aeruginosa UCBPP-PA14; identical to SEQ ID NO: 20006
  CDS (1)..(1215)

SEQ ID NO: 54593 - protein, 404 aa, Pseudomonas aeruginosa UCBPP-PA14; identical to SEQ ID NO: 20007

SEQ ID NO: 54594 - DNA, 1215 bp, Pseudomonas fluorescens PfO-1; identical to SEQ ID NO: 20008
  CDS (1)..(1215)

SEQ ID NO: 54595 - protein, 404 aa, Pseudomonas fluorescens PfO-1; identical to SEQ ID NO: 20009

SEQ ID NO: 54596 - DNA, 1236 bp, Enterococcus faecium DO; identical to SEQ ID NO: 20010
  CDS (1)..(1236): transl_table=11

SEQ ID NO: 54597 - protein, 411 aa, Enterococcus faecium DO; identical to SEQ ID NO: 20011

SEQ ID NO: 54598 - DNA, 1308 bp, Neurospora crassa; identical to SEQ ID NO: 20012
  misc_feature (251)..(251): n is a, c, g, or t
  misc_feature (463)..(463): n is a, c, g, or t
  misc_feature (522)..(522): n is a, c, g, or t
  misc_feature (669)..(669): n is a, c, g, or t
  misc_feature (677)..(677): n is a, c, g, or t
  misc_feature (908)..(908): n is a, c, g, or t
  misc_feature (982)..(982): n is a, c, g, or t
  misc_feature (996)..(996): n is a, c, g, or t
  misc_feature (1033)..(1033): n is a, c, g, or t
  misc_feature (1036)..(1036): n is a, c, g, or t
  misc_feature (1047)..(1047): n is a, c, g, or t
  misc_feature (1067)..(1067): n is a, c, g, or t
  misc_feature (1150)..(1150): n is a, c, g, or t
  misc_feature (1263)..(1263): n is a, c, g, or t
  misc_feature (1266)..(1266): n is a, c, g, or t
  misc_feature (1302)..(1302): n is a, c, g, or t
  CDS (1)..(1308)

SEQ ID NO: 54599 - protein, 435 aa, Neurospora crassa; identical to SEQ ID NO: 20013
  misc_feature (84)..(84): Xaa can be any naturally occuring amino acid
  misc_feature (155)..(155): Xaa can be any naturally occuring amino acid
  misc_feature (174)..(174): Xaa can be any naturally occuring amino acid
  misc_feature (226)..(226): Xaa can be any naturally occuring amino acid
  misc_feature (303)..(303): Xaa can be any naturally occuring amino acid
  misc_feature (328)..(328): Xaa can be any naturally occuring amino acid
  misc_feature (332)..(332): Xaa can be any naturally occuring amino acid
  misc_feature (345)..(346): Xaa can be any naturally occuring amino acid
  misc_feature (349)..(349): Xaa can be any naturally occuring amino acid
  misc_feature (356)..(356): Xaa can be any naturally occuring amino acid
  misc_feature (384)..(384): Xaa can be any naturally occuring amino acid
  misc_feature (422)..(422): Xaa can be any naturally occuring amino acid
  misc_feature (434)..(434): Xaa can be any naturally occuring amino acid

SEQ ID NO: 54600 - DNA, 1425 bp, Perilla frutescens; identical to SEQ ID NO: 20014
  CDS (1)..(1425)

SEQ ID NO: 54601 - protein, 474 aa, Perilla frutescens; identical to SEQ ID NO: 20015

SEQ ID NO: 54602 - DNA, 1593 bp, Perilla frutescens; identical to SEQ ID NO: 20016
  CDS (1)..(1593)

SEQ ID NO: 54603 - protein, 530 aa, Perilla frutescens; identical to SEQ ID NO: 20017

SEQ ID NO: 54604 - DNA, 1278 bp, Streptomyces roseofulvus; identical to SEQ ID NO: 20018
  CDS (1)..(1278): transl_table=11

SEQ ID NO: 54605 - protein, 425 aa, Streptomyces roseofulvus; identical to SEQ ID NO: 20019

SEQ ID NO: 54606 - DNA, 1467 bp, Capsicum chinense; identical to SEQ ID NO: 20020
  CDS (1)..(1467)

SEQ ID NO: 54607 - protein, 488 aa, Capsicum chinense; identical to SEQ ID NO: 20021

SEQ ID NO: 54608 - DNA, 1554 bp, Cuphea wrightii; identical to SEQ ID NO: 20022
  CDS (1)..(1554)

SEQ ID NO: 54609 - protein, 517 aa, Cuphea wrightii; identical to SEQ ID NO: 20023

SEQ ID NO: 54610 - DNA, 1623 bp, Cuphea wrightii; identical to SEQ ID NO: 20024
  CDS (1)..(1623)

SEQ ID NO: 54611 - protein, 540 aa, Cuphea wrightii; identical to SEQ ID NO: 20025

SEQ ID NO: 54612 - DNA, 1488 bp, Hordeum vulgare; identical to SEQ ID NO: 20026
  CDS (1)..(1488)

SEQ ID NO: 54613 - protein, 495 aa, Hordeum vulgare; identical to SEQ ID NO: 20027

SEQ ID NO: 54614 - DNA, 1470 bp, Hordeum vulgare; identical to SEQ ID NO: 20028
  CDS (1)..(1470)

SEQ ID NO: 54615 - protein, 489 aa, Hordeum vulgare; identical to SEQ ID NO: 20029

SEQ ID NO: 54616 - DNA, 1608 bp, Ricinus communis; identical to SEQ ID NO: 20030
  CDS (1)..(1608)

SEQ ID NO: 54617 - protein, 535 aa, Ricinus communis; identical to SEQ ID NO: 20031

SEQ ID NO: 54618 - DNA, 1410 bp, Ricinus communis; identical to SEQ ID NO: 20032
  CDS (1)..(1410)

SEQ ID NO: 54619 - protein, 469 aa, Ricinus communis; identical to SEQ ID NO: 20033

SEQ ID NO: 54620 - DNA, 1269 bp, Pseudomonas syringae pv; identical to SEQ ID NO: 20034
  CDS (1)..(1269): transl_table=11

SEQ ID NO: 54621 - protein, 422 aa, Pseudomonas syringae pv; identical to SEQ ID NO: 20035

SEQ ID NO: 54622 - DNA, 1272 bp, Streptomyces glaucescens; identical to SEQ ID NO: 20036
  CDS (1)..(1272): transl_table=11

SEQ ID NO: 54623 - protein, 423 aa, Streptomyces glaucescens; identical to SEQ ID NO: 20037

SEQ ID NO: 54624 - DNA, 1269 bp, Streptomyces griseus; identical to SEQ ID NO: 20038
  CDS (1)..(1269): transl_table=11

SEQ ID NO: 54625 - protein, 422 aa, Streptomyces griseus; identical to SEQ ID NO: 20039

SEQ ID NO: 54626 - DNA, 1293 bp, Streptomyces nogalater; identical to SEQ ID NO: 20040
  CDS (1)..(1293): transl_table=11

SEQ ID NO: 54627 - protein, 430 aa, Streptomyces nogalater; identical to SEQ ID NO: 20041

SEQ ID NO: 54628 - DNA, 1260 bp, Streptomyces peucetius; identical to SEQ ID NO: 20042
  CDS (1)..(1260): transl_table=11

SEQ ID NO: 54629 - protein, 419 aa, Streptomyces peucetius; identical to SEQ ID NO: 20043

SEQ ID NO: 54630 - DNA, 1278 bp, Streptomyces roseofulvus; identical to SEQ ID NO: 20044
  CDS (1)..(1278): transl_table=11

SEQ ID NO: 54631 - protein, 425 aa, Streptomyces roseofulvus; identical to SEQ ID NO: 20045

SEQ ID NO: 54632 - DNA, 1467 bp, Glycine max; identical to SEQ ID NO: 20046
  CDS (1)..(1467)

SEQ ID NO: 54633 - protein, 488 aa, Glycine max; identical to SEQ ID NO: 20047

SEQ ID NO: 54634 - DNA, 1470 bp, Glycine max; identical to SEQ ID NO: 20048
  CDS (1)..(1470)

SEQ ID NO: 54635 - protein, 489 aa, Glycine max; identical to SEQ ID NO: 20049

SEQ ID NO: 54636 - DNA, 1299 bp, Streptomyces spiramyceticus; identical to SEQ ID NO: 20050
  CDS (1)..(1299): transl_table=11

SEQ ID NO: 54637 - protein, 432 aa, Streptomyces spiramyceticus; identical to SEQ ID NO: 20051

SEQ ID NO: 54638 - DNA, 1218 bp, Saccharopolyspora erythraea; identical to SEQ ID NO: 20052
  CDS (1)..(1218): transl_table=11

SEQ ID NO: 54639 - protein, 405 aa, Saccharopolyspora erythraea; identical to SEQ ID NO: 20053

SEQ ID NO: 54640 - DNA, 1269 bp, Streptomyces griseoruber; identical to SEQ ID NO: 20054
  CDS (1)..(1269): transl_table=11

SEQ ID NO: 54641 - protein, 422 aa, Streptomyces griseoruber; identical to SEQ ID NO: 20055

SEQ ID NO: 54642 - DNA, 1398 bp, Oryza sativa; identical to SEQ ID NO: 20056
  CDS (1)..(1398)

SEQ ID NO: 54643 - protein, 465 aa, Oryza sativa; identical to SEQ ID NO: 20057

SEQ ID NO: 54644 - DNA, 1254 bp, Treponema hyodysenteriae; identical to SEQ ID NO: 20058
  CDS (1)..(1254): transl_table=11

SEQ ID NO: 54645 - protein, 417 aa, Treponema hyodysenteriae; identical to SEQ ID NO: 20059

SEQ ID NO: 54646 - DNA, 1269 bp, Rhizobium sp; identical to SEQ ID NO: 20060
  CDS (1)..(1269): transl_table=11

SEQ ID NO: 54647 - protein, 422 aa, Rhizobium sp; identical to SEQ ID NO: 20061

SEQ ID NO: 54648 - DNA, 1305 bp, Plasmodium yoelii yoelii; identical to SEQ ID NO: 20062
  CDS (1)..(1305)

SEQ ID NO: 54649 - protein, 434 aa, Plasmodium yoelii yoelii; identical to SEQ ID NO: 20063

SEQ ID NO: 54650 - DNA, 1275 bp, Streptomyces murayamaensis; identical to SEQ ID NO: 20064
  CDS (1)..(1275): transl_table=11

SEQ ID NO: 54651 - protein, 424 aa, Streptomyces murayamaensis; identical to SEQ ID NO: 20065

SEQ ID NO: 54652 - DNA, 1446 bp, Dictyostelium discoideum; identical to SEQ ID NO: 20066
  CDS (1)..(1446)

SEQ ID NO: 54653 - protein, 481 aa, Dictyostelium discoideum; identical to SEQ ID NO: 20067

SEQ ID NO: 54654 - DNA, 1248 bp, Heliobacillus mobilis; identical to SEQ ID NO: 20068
  CDS (1)..(1248): transl_table=11

SEQ ID NO: 54655 - protein, 415 aa, Heliobacillus mobilis; identical to SEQ ID NO: 20069

SEQ ID NO: 54656 - DNA, 1626 bp, Arabidopsis thaliana; identical to SEQ ID NO: 20070
  CDS (1)..(1626)

SEQ ID NO: 54657 - protein, 541 aa, Arabidopsis thaliana; identical to SEQ ID NO: 20071

SEQ ID NO: 54658 - DNA, 1272 bp, Streptomyces galilaeus; identical to SEQ ID NO: 20072
  CDS (1)..(1272): transl_table=11

SEQ ID NO: 54659 - protein, 423 aa, Streptomyces galilaeus; identical to SEQ ID NO: 20073

SEQ ID NO: 54660 - DNA, 1617 bp, Cuphea lanceolata; identical to SEQ ID NO: 20074
  CDS (1)..(1617)

SEQ ID NO: 54661 - protein, 538 aa, Cuphea lanceolata; identical to SEQ ID NO: 20075

SEQ ID NO: 54662 - DNA, 1371 bp, Coriandrum sativum; identical to SEQ ID NO: 20076
  CDS (1)..(1371)

SEQ ID NO: 54663 - protein, 456 aa, Coriandrum sativum; identical to SEQ ID NO: 20077

SEQ ID NO: 54664 - DNA, 1236 bp, Xanthomonas albilineans; identical to SEQ ID NO: 20078
  CDS (1)..(1236): transl_table=11

SEQ ID NO: 54665 - protein, 411 aa, Xanthomonas albilineans; identical to SEQ ID NO: 20079

SEQ ID NO: 54666 - DNA, 1272 bp, Streptomyces maritimus; identical to SEQ ID NO: 20080
  CDS (1)..(1272): transl_table=11

SEQ ID NO: 54667 - protein, 423 aa, Streptomyces maritimus; identical to SEQ ID NO: 20081

SEQ ID NO: 54668 - DNA, 1272 bp, Streptomyces galilaeus; identical to SEQ ID NO: 20082
  CDS (1)..(1272): transl_table=11

SEQ ID NO: 54669 - protein, 423 aa, Streptomyces galilaeus; identical to SEQ ID NO: 20083

SEQ ID NO: 54670 - DNA, 1635 bp, Brassica napus; identical to SEQ ID NO: 20084
  CDS (1)..(1635)

SEQ ID NO: 54671 - protein, 544 aa, Brassica napus; identical to SEQ ID NO: 20085

SEQ ID NO: 54672 - DNA, 1302 bp, Brassica napus; identical to SEQ ID NO: 20086
  CDS (1)..(1302)

SEQ ID NO: 54673 - protein, 433 aa, Brassica napus; identical to SEQ ID NO: 20087

SEQ ID NO: 54674 - DNA, 1467 bp, Glycine max; identical to SEQ ID NO: 20088
  CDS (1)..(1467)

SEQ ID NO: 54675 - protein, 488 aa, Glycine max; identical to SEQ ID NO: 20089

SEQ ID NO: 54676 - DNA, 1410 bp, Glycine max; identical to SEQ ID NO: 20090
  CDS (1)..(1410)

SEQ ID NO: 54677 - protein, 469 aa, Glycine max; identical to SEQ ID NO: 20091

SEQ ID NO: 54678 - DNA, 1410 bp, Glycine max; identical to SEQ ID NO: 20092
  CDS (1)..(1410)

SEQ ID NO: 54679 - protein, 469 aa, Glycine max; identical to SEQ ID NO: 20093

SEQ ID NO: 54680 - DNA, 1722 bp, Elaeis guineensis var; identical to SEQ ID NO: 20094
  CDS (1)..(1722)

SEQ ID NO: 54681 - protein, 573 aa, Elaeis guineensis var; identical to SEQ ID NO: 20095

SEQ ID NO: 54682 - DNA, 1248 bp, Vibrio marinus; identical to SEQ ID NO: 20096
  CDS (1)..(1248): transl_table=11

SEQ ID NO: 54683 - protein, 415 aa, Vibrio marinus; identical to SEQ ID NO: 20097

SEQ ID NO: 54684 - DNA, 1260 bp, Streptomyces rochei; identical to SEQ ID NO: 20098
  CDS (1)..(1260): transl_table=11

SEQ ID NO: 54685 - protein, 419 aa, Streptomyces rochei; identical to SEQ ID NO: 20099

SEQ ID NO: 54686 - DNA, 1689 bp, Arabidopsis thaliana; identical to SEQ ID NO: 20100
  CDS (1)..(1689)

SEQ ID NO: 54687 - protein, 562 aa, Arabidopsis thaliana; identical to SEQ ID NO: 20101

SEQ ID NO: 54688 - DNA, 1605 bp, Cuphea hookeriana; identical to SEQ ID NO: 20102
  CDS (1)..(1605)

SEQ ID NO: 54689 - protein, 534 aa, Cuphea hookeriana; identical to SEQ ID NO: 20103

SEQ ID NO: 54690 - DNA, 1641 bp, Cuphea pulcherrima; identical to SEQ ID NO: 20104
  CDS (1)..(1641)

SEQ ID NO: 54691 - protein, 546 aa, Cuphea pulcherrima; identical to SEQ ID NO: 20105

SEQ ID NO: 54692 - DNA, 1329 bp, Saccharomyces cerevisiae; identical to SEQ ID NO: 20106
  CDS (1)..(1329)

SEQ ID NO: 54693 - protein, 442 aa, Saccharomyces cerevisiae; identical to SEQ ID NO: 20107

SEQ ID NO: 54694 - DNA, 1251 bp, Mycobacterium leprae; identical to SEQ ID NO: 20108
  CDS (1)..(1251): transl_table=11

SEQ ID NO: 54695 - protein, 416 aa, Mycobacterium leprae; identical to SEQ ID NO: 20109

SEQ ID NO: 54696 - DNA, 1221 bp, Haemophilus influenzae; identical to SEQ ID NO: 20110
  CDS (1)..(1221): transl_table=11

SEQ ID NO: 54697 - protein, 406 aa, Haemophilus influenzae; identical to SEQ ID NO: 20111

SEQ ID NO: 54698 - DNA, 1266 bp, Rhizobium meliloti; identical to SEQ ID NO: 20112
  CDS (1)..(1266): transl_table=11

SEQ ID NO: 54699 - protein, 421 aa, Rhizobium meliloti; identical to SEQ ID NO: 20113

SEQ ID NO: 54700 - DNA, 1251 bp, Synechocystis sp; identical to SEQ ID NO: 20114
  CDS (1)..(1251): transl_table=11

SEQ ID NO: 54701 - protein, 416 aa, Synechocystis sp; identical to SEQ ID NO: 20115

SEQ ID NO: 54702 - DNA, 1245 bp, Vibrio cholerae; identical to SEQ ID NO: 20116
  CDS (1)..(1245)

SEQ ID NO: 54703 - protein, 414 aa, Vibrio cholerae; identical to SEQ ID NO: 19655

SEQ ID NO: 54704 - DNA, 1248 bp, Vibrio harveyi; identical to SEQ ID NO: 20118
  CDS (1)..(1248)

SEQ ID NO: 54705 - protein, 415 aa, Vibrio harveyi; identical to SEQ ID NO: 20119

SEQ ID NO: 54706 - DNA, 1272 bp, Streptomyces coelicolor; identical to SEQ ID NO: 20120
  CDS (1)..(1272): transl_table=11

SEQ ID NO: 54707 - protein, 423 aa, Streptomyces coelicolor; identical to SEQ ID NO: 20121

SEQ ID NO: 54708 - DNA, 1269 bp, Streptomyces halstedii; identical to SEQ ID NO: 20122
  CDS (1)..(1269): transl_table=11

SEQ ID NO: 54709 - protein, 422 aa, Streptomyces halstedii; identical to SEQ ID NO: 20123

SEQ ID NO: 54710 - DNA, 1422 bp, Arabidopsis thaliana; identical to SEQ ID NO: 20124
  CDS (1)..(1422)

SEQ ID NO: 54711 - protein, 473 aa, Arabidopsis thaliana; identical to SEQ ID NO: 20125

SEQ ID NO: 54712 - DNA, 1389 bp, Hordeum vulgare; identical to SEQ ID NO: 20126
  CDS (1)..(1389)

SEQ ID NO: 54713 - protein, 462 aa, Hordeum vulgare; identical to SEQ ID NO: 20127

SEQ ID NO: 54714 - DNA, 1386 bp, Arabidopsis thaliana; identical to SEQ ID NO: 20128
  CDS (1)..(1386)

SEQ ID NO: 54715 - protein, 461 aa, Arabidopsis thaliana; identical to SEQ ID NO: 20129

SEQ ID NO: 54716 - DNA, 24 bp, Artificial sequence
  Primer sequence
atgtctaagcgtcgtgtagttgtg

SEQ ID NO: 54717 - DNA, 27 bp, Artificial sequence
  Primer sequence
ttagatctttttaaagatcaaagaacc

SEQ ID NO: 54718 - protein, 494 aa, Artificial sequence; identical to SEQ ID NO: 20132
  Consensus
  Variant (10)..(10): Xaa in position 10 is any amino acid
  Variant (16)..(21): Xaa in position 16 to 21 is any amino acid
  Variant (23)..(24): Xaa in position 23 to 24 is any amino acid
  Variant (26)..(27): Xaa in position 26 to 27 is any amino acid
  Variant (29)..(30): Xaa in position 29 to 30 is any amino acid
  Variant (33)..(34): Xaa in position 33 to 34 is any amino acid
  Variant (36)..(45): Xaa in position 36 to 45 is any amino acid
  Variant (46)..(57): Xaa in position 46 to 57 is any or no amino acid
  Variant (60)..(60): Xaa in position 60 is any amino acid
  Variant (62)..(69): Xaa in position 62 to 69 is any amino acid
  Variant (70)..(86): Xaa in position 70 to 86 is any or no amino acid
  Variant (88)..(89): Xaa in position 88 to 89 is any amino acid
  Variant (94)..(97): Xaa in position 94 to 97 is any amino acid
  Variant (101)..(101): Xaa in position 101 is any amino acid
  Variant (104)..(105): Xaa in position 104 to 105 is any amino acid
  Variant (108)..(109): Xaa in position 108 to 109 is any amino acid
  Variant (111)..(117): Xaa in position 111 to 117 is any amino acid
  Variant (118)..(131): Xaa in position 118 to 131 is any or no amino acid
  Variant (133)..(133): Xaa in position 133 is any amino acid
  Variant (136)..(136): Xaa in position 136 is any amino acid
  Variant (145)..(157): Xaa in position 145 to 157 is any amino acid
  Variant (158)..(172): Xaa in position 158 to 172 is any or no amino acid
  Variant (174)..(179): Xaa in position 174 to 179 is any or no amino acid
  Variant (181)..(181): Xaa in position 181 is any amino acid
  Variant (183)..(184): Xaa in position 183 to 184 is any amino acid
  Variant (187)..(188): Xaa in position 187 to 188 is any amino acid
  Variant (190)..(191): Xaa in position 190 to 191 is any amino acid
  Variant (193)..(193): Xaa in position 193 is any amino acid
  Variant (196)..(196): Xaa in position 196 is any amino acid
  Variant (200)..(201): Xaa in position 200 to 201 is any amino acid
  Variant (203)..(204): Xaa in position 203 to 204 is any amino acid
  Variant (206)..(211): Xaa in position 206 to 211 is any amino acid
  Variant (215)..(215): Xaa in position 215 is any amino acid
  Variant (217)..(220): Xaa in position 217 to 220 is any amino acid
  Variant (223)..(223): Xaa in position 223 is any amino acid
  Variant (225)..(227): Xaa in position 225 to 227 is any amino acid
  Variant (229)..(230): Xaa in position 229 to 230 is any amino acid
  Variant (232)..(232): Xaa in position 232 is any amino acid
  Variant (234)..(244): Xaa in position 234 to 244 is any or no amino acid
  Variant (246)..(246): Xaa in position 246 is any amino acid
  Variant (249)..(249): Xaa in position 249 is any amino acid
  Variant (252)..(252): Xaa in position 252 is any amino acid
  Variant (254)..(254): Xaa in position 254 is any amino acid
  Variant (255)..(255): Xaa in position 255 is any or no amino acid
  Variant (257)..(258): Xaa in position 257 to 258 is any amino acid
  Variant (260)..(260): Xaa in position 260 is any amino acid
  Variant (265)..(265): Xaa in position 265 is any amino acid
  Variant (267)..(267): Xaa in position 267 is any amino acid
  Variant (272)..(272): Xaa in position 272 is any amino acid
  Variant (273)..(274): Xaa in position 273 to 274 is any or no amino acid
  Variant (276)..(277): Xaa in position 276 to 277 is any or no amino acid
  Variant (279)..(279): Xaa in position 279 is any or no amino acid
  Variant (281)..(282): Xaa in position 281 to 282 is any or no amino acid
  Variant (289)..(290): Xaa in position 289 to 290 is any amino acid
  Variant (292)..(292): Xaa in position 292 is any amino acid
  Variant (307)..(308): Xaa in position 307 to 308 is any amino acid
  Variant (312)..(313): Xaa in position 312 to 313 is any amino acid
  Variant (317)..(317): Xaa in position 317 is any amino acid
  Variant (319)..(319): Xaa in position 319 is any amino acid
  Variant (323)..(323): Xaa in position 323 is any amino acid
  Variant (325)..(325): Xaa in position 325 is any amino acid
  Variant (327)..(327): Xaa in position 327 is any amino acid
  Variant (329)..(329): Xaa in position 329 is any amino acid
  Variant (332)..(332): Xaa in position 332 is any amino acid
  Variant (336)..(336): Xaa in position 336 is any amino acid
  Variant (338)..(338): Xaa in position 338 is any amino acid
  Variant (339)..(340): Xaa in position 339 to 340 is any or no amino acid
  Variant (342)..(342): Xaa in position 342 is any amino acid
  Variant (344)..(346): Xaa in position 344 to 346 is any amino acid
  Variant (347)..(347): Xaa in position 347 is any or no amino acid
  Variant (349)..(350): Xaa in position 349 to 350 is any amino acid
  Variant (353)..(354): Xaa in position 353 to 354 is any amino acid
  Variant (356)..(356): Xaa in position 356 is any amino acid
  Variant (358)..(363): Xaa in position 358 to 363 is any or no amino acid
  Variant (365)..(365): Xaa in position 365 is any amino acid
  Variant (375)..(376): Xaa in position 375 to 376 is any amino acid
  Variant (377)..(377): Xaa in position 377 is any or no amino acid
  Variant (379)..(380): Xaa in position 379 to 380 is any amino acid
  Variant (382)..(383): Xaa in position 382 to 383 is any amino acid
  Variant (386)..(389): Xaa in position 386 to 389 is any amino acid
  Variant (391)..(392): Xaa in position 391 to 392 is any amino acid
  Variant (393)..(406): Xaa in position 393 to 406 is any or no amino acid
  Variant (408)..(408): Xaa in position 408 is any or no amino acid
  Variant (410)..(410): Xaa in position 410 is any amino acid
  Variant (415)..(416): Xaa in position 415 to 416 is any amino acid
  Variant (419)..(419): Xaa in position 419 is any amino acid
  Variant (430)..(431): Xaa in position 430 to 431 is any amino acid
  Variant (433)..(433): Xaa in position 433 is any amino acid
  Variant (436)..(441): Xaa in position 436 to 441 is any amino acid
  Variant (446)..(452): Xaa in position 446 to 452 is any amino acid
  Variant (453)..(459): Xaa in position 453 to 459 is any or no amino acid
  Variant (461)..(462): Xaa in position 461 to 462 is any amino acid
  Variant (464)..(473): Xaa in position 464 to 473 is any amino acid
  Variant (474)..(480): Xaa in position 474 to 480 is any or no amino acid
  Variant (484)..(484): Xaa in position 484 is any amino acid
  Variant (490)..(490): Xaa in position 490 is any amino acid
  Variant (492)..(493): Xaa in position 492 to 493 is any amino acid

SEQ ID NO: 54719 - protein, 31 aa, Artificial sequence; identical to SEQ ID NO: 20133
  Consensus
  Variant (2)..(2): Xaa in position 2 is any amino acid
  Variant (3)..(3): Xaa in position 3 is any or no amino acid
  Variant (5)..(5): Xaa in position 5 is Ile or Val
  Variant (8)..(8): Xaa in position 8 is any amino acid
  Variant (10)..(11): Xaa in position 10 to 11 is any amino acid
  Variant (12)..(12): Xaa in position 12 is Ala, Ser or Thr
  Variant (13)..(14): Xaa in position 13 to 14 is any amino acid
  Variant (15)..(15): Xaa in position 15 is Ala or Gly
  Variant (16)..(16): Xaa in position 16 is any amino acid
  Variant (17)..(17): Xaa in position 17 is Asp, Glu, Gly, Asn, Ser or Thr
  Variant (18)..(27): Xaa in position 18 to 27 is any amino acid
  Variant (29)..(30): Xaa in position 29 to 30 is any amino acid
  Variant (31)..(31): Xaa in position 31 is Ala or Gly

SEQ ID NO: 54720 - protein, 10 aa, Artificial sequence
  Consensus
  Variant (2)..(4): Xaa in position 2 to 4 is any amino acid
  Variant (6)..(6): Xaa in position 6 is Ala, Cys, Asn, Ser, Thr or Val
  Variant (7)..(8): Xaa in position 7 to 8 is any amino acid
  Variant (10)..(10): Xaa in position 10 is Ala, Cys, Asp, Gly, Asn or Ser
GXXXGXXXGX

SEQ ID NO: 54721 - protein, 45 aa, Artificial sequence; identical to SEQ ID NO: 20135
  Consensus
  Variant (2)..(5): Xaa in position 2 to 5 is any amino acid
  Variant (6)..(6): Xaa in position 6 is Asp or Asn
  Variant (7)..(7): Xaa in position 7 is any amino acid
  Variant (8)..(8): Xaa in position 8 is Ala, Gly, Ile, Leu, Pro or Val
  Variant (9)..(9): Xaa in position 9 is Ala, Gly, Pro, Ser or Thr
  Variant (10)..(10): Xaa in position 10 is Ala or Gly
  Variant (11)..(12): Xaa in position 11 to 12 is any amino acid
  Variant (13)..(13): Xaa in position 13 is Ala, Gly, Ser or Thr
  Variant (14)..(14): Xaa in position 14 is Ile, Leu, Met or Val
  Variant (15)..(19): Xaa in position 15 to 19 is any amino acid
  Variant (21)..(25): Xaa in position 21 to 25 is any amino acid
  Variant (26)..(27): Xaa in position 26 to 27 is any or no amino acid
  Variant (29)..(30): Xaa in position 29 to 30 is any or no amino acid
  Variant (32)..(33): Xaa in position 32 to 33 is Ala, Ser or Thr
  Variant (34)..(34): Xaa in position 34 is Ala, Gly or Ser
  Variant (35)..(36): Xaa in position 35 to 36 is any amino acid
  Variant (37)..(37): Xaa in position 37 is Ala, Cys, Asn, Ser or Thr
  Variant (38)..(38): Xaa in position 38 is Phe, Ile, Leu, Met or Val
  Variant (39)..(40): Xaa in position 39 to 40 is any amino acid
  Variant (41)..(41): Xaa in position 41 is Ala, Gly or Ser
  Variant (42)..(44): Xaa in position 42 to 44 is any amino acid
  Variant (45)..(45): Xaa in position 45 is Ile, Leu or Val

SEQ ID NO: 54722 - protein, 37 aa, Artificial sequence; identical to SEQ ID NO: 20136
  Consensus
  Variant (2)..(6): Xaa in position 2 to 6 is any amino acid
  Variant (8)..(8): Xaa in position 8 is Asp, Asn or Ser
  Variant (12)..(12): Xaa in position 12 is Ile, Leu or Met
  Variant (13)..(13): Xaa in position 13 is Ala, Gly or Ser
  Variant (14)..(14): Xaa in position 14 is Asp, Glu or Gly
  Variant (16)..(16): Xaa in position 16 is Ala, Cys, Gly or Ser
  Variant (17)..(17): Xaa in position 17 is Ala or Gly
  Variant (18)..(18): Xaa in position 18 is any amino acid
  Variant (19)..(19): Xaa in position 19 is Phe, Ile, Leu, Met or Val
  Variant (20)..(20): Xaa in position 20 is Ile, Leu, Met or Val
  Variant (21)..(21): Xaa in position 21 is Phe, Ile, Leu, Met or Val
  Variant (23)..(23): Xaa in position 23 is Ala, Asp, Glu, Ser or Thr
  Variant (24)..(26): Xaa in position 24 to 26 is any amino acid
  Variant (28)..(29): Xaa in position 28 to 29 is any amino acid
  Variant (31)..(31): Xaa in position 31 is any amino acid
  Variant (33)..(33): Xaa in position 33 is any amino acid
  Variant (34)..(34): Xaa in position 34 is Ile, Pro or Val
  Variant (35)..(36): Xaa in position 35 to 36 is any amino acid

SEQ ID NO: 54723 - protein, 23 aa, Artificial sequence
  Consensus
  Variant (2)..(2): Xaa in position 2 is Ile, Leu or Val
  Variant (3)..(3): Xaa in position 3 is Asn or Ser
  Variant (4)..(4): Xaa in position 4 is Ala, Cys, Thr or Val
  Variant (6)..(6): Xaa in position 6 is Ala or Gly
  Variant (7)..(7): Xaa in position 7 is Ser or Thr
  Variant (8)..(8): Xaa in position 8 is Ala, Gly or Ser
  Variant (10)..(11): Xaa in position 10 to 11 is any amino acid
  Variant (12)..(12): Xaa in position 12 is any or no amino acid
  Variant (14)..(15): Xaa in position 14 to 15 is any amino acid
  Variant (17)..(18): Xaa in position 17 to 18 is any amino acid
  Variant (19)..(22): Xaa in position 19 to 22 is any or no amino acid
YXXXHXXXTXXXDXXEXXXXXXA

SEQ ID NO: 54724 - protein, 32 aa, Artificial sequence; identical to SEQ ID NO: 20138
  Consensus
  Variant (3)..(3): Xaa in position 3 is Gly or Ser
  Variant (4)..(5): Xaa in position 4 to 5 is any amino acid
  Variant (8)..(8): Xaa in position 8 is any or no amino acid
  Variant (10)..(10): Xaa in position 10 is any or no amino acid
  Variant (12)..(12): Xaa in position 12 is Ala or Gly
  Variant (13)..(13): Xaa in position 13 is Ala, Ser or Thr
  Variant (15)..(15): Xaa in position 15 is Ala, Gly, Asn, Ser or Val
  Variant (16)..(16): Xaa in position 16 is any amino acid
  Variant (18)..(30): Xaa in position 18 to 30 is any amino acid
  Variant (31)..(31): Xaa in position 31 is any or no amino acid

SEQ ID NO: 54725 - DNA, 1251 bp, Escherichia coli; identical to SEQ ID NO: 27883
  CDS (1)..(1251)

SEQ ID NO: 54726 - protein, 416 aa, Escherichia coli; identical to SEQ ID NO: 27884

SEQ ID NO: 54727 - DNA, 1218 bp, Thermoplasma volcanium GSS1; identical to SEQ ID NO: 27885
  CDS (1)..(1218): transl_table=11

SEQ ID NO: 54728 - protein, 405 aa, Thermoplasma volcanium GSS1; identical to SEQ ID NO: 27886

SEQ ID NO: 54729 - DNA, 1308 bp, Aeropyrum pernix K1; identical to SEQ ID NO: 27887
  CDS (1)..(1308): transl_table=11

SEQ ID NO: 54730 - protein, 435 aa, Aeropyrum pernix K1; identical to SEQ ID NO: 27888

SEQ ID NO: 54731 - DNA, 1104 bp, Arabidopsis thaliana; identical to SEQ ID NO: 27889
  CDS (1)..(1104)

SEQ ID NO: 54732 - protein, 367 aa, Arabidopsis thaliana; identical to SEQ ID NO: 27890

SEQ ID NO: 54733 - DNA, 1104 bp, Arabidopsis thaliana; identical to SEQ ID NO: 27891
  CDS (1)..(1104)

SEQ ID NO: 54734 - protein, 367 aa, Arabidopsis thaliana; identical to SEQ ID NO: 27892

SEQ ID NO: 54735 - DNA, 1107 bp, Arabidopsis thaliana; identical to SEQ ID NO: 27893
  CDS (1)..(1107)

SEQ ID NO: 54736 - protein, 368 aa, Arabidopsis thaliana; identical to SEQ ID NO: 27894

SEQ ID NO: 54737 - DNA, 1269 bp, Bacillus halodurans C-125; identical to SEQ ID NO: 27895
  CDS (1)..(1269): transl_table=11

SEQ ID NO: 54738 - protein, 422 aa, Bacillus halodurans C-125; identical to SEQ ID NO: 27896

SEQ ID NO: 54739 - DNA, 1248 bp, Pasteurella multocida subsp. multocida str. Pm70; identical to SEQ ID NO: 27897
  CDS (1)..(1248): transl_table=11

SEQ ID NO: 54740 - protein, 415 aa, Pasteurella multocida subsp. multocida str. Pm70; identical to SEQ ID NO: 27898

SEQ ID NO: 54741 - DNA, 1257 bp, Pseudomonas aeruginosa PAO1; identical to SEQ ID NO: 27899
  CDS (1)..(1257): transl_table=11

SEQ ID NO: 54742 - protein, 418 aa, Pseudomonas aeruginosa PAO1; identical to SEQ ID NO: 27900

SEQ ID NO: 54743 - DNA, 1239 bp, Lactococcus lactis subsp. lactis Il1403; identical to SEQ ID NO: 27901
  CDS (1)..(1239): transl_table=11

SEQ ID NO: 54744 - protein, 412 aa, Lactococcus lactis subsp. lactis Il1403; identical to SEQ ID NO: 27902

SEQ ID NO: 54745 - DNA, 996 bp, Methanothermobacter thermautotrophicus str. Delta H; identical to SEQ ID NO: 27903
  CDS (1)..(996): transl_table=11

SEQ ID NO: 54746 - protein, 331 aa, Methanothermobacter thermautotrophicus str. Delta H; identical to SEQ ID NO: 27904

SEQ ID NO: 54747 - DNA, 1269 bp, Halobacterium sp. NRC-1; identical to SEQ ID NO: 27905
  CDS (1)..(1269): transl_table=11

SEQ ID NO: 54748 - protein, 422 aa, Halobacterium sp. NRC-1; identical to SEQ ID NO: 27906

SEQ ID NO: 54749 - DNA, 1008 bp, Xylella fastidiosa 9a5c; identical to SEQ ID NO: 27907
  CDS (1)..(1008): transl_table=11

SEQ ID NO: 54750 - protein, 335 aa, Xylella fastidiosa 9a5c; identical to SEQ ID NO: 27908

SEQ ID NO: 54751 - DNA, 1242 bp, Sulfolobus solfataricus P2; identical to SEQ ID NO: 27909
  CDS (1)..(1242): transl_table=11

SEQ ID NO: 54752 - protein, 413 aa, Sulfolobus solfataricus P2; identical to SEQ ID NO: 5668

SEQ ID NO: 54753 - DNA, 1005 bp, Clostridium acetobutylicum ATCC 824; identical to SEQ ID NO: 27911
  CDS (1)..(1005): transl_table=11

SEQ ID NO: 54754 - protein, 334 aa, Clostridium acetobutylicum ATCC 824; identical to SEQ ID NO: 27912

SEQ ID NO: 54755 - DNA, 1230 bp, Sulfolobus tokodaii str. 7; identical to SEQ ID NO: 27913
  CDS (1)..(1230): transl_table=11

SEQ ID NO: 54756 - protein, 409 aa, Sulfolobus tokodaii str. 7; identical to SEQ ID NO: 27914

SEQ ID NO: 54757 - DNA, 1218 bp, Thermoplasma acidophilum DSM 1728; identical to SEQ ID NO: 27915
  CDS (1)..(1218): transl_table=11

SEQ ID NO: 54758 - protein, 405 aa, Thermoplasma acidophilum DSM 1728; identical to SEQ ID NO: 27916

SEQ ID NO: 54759 - DNA, 1428 bp, Synechocystis sp. PCC 6803; identical to SEQ ID NO: 27917
  CDS (1)..(1428): transl_table=11

SEQ ID NO: 54760 - protein, 475 aa, Synechocystis sp. PCC 6803; identical to SEQ ID NO: 27918

SEQ ID NO: 54761 - DNA, 1263 bp, Listeria monocytogenes EGD-e; identical to SEQ ID NO: 27919
  CDS (1)..(1263): transl_table=11

SEQ ID NO: 54762 - protein, 420 aa, Listeria monocytogenes EGD-e; identical to SEQ ID NO: 27920

SEQ ID NO: 54763 - DNA, 1263 bp, Listeria innocua Clip11262; identical to SEQ ID NO: 27921
  CDS (1)..(1263): transl_table=11

SEQ ID NO: 54764 - protein, 420 aa, Listeria innocua Clip11262; identical to SEQ ID NO: 27922

SEQ ID NO: 54765 - DNA, 1251 bp, Ralstonia solanacearum GMI1000; identical to SEQ ID NO: 27923
  CDS (1)..(1251): transl_table=11

SEQ ID NO: 54766 - protein, 416 aa, Ralstonia solanacearum GMI1000; identical to SEQ ID NO: 27924

SEQ ID NO: 54767 - DNA, 1320 bp, Pyrobaculum aerophilum str. IM2; identical to SEQ ID NO: 27925
  CDS (1)..(1320): transl_table=11

SEQ ID NO: 54768 - protein, 439 aa, Pyrobaculum aerophilum str. IM2; identical to SEQ ID NO: 27926

SEQ ID NO: 54769 - DNA, 1125 bp, Arabidopsis thaliana; identical to SEQ ID NO: 27927
  CDS (1)..(1125)

SEQ ID NO: 54770 - protein, 374 aa, Arabidopsis thaliana; identical to SEQ ID NO: 27928

SEQ ID NO: 54771 - DNA, 1065 bp, Drosophila melanogaster; identical to SEQ ID NO: 27929
  CDS (1)..(1065)

SEQ ID NO: 54772 - protein, 354 aa, Drosophila melanogaster; identical to SEQ ID NO: 27930

SEQ ID NO: 54773 - DNA, 1203 bp, Pyrococcus furiosus DSM 3638; identical to SEQ ID NO: 27931
  CDS (1)..(1203): transl_table=11

SEQ ID NO: 54774 - protein, 400 aa, Pyrococcus furiosus DSM 3638; identical to SEQ ID NO: 27932

SEQ ID NO: 54775 - DNA, 1068 bp, Pyrococcus furiosus DSM 3638; identical to SEQ ID NO: 27933
  CDS (1)..(1068): transl_table=11

SEQ ID NO: 54776 - protein, 355 aa, Pyrococcus furiosus DSM 3638; identical to SEQ ID NO: 27934

SEQ ID NO: 54777 - DNA, 1008 bp, Methanopyrus kandleri AV19; identical to SEQ ID NO: 27935
  CDS (1)..(1008): transl_table=11

SEQ ID NO: 54778 - protein, 335 aa, Methanopyrus kandleri AV19; identical to SEQ ID NO: 27936

SEQ ID NO: 54779 - DNA, 1128 bp, Methanosarcina acetivorans C2A; identical to SEQ ID NO: 27937
  CDS (1)..(1128): transl_table=11

SEQ ID NO: 54780 - protein, 375 aa, Methanosarcina acetivorans C2A; identical to SEQ ID NO: 27938

SEQ ID NO: 54781 - DNA, 1029 bp, Methanosarcina acetivorans C2A; identical to SEQ ID NO: 27939
  CDS (1)..(1029): transl_table=11

SEQ ID NO: 54782 - protein, 342 aa, Methanosarcina acetivorans C2A; identical to SEQ ID NO: 27940

SEQ ID NO: 54783 - DNA, 1029 bp, Methanosarcina mazei Go1; identical to SEQ ID NO: 27941
  CDS (1)..(1029): transl_table=11

SEQ ID NO: 54784 - protein, 342 aa, Methanosarcina mazei Go1; identical to SEQ ID NO: 27942

SEQ ID NO: 54785 - DNA, 1128 bp, Methanosarcina mazei Go1; identical to SEQ ID NO: 27943
  CDS (1)..(1128): transl_table=11

SEQ ID NO: 54786 - protein, 375 aa, Methanosarcina mazei Go1; identical to SEQ ID NO: 27944

SEQ ID NO: 54787 - DNA, 1008 bp, Xanthomonas axonopodis pv. citri str. 306; identical to SEQ ID NO: 27945
  CDS (1)..(1008): transl_table=11

SEQ ID NO: 54788 - protein, 335 aa, Xanthomonas axonopodis pv. citri str. 306; identical to SEQ ID NO: 27946

SEQ ID NO: 54789 - DNA, 1305 bp, Yersinia pestis KIM; identical to SEQ ID NO: 27947
  CDS (1)..(1305): transl_table=11

SEQ ID NO: 54790 - protein, 434 aa, Yersinia pestis KIM; identical to SEQ ID NO: 27948

SEQ ID NO: 54791 - DNA, 1077 bp, Thermosynechococcus elongatus BP-1; identical to SEQ ID NO: 27949
  CDS (1)..(1077): transl_table=11

SEQ ID NO: 54792 - protein, 358 aa, Thermosynechococcus elongatus BP-1; identical to SEQ ID NO: 27950

SEQ ID NO: 54793 - DNA, 1269 bp, Oceanobacillus iheyensis HTE831; identical to SEQ ID NO: 27951
  CDS (1)..(1269): transl_table=11

SEQ ID NO: 54794 - protein, 422 aa, Oceanobacillus iheyensis HTE831; identical to SEQ ID NO: 27952

SEQ ID NO: 54795 - DNA, 1008 bp, Shewanella oneidensis MR-1; identical to SEQ ID NO: 27953
  CDS (1)..(1008): transl_table=11

SEQ ID NO: 54796 - protein, 335 aa, Shewanella oneidensis MR-1; identical to SEQ ID NO: 27954

SEQ ID NO: 54797 - DNA, 2160 bp, Drosophila melanogaster; identical to SEQ ID NO: 27955
  CDS (1)..(2160)

SEQ ID NO: 54798 - protein, 719 aa, Drosophila melanogaster; identical to SEQ ID NO: 27956

SEQ ID NO: 54799 - DNA, 1257 bp, Pseudomonas putida KT2440; identical to SEQ ID NO: 27957
  CDS (1)..(1257): transl_table=11

SEQ ID NO: 54800 - protein, 418 aa, Pseudomonas putida KT2440; identical to SEQ ID NO: 27958

SEQ ID NO: 54801 - DNA, 1008 bp, Xylella fastidiosa Temecula1; identical to SEQ ID NO: 27959
  CDS (1)..(1008): transl_table=11

SEQ ID NO: 54802 - protein, 335 aa, Xylella fastidiosa Temecula1; identical to SEQ ID NO: 27960

SEQ ID NO: 54803 - DNA, 1191 bp, Bacteroides thetaiotaomicron VPI-5482; identical to SEQ ID NO: 27961
  CDS (1)..(1191): transl_table=11

SEQ ID NO: 54804 - protein, 396 aa, Bacteroides thetaiotaomicron VPI-5482; identical to SEQ ID NO: 27962

SEQ ID NO: 54805 - DNA, 1284 bp, Coxiella burnetii RSA 493; identical to SEQ ID NO: 27963
  CDS (1)..(1284): transl_table=11

SEQ ID NO: 54806 - protein, 427 aa, Coxiella burnetii RSA 493; identical to SEQ ID NO: 27964

SEQ ID NO: 54807 - DNA, 1248 bp, Nitrosomonas europaea ATCC 19718; identical to SEQ ID NO: 27965
  CDS (1)..(1248): transl_table=11

SEQ ID NO: 54808 - protein, 415 aa, Nitrosomonas europaea ATCC 19718; identical to SEQ ID NO: 27966

SEQ ID NO: 54809 - DNA, 1092 bp, Arabidopsis thaliana; identical to SEQ ID NO: 27967
  CDS (1)..(1092)

SEQ ID NO: 54810 - protein, 363 aa, Arabidopsis thaliana; identical to SEQ ID NO: 27968

SEQ ID NO: 54811 - DNA, 1125 bp, Arabidopsis thaliana; identical to SEQ ID NO: 27969
  CDS (1)..(1125)

SEQ ID NO: 54812 - protein, 374 aa, Arabidopsis thaliana; identical to SEQ ID NO: 27970

SEQ ID NO: 54813 - DNA, 1425 bp, Prochlorococcus marinus subsp. marinus str. CCMP1375; identical to SEQ ID NO: 27971
  CDS (1)..(1425): transl_table=11

SEQ ID NO: 54814 - protein, 474 aa, Prochlorococcus marinus subsp. marinus str. CCMP1375; identical to SEQ ID NO: 27972

SEQ ID NO: 54815 - DNA, 1257 bp, Bordetella parapertussis 12822; identical to SEQ ID NO: 27973
  CDS (1)..(1257): transl_table=11

SEQ ID NO: 54816 - protein, 418 aa, Bordetella parapertussis 12822; identical to SEQ ID NO: 27974

SEQ ID NO: 54817 - DNA, 1257 bp, Bordetella bronchiseptica RB50; identical to SEQ ID NO: 27975
  CDS (1)..(1257): transl_table=11

SEQ ID NO: 54818 - protein, 418 aa, Bordetella bronchiseptica RB50; identical to SEQ ID NO: 27976

SEQ ID NO: 54819 - DNA, 1425 bp, Prochlorococcus marinus subsp. pastoris str. CCMP1986; identical to SEQ ID NO: 27977
  CDS (1)..(1425): transl_table=11

SEQ ID NO: 54820 - protein, 474 aa, Prochlorococcus marinus subsp. pastoris str. CCMP1986; identical to SEQ ID NO: 27978

SEQ ID NO: 54821 - DNA, 1425 bp, Prochlorococcus marinus str. MIT 9313; identical to SEQ ID NO: 27979
  CDS (1)..(1425): transl_table=11

SEQ ID NO: 54822 - protein, 474 aa, Prochlorococcus marinus str. MIT 9313; identical to SEQ ID NO: 27980

SEQ ID NO: 54823 - DNA, 1425 bp, Synechococcus sp. WH 8102; identical to SEQ ID NO: 27981
  CDS (1)..(1425): transl_table=11

SEQ ID NO: 54824 - protein, 474 aa, Synechococcus sp. WH 8102; identical to SEQ ID NO: 27982

SEQ ID NO: 54825 - DNA, 1293 bp, Wolinella succinogenes DSM 1740; identical to SEQ ID NO: 27983
  CDS (1)..(1293): transl_table=11

SEQ ID NO: 54826 - protein, 430 aa, Wolinella succinogenes DSM 1740; identical to SEQ ID NO: 27984

SEQ ID NO: 54827 - DNA, 1089 bp, Oryza sativa (japonica cultivar-group); identical to SEQ ID NO: 27985
  CDS (1)..(1089)

SEQ ID NO: 54828 - protein, 362 aa, Oryza sativa (japonica cultivar-group); identical to SEQ ID NO: 27986

SEQ ID NO: 54829 - DNA, 1080 bp, Gloeobacter violaceus PCC 7421; identical to SEQ ID NO: 27987
  CDS (1)..(1080): transl_table=11

SEQ ID NO: 54830 - protein, 359 aa, Gloeobacter violaceus PCC 7421; identical to SEQ ID NO: 27988

SEQ ID NO: 54831 - DNA, 1254 bp, Photorhabdus luminescens subsp. laumondii TTO1; identical to SEQ ID NO: 27989
  CDS (1)..(1254): transl_table=11

SEQ ID NO: 54832 - protein, 417 aa, Photorhabdus luminescens subsp. laumondii TTO1; identical to SEQ ID NO: 27990

SEQ ID NO: 54833 - DNA, 1098 bp, Danio rerio; identical to SEQ ID NO: 27991
  CDS (1)..(1098)

SEQ ID NO: 54834 - protein, 365 aa, Danio rerio; identical to SEQ ID NO: 27992

SEQ ID NO: 54835 - DNA, 1419 bp, Wolbachia endosymbiont of Drosophila melanogaster; identical to SEQ ID NO: 27993
  CDS (1)..(1419): transl_table=11

SEQ ID NO: 54836 - protein, 472 aa, Wolbachia endosymbiont of Drosophila melanogaster; identical to SEQ ID NO: 27994

SEQ ID NO: 54837 - DNA, 1002 bp, Bdellovibrio bacteriovorus HD100; identical to SEQ ID NO: 27995
  CDS (1)..(1002): transl_table=11

SEQ ID NO: 54838 - protein, 333 aa, Bdellovibrio bacteriovorus HD100; identical to SEQ ID NO: 27996

SEQ ID NO: 54839 - DNA, 1308 bp, Bacillus cereus ATCC 10987; identical to SEQ ID NO: 27997
  CDS (1)..(1308): transl_table=11

SEQ ID NO: 54840 - protein, 435 aa, Bacillus cereus ATCC 10987; identical to SEQ ID NO: 27998

SEQ ID NO: 54841 - DNA, 1104 bp, Eremothecium gossypii; identical to SEQ ID NO: 27999
  CDS (1)..(1104)

SEQ ID NO: 54842 - protein, 367 aa, Eremothecium gossypii; identical to SEQ ID NO: 28000

SEQ ID NO: 54843 - DNA, 1104 bp, Eremothecium gossypii; identical to SEQ ID NO: 28001
  CDS (1)..(1104)

SEQ ID NO: 54844 - protein, 367 aa, Eremothecium gossypii; identical to SEQ ID NO: 28002

SEQ ID NO: 54845 - DNA, 993 bp, Methanococcus maripaludis S2; identical to SEQ ID NO: 28003
  CDS (1)..(993): transl_table=11

SEQ ID NO: 54846 - protein, 330 aa, Methanococcus maripaludis S2; identical to SEQ ID NO: 28004

SEQ ID NO: 54847 - DNA, 1020 bp, Methanococcus maripaludis S2; identical to SEQ ID NO: 28005
  CDS (1)..(1020): transl_table=11

SEQ ID NO: 54848 - protein, 339 aa, Methanococcus maripaludis S2; identical to SEQ ID NO: 28006

SEQ ID NO: 54849 - DNA, 1101 bp, Xenopus tropicalis; identical to SEQ ID NO: 28007
  CDS (1)..(1101)

SEQ ID NO: 54850 - protein, 366 aa, Xenopus tropicalis; identical to SEQ ID NO: 28008

SEQ ID NO: 54851 - DNA, 1161 bp, Ustilago maydis 521; identical to SEQ ID NO: 28009
  CDS (1)..(1161)

SEQ ID NO: 54852 - protein, 386 aa, Ustilago maydis 521; identical to SEQ ID NO: 28010

SEQ ID NO: 54853 - DNA, 1467 bp, Leptospira interrogans serovar Copenhageni str. Fiocruz L1-130; identical to SEQ ID NO: 28011
  CDS (1)..(1467): transl_table=11

SEQ ID NO: 54854 - protein, 488 aa, Leptospira interrogans serovar Copenhageni str. Fiocruz L1-130; identical to SEQ ID NO: 28012

SEQ ID NO: 54855 - DNA, 1005 bp, Thermus thermophilus HB27; identical to SEQ ID NO: 28013
  CDS (1)..(1005): transl_table=11

SEQ ID NO: 54856 - protein, 334 aa, Thermus thermophilus HB27; identical to SEQ ID NO: 28014

SEQ ID NO: 54857 - DNA, 1491 bp, Thermus thermophilus HB27; identical to SEQ ID NO: 28015
  CDS (1)..(1491): transl_table=11

SEQ ID NO: 54858 - protein, 496 aa, Thermus thermophilus HB27; identical to SEQ ID NO: 28016

SEQ ID NO: 54859 - DNA, 1452 bp, Parachlamydia sp. UWE25; identical to SEQ ID NO: 28017
  CDS (1)..(1452): transl_table=11

SEQ ID NO: 54860 - protein, 483 aa, Parachlamydia sp. UWE25; identical to SEQ ID NO: 28018

SEQ ID NO: 54861 - DNA, 1263 bp, Listeria monocytogenes str. 4b F2365; identical to SEQ ID NO: 28019
  CDS (1)..(1263): transl_table=11

SEQ ID NO: 54862 - protein, 420 aa, Listeria monocytogenes str. 4b F2365; identical to SEQ ID NO: 28020

SEQ ID NO: 54863 - DNA, 1179 bp, Picrophilus torridus DSM 9790; identical to SEQ ID NO: 28021
  CDS (1)..(1179): transl_table=11

SEQ ID NO: 54864 - protein, 392 aa, Picrophilus torridus DSM 9790; identical to SEQ ID NO: 28022

SEQ ID NO: 54865 - DNA, 1308 bp, Bacillus anthracis str. Sterne; identical to SEQ ID NO: 28023
  CDS (1)..(1308): transl_table=11

SEQ ID NO: 54866 - protein, 435 aa, Bacillus anthracis str. Sterne; identical to SEQ ID NO: 28024

SEQ ID NO: 54867 - DNA, 1311 bp, Acinetobacter sp. ADP1; identical to SEQ ID NO: 28025
  CDS (1)..(1311): transl_table=11

SEQ ID NO: 54868 - protein, 436 aa, Acinetobacter sp. ADP1; identical to SEQ ID NO: 28026

SEQ ID NO: 54869 - DNA, 1254 bp, Erwinia carotovora subsp. atroseptica SCRI1043; identical to SEQ ID NO: 28027
  CDS (1)..(1254): transl_table=11

SEQ ID NO: 54870 - protein, 417 aa, Erwinia carotovora subsp. atroseptica SCRI1043; identical to SEQ ID NO: 28028

SEQ ID NO: 54871 - DNA, 1254 bp, Yersinia pseudotuberculosis IP 32953; identical to SEQ ID NO: 28029
  CDS (1)..(1254): transl_table=11

SEQ ID NO: 54872 - protein, 417 aa, Yersinia pseudotuberculosis IP 32953; identical to SEQ ID NO: 28030

SEQ ID NO: 54873 - DNA, 1266 bp, Symbiobacterium thermophilum IAM 14863; identical to SEQ ID NO: 28031
  CDS (1)..(1266): transl_table=11

SEQ ID NO: 54874 - protein, 421 aa, Symbiobacterium thermophilum IAM 14863; identical to SEQ ID NO: 28032

SEQ ID NO: 54875 - DNA, 1317 bp, Bacillus licheniformis ATCC 14580; identical to SEQ ID NO: 28033
  CDS (1)..(1317): transl_table=11

SEQ ID NO: 54876 - protein, 438 aa, Bacillus licheniformis ATCC 14580; identical to SEQ ID NO: 28034

SEQ ID NO: 54877 - DNA, 1248 bp, Mannheimia succiniciproducens MBEL55E; identical to SEQ ID NO: 28035
  CDS (1)..(1248): transl_table=11

SEQ ID NO: 54878 - protein, 415 aa, Mannheimia succiniciproducens MBEL55E; identical to SEQ ID NO: 28036

SEQ ID NO: 54879 - DNA, 1191 bp, Bacteroides fragilis YCH46; identical to SEQ ID NO: 28037
  CDS (1)..(1191): transl_table=11

SEQ ID NO: 54880 - protein, 396 aa, Bacteroides fragilis YCH46; identical to SEQ ID NO: 28038

SEQ ID NO: 54881 - DNA, 1023 bp, Methylococcus capsulatus str. Bath; identical to SEQ ID NO: 28039
  CDS (1)..(1023): transl_table=11

SEQ ID NO: 54882 - protein, 340 aa, Methylococcus capsulatus str. Bath; identical to SEQ ID NO: 28040

SEQ ID NO: 54883 - DNA, 1257 bp, Legionella pneumophila str. Lens; identical to SEQ ID NO: 28041
  CDS (1)..(1257): transl_table=11

SEQ ID NO: 54884 - protein, 418 aa, Legionella pneumophila str. Lens; identical to SEQ ID NO: 28042

SEQ ID NO: 54885 - DNA, 1254 bp, Photobacterium profundum SS9; identical to SEQ ID NO: 28043
  CDS (1)..(1254): transl_table=11

SEQ ID NO: 54886 - protein, 417 aa, Photobacterium profundum SS9; identical to SEQ ID NO: 28044

SEQ ID NO: 54887 - DNA, 984 bp, Haloarcula marismortui ATCC 43049; identical to SEQ ID NO: 28045
  CDS (1)..(984): transl_table=11

SEQ ID NO: 54888 - protein, 327 aa, Haloarcula marismortui ATCC 43049; identical to SEQ ID NO: 28046

SEQ ID NO: 54889 - DNA, 1263 bp, Haloarcula marismortui ATCC 43049; identical to SEQ ID NO: 28047
  CDS (1)..(1263): transl_table=11

SEQ ID NO: 54890 - protein, 420 aa, Haloarcula marismortui ATCC 43049; identical to SEQ ID NO: 28048

SEQ ID NO: 54891 - DNA, 1176 bp, Streptococcus thermophilus LMG 18311; identical to SEQ ID NO: 28049
  CDS (1)..(1176): transl_table=11

SEQ ID NO: 54892 - protein, 391 aa, Streptococcus thermophilus LMG 18311; identical to SEQ ID NO: 28050

SEQ ID NO: 54893 - DNA, 1272 bp, Geobacillus kaustophilus HTA426; identical to SEQ ID NO: 28051
  CDS (1)..(1272): transl_table=11

SEQ ID NO: 54894 - protein, 423 aa, Geobacillus kaustophilus HTA426; identical to SEQ ID NO: 28052

SEQ ID NO: 54895 - DNA, 1467 bp, Anaplasma marginale str. St. Maries; identical to SEQ ID NO: 28053
  CDS (1)..(1467): transl_table=11

SEQ ID NO: 54896 - protein, 488 aa, Anaplasma marginale str. St. Maries; identical to SEQ ID NO: 28054

SEQ ID NO: 54897 - DNA, 1005 bp, Idiomarina loihiensis L2TR; identical to SEQ ID NO: 28055
  CDS (1)..(1005): transl_table=11

SEQ ID NO: 54898 - protein, 334 aa, Idiomarina loihiensis L2TR; identical to SEQ ID NO: 28056

SEQ ID NO: 54899 - DNA, 1263 bp, Zymomonas mobilis subsp. mobilis ZM4; identical to SEQ ID NO: 28057
  CDS (1)..(1263): transl_table=11

SEQ ID NO: 54900 - protein, 420 aa, Zymomonas mobilis subsp. mobilis ZM4; identical to SEQ ID NO: 28058

SEQ ID NO: 54901 - DNA, 1428 bp, Synechococcus elongatus PCC 6301; identical to SEQ ID NO: 28059
  CDS (1)..(1428): transl_table=11

SEQ ID NO: 54902 - protein, 475 aa, Synechococcus elongatus PCC 6301; identical to SEQ ID NO: 28060

SEQ ID NO: 54903 - DNA, 1266 bp, Bacillus clausii KSM-K16; identical to SEQ ID NO: 28061
  CDS (1)..(1266): transl_table=11

SEQ ID NO: 54904 - protein, 421 aa, Bacillus clausii KSM-K16; identical to SEQ ID NO: 28062

SEQ ID NO: 54905 - DNA, 1080 bp, Dehalococcoides ethenogenes 195; identical to SEQ ID NO: 28063
  CDS (1)..(1080): transl_table=11

SEQ ID NO: 54906 - protein, 359 aa, Dehalococcoides ethenogenes 195; identical to SEQ ID NO: 28064

SEQ ID NO: 54907 - DNA, 1023 bp, Gluconobacter oxydans 621H; identical to SEQ ID NO: 28065
  CDS (1)..(1023): transl_table=11

SEQ ID NO: 54908 - protein, 340 aa, Gluconobacter oxydans 621H; identical to SEQ ID NO: 28066

SEQ ID NO: 54909 - DNA, 1452 bp, Ehrlichia ruminantium str. Gardel; identical to SEQ ID NO: 28067
  CDS (1)..(1452): transl_table=11

SEQ ID NO: 54910 - protein, 483 aa, Ehrlichia ruminantium str. Gardel; identical to SEQ ID NO: 28068

SEQ ID NO: 54911 - DNA, 1428 bp, Wolbachia endosymbiont strain TRS of Brugia malayi; identical to SEQ ID NO: 28069
  CDS (1)..(1428): transl_table=11

SEQ ID NO: 54912 - protein, 475 aa, Wolbachia endosymbiont strain TRS of Brugia malayi; identical to SEQ ID NO: 28070

SEQ ID NO: 54913 - DNA, 1209 bp, Xanthomonas oryzae pv. oryzae KACC10331; identical to SEQ ID NO: 28071
  CDS (1)..(1209): transl_table=11

SEQ ID NO: 54914 - protein, 402 aa, Xanthomonas oryzae pv. oryzae KACC10331; identical to SEQ ID NO: 28072

SEQ ID NO: 54915 - DNA, 1191 bp, Bacteroides fragilis NCTC 9343; identical to SEQ ID NO: 28073
  CDS (1)..(1191): transl_table=11

SEQ ID NO: 54916 - protein, 396 aa, Bacteroides fragilis NCTC 9343; identical to SEQ ID NO: 28074

SEQ ID NO: 54917 - DNA, 1008 bp, Xanthomonas campestris pv. campestris str. 8004; identical to SEQ ID NO: 28075
  CDS (1)..(1008): transl_table=11

SEQ ID NO: 54918 - protein, 335 aa, Xanthomonas campestris pv. campestris str. 8004; identical to SEQ ID NO: 28076

SEQ ID NO: 54919 - DNA, 1476 bp, Rickettsia felis URRWXCal2; identical to SEQ ID NO: 28077
  CDS (1)..(1476): transl_table=11

SEQ ID NO: 54920 - protein, 491 aa, Rickettsia felis URRWXCal2; identical to SEQ ID NO: 28078

SEQ ID NO: 54921 - DNA, 1269 bp, Staphylococcus haemolyticus JCSC1435; identical to SEQ ID NO: 28079
  CDS (1)..(1269): transl_table=11

SEQ ID NO: 54922 - protein, 422 aa, Staphylococcus haemolyticus JCSC1435; identical to SEQ ID NO: 28080

SEQ ID NO: 54923 - DNA, 1236 bp, Sulfolobus acidocaldarius DSM 639; identical to SEQ ID NO: 28081
  CDS (1)..(1236): transl_table=11

SEQ ID NO: 54924 - protein, 411 aa, Sulfolobus acidocaldarius DSM 639; identical to SEQ ID NO: 28082

SEQ ID NO: 54925 - DNA, 1257 bp, Pseudomonas fluorescens Pf-5; identical to SEQ ID NO: 28083
  CDS (1)..(1257): transl_table=11

SEQ ID NO: 54926 - protein, 418 aa, Pseudomonas fluorescens Pf-5; identical to SEQ ID NO: 28084

SEQ ID NO: 54927 - DNA, 1251 bp, Colwellia psychrerythraea 34H; identical to SEQ ID NO: 28085
  CDS (1)..(1251): transl_table=11

SEQ ID NO: 54928 - protein, 416 aa, Colwellia psychrerythraea 34H; identical to SEQ ID NO: 28086

SEQ ID NO: 54929 - DNA, 1008 bp, Colwellia psychrerythraea 34H; identical to SEQ ID NO: 28087
  CDS (1)..(1008): transl_table=11

SEQ ID NO: 54930 - protein, 335 aa, Colwellia psychrerythraea 34H; identical to SEQ ID NO: 28088

SEQ ID NO: 54931 - DNA, 1242 bp, Dechloromonas aromatica RCB; identical to SEQ ID NO: 28089
  CDS (1)..(1242): transl_table=11

SEQ ID NO: 54932 - protein, 413 aa, Dechloromonas aromatica RCB; identical to SEQ ID NO: 28090

SEQ ID NO: 54933 - DNA, 1425 bp, Prochlorococcus marinus str. NATL2A; identical to SEQ ID NO: 28091
  CDS (1)..(1425): transl_table=11

SEQ ID NO: 54934 - protein, 474 aa, Prochlorococcus marinus str. NATL2A; identical to SEQ ID NO: 28092

SEQ ID NO: 54935 - DNA, 1251 bp, Ralstonia eutropha JMP134; identical to SEQ ID NO: 28093
  CDS (1)..(1251): transl_table=11

SEQ ID NO: 54936 - protein, 416 aa, Ralstonia eutropha JMP134; identical to SEQ ID NO: 28094

SEQ ID NO: 54937 - DNA, 1266 bp, Staphylococcus saprophyticus subsp. saprophyticus ATCC 15305; identical to SEQ ID NO: 28095
  CDS (1)..(1266): transl_table=11

SEQ ID NO: 54938 - protein, 421 aa, Staphylococcus saprophyticus subsp. saprophyticus ATCC 15305; identical to SEQ ID NO: 28096

SEQ ID NO: 54939 - DNA, 1449 bp, Ehrlichia canis str. Jake; identical to SEQ ID NO: 28097
  CDS (1)..(1449): transl_table=11

SEQ ID NO: 54940 - protein, 482 aa, Ehrlichia canis str. Jake; identical to SEQ ID NO: 28098

SEQ ID NO: 54941 - DNA, 1080 bp, Dehalococcoides sp. CBDB1; identical to SEQ ID NO: 28099
  CDS (1)..(1080): transl_table=11

SEQ ID NO: 54942 - protein, 359 aa, Dehalococcoides sp. CBDB1; identical to SEQ ID NO: 28100

SEQ ID NO: 54943 - DNA, 1242 bp, Thiobacillus denitrificans ATCC 25259; identical to SEQ ID NO: 28101
  CDS (1)..(1242): transl_table=11

SEQ ID NO: 54944 - protein, 413 aa, Thiobacillus denitrificans ATCC 25259; identical to SEQ ID NO: 28102

SEQ ID NO: 54945 - DNA, 1149 bp, Desulfovibrio desulfuricans G20; identical to SEQ ID NO: 28103
  CDS (1)..(1149)

SEQ ID NO: 54946 - protein, 382 aa, Desulfovibrio desulfuricans G20; identical to SEQ ID NO: 28104

SEQ ID NO: 54947 - DNA, 1257 bp, Burkholderia cepacia R18194; identical to SEQ ID NO: 28105
  CDS (1)..(1257)

SEQ ID NO: 54948 - protein, 418 aa, Burkholderia cepacia R18194; identical to SEQ ID NO: 28106

SEQ ID NO: 54949 - DNA, 1269 bp, Pseudomonas fluorescens PfO-1; identical to SEQ ID NO: 28107
  CDS (1)..(1269)

SEQ ID NO: 54950 - protein, 422 aa, Pseudomonas fluorescens PfO-1; identical to SEQ ID NO: 28108

SEQ ID NO: 54951 - DNA, 1257 bp, Burkholderia fungorum LB400; identical to SEQ ID NO: 28109
  CDS (1)..(1257)

SEQ ID NO: 54952 - protein, 418 aa, Burkholderia fungorum LB400; identical to SEQ ID NO: 28110

SEQ ID NO: 54953 - DNA, 1239 bp, Lactococcus lactis subsp. cremoris SK11; identical to SEQ ID NO: 28111
  CDS (1)..(1239)

SEQ ID NO: 54954 - protein, 412 aa, Lactococcus lactis subsp. cremoris SK11; identical to SEQ ID NO: 28112

SEQ ID NO: 54955 - DNA, 1176 bp, Streptococcus thermophilus LMD-9; identical to SEQ ID NO: 28113
  CDS (1)..(1176)

SEQ ID NO: 54956 - protein, 391 aa, Streptococcus thermophilus LMD-9; identical to SEQ ID NO: 28114

SEQ ID NO: 54957 - DNA, 1257 bp, Burkholderia vietnamiensis G4; identical to SEQ ID NO: 28115
  CDS (1)..(1257): transl_table=11

SEQ ID NO: 54958 - protein, 418 aa, Burkholderia vietnamiensis G4; identical to SEQ ID NO: 28116

SEQ ID NO: 54959 - DNA, 1260 bp, Burkholderia pseudomallei 668; identical to SEQ ID NO: 28117
  CDS (1)..(1260)

SEQ ID NO: 54960 - protein, 419 aa, Burkholderia pseudomallei 668; identical to SEQ ID NO: 28118

SEQ ID NO: 54961 - DNA, 1491 bp, Crocosphaera watsonii WH 8501; identical to SEQ ID NO: 28119
  CDS (1)..(1491): transl_table=11

SEQ ID NO: 54962 - protein, 496 aa, Crocosphaera watsonii WH 8501; identical to SEQ ID NO: 28120

SEQ ID NO: 54963 - DNA, 1242 bp, Methylobacillus flagellatus KT; identical to SEQ ID NO: 28121
  CDS (1)..(1242): transl_table=11

SEQ ID NO: 54964 - protein, 413 aa, Methylobacillus flagellatus KT; identical to SEQ ID NO: 28122

SEQ ID NO: 54965 - DNA, 1011 bp, Moorella thermoacetica ATCC 39073; identical to SEQ ID NO: 28123
  CDS (1)..(1011): transl_table=11

SEQ ID NO: 54966 - protein, 336 aa, Moorella thermoacetica ATCC 39073; identical to SEQ ID NO: 28124

SEQ ID NO: 54967 - DNA, 1251 bp, Ralstonia metallidurans CH34; identical to SEQ ID NO: 28125
  CDS (1)..(1251): transl_table=11

SEQ ID NO: 54968 - protein, 416 aa, Ralstonia metallidurans CH34; identical to SEQ ID NO: 28126

SEQ ID NO: 54969 - DNA, 1173 bp, Rubrobacter xylanophilus DSM 9941; identical to SEQ ID NO: 28127
  CDS (1)..(1173): transl_table=11

SEQ ID NO: 54970 - protein, 390 aa, Rubrobacter xylanophilus DSM 9941; identical to SEQ ID NO: 28128

SEQ ID NO: 54971 - DNA, 1179 bp, Ferroplasma acidarmanus Fer1; identical to SEQ ID NO: 28129
  CDS (1)..(1179): transl_table=11

SEQ ID NO: 54972 - protein, 392 aa, Ferroplasma acidarmanus Fer1; identical to SEQ ID NO: 28130

SEQ ID NO: 54973 - DNA, 1260 bp, Psychrobacter cryohalolentis K5; identical to SEQ ID NO: 28131
  CDS (1)..(1260): transl_table=11

SEQ ID NO: 54974 - protein, 419 aa, Psychrobacter cryohalolentis K5; identical to SEQ ID NO: 28132

SEQ ID NO: 54975 - DNA, 1236 bp, Syntrophobacter fumaroxidans MPOB; identical to SEQ ID NO: 28133
  CDS (1)..(1236): transl_table=11

SEQ ID NO: 54976 - protein, 411 aa, Syntrophobacter fumaroxidans MPOB; identical to SEQ ID NO: 28134

SEQ ID NO: 54977 - DNA, 1248 bp, Nitrosomonas eutropha C71; identical to SEQ ID NO: 28135
  CDS (1)..(1248): transl_table=11

SEQ ID NO: 54978 - protein, 415 aa, Nitrosomonas eutropha C71; identical to SEQ ID NO: 28136

SEQ ID NO: 54979 - DNA, 1419 bp, Trichodesmium erythraeum IMS101; identical to SEQ ID NO: 28137
  CDS (1)..(1419): transl_table=11

SEQ ID NO: 54980 - protein, 472 aa, Trichodesmium erythraeum IMS101; identical to SEQ ID NO: 28138

SEQ ID NO: 54981 - DNA, 1254 bp, Rhodoferax ferrireducens DSM 15236; identical to SEQ ID NO: 28139
  CDS (1)..(1254): transl_table=11

SEQ ID NO: 54982 - protein, 417 aa, Rhodoferax ferrireducens DSM 15236; identical to SEQ ID NO: 28140

SEQ ID NO: 54983 - DNA, 1278 bp, Bacillus israeli; identical to SEQ ID NO: 28141
  CDS (1)..(1278): transl_table=11

SEQ ID NO: 54984 - protein, 425 aa, Bacillus israeli; identical to SEQ ID NO: 28142

SEQ ID NO: 54985 - DNA, 1170 bp, Salmonella enterica I; identical to SEQ ID NO: 28143
  CDS (1)..(1170): transl_table=11

SEQ ID NO: 54986 - protein, 389 aa, Salmonella enterica I; identical to SEQ ID NO: 28144

SEQ ID NO: 54987 - DNA, 1170 bp, Salmonella enterica subsp; identical to SEQ ID NO: 28145
  CDS (1)..(1170): transl_table=11

SEQ ID NO: 54988 - protein, 389 aa, Salmonella enterica subsp; identical to SEQ ID NO: 28146

SEQ ID NO: 54989 - DNA, 1170 bp, Salmonella enterica subsp; identical to SEQ ID NO: 28147
  CDS (1)..(1170): transl_table=11

SEQ ID NO: 54990 - protein, 389 aa, Salmonella enterica subsp; identical to SEQ ID NO: 28148

SEQ ID NO: 54991 - DNA, 1170 bp, Salmonella bongori; identical to SEQ ID NO: 28149
  CDS (1)..(1170): transl_table=11

SEQ ID NO: 54992 - protein, 389 aa, Salmonella bongori; identical to SEQ ID NO: 28150

SEQ ID NO: 54993 - DNA, 1095 bp, Nicotiana tabacum; identical to SEQ ID NO: 28151
  CDS (1)..(1095)

SEQ ID NO: 54994 - protein, 364 aa, Nicotiana tabacum; identical to SEQ ID NO: 28152

SEQ ID NO: 54995 - DNA, 1104 bp, Arabidopsis thaliana; identical to SEQ ID NO: 28153
  CDS (1)..(1104)

SEQ ID NO: 54996 - protein, 367 aa, Arabidopsis thaliana; identical to SEQ ID NO: 28154

SEQ ID NO: 54997 - DNA, 1104 bp, Arabidopsis thaliana; identical to SEQ ID NO: 28155
  CDS (1)..(1104)

SEQ ID NO: 54998 - protein, 367 aa, Arabidopsis thaliana; identical to SEQ ID NO: 28156

SEQ ID NO: 54999 - DNA, 1281 bp, Thermus aquaticus; identical to SEQ ID NO: 28157
  CDS (1)..(1281): transl_table=11

SEQ ID NO: 55000 - protein, 426 aa, Thermus aquaticus; identical to SEQ ID NO: 28158

SEQ ID NO: 55001 - DNA, 1056 bp, Haemophilus parasuis; identical to SEQ ID NO: 28159
  CDS (1)..(1056): transl_table=11

SEQ ID NO: 55002 - protein, 351 aa, Haemophilus parasuis; identical to SEQ ID NO: 28160

SEQ ID NO: 55003 - DNA, 1278 bp, Leishmania major; identical to SEQ ID NO: 28161
  CDS (1)..(1278)

SEQ ID NO: 55004 - protein, 425 aa, Leishmania major; identical to SEQ ID NO: 28162

SEQ ID NO: 55005 - DNA, 1101 bp, Homo sapiens; identical to SEQ ID NO: 28163
  CDS (1)..(1101)

SEQ ID NO: 55006 - protein, 366 aa, Homo sapiens; identical to SEQ ID NO: 28164

SEQ ID NO: 55007 - DNA, 1113 bp, Gallus gallus; identical to SEQ ID NO: 28165
  CDS (1)..(1113)

SEQ ID NO: 55008 - protein, 370 aa, Gallus gallus; identical to SEQ ID NO: 28166

SEQ ID NO: 55009 - DNA, 1107 bp, Xenopus laevis; identical to SEQ ID NO: 28167
  CDS (1)..(1107)

SEQ ID NO: 55010 - protein, 368 aa, Xenopus laevis; identical to SEQ ID NO: 28168

SEQ ID NO: 55011 - DNA, 1023 bp, Thermoproteus tenax; identical to SEQ ID NO: 28169
  CDS (1)..(1023): transl_table=11

SEQ ID NO: 55012 - protein, 340 aa, Thermoproteus tenax; identical to SEQ ID NO: 28170

SEQ ID NO: 55013 - DNA, 1320 bp, Thermoproteus tenax; identical to SEQ ID NO: 28171
  CDS (1)..(1320): transl_table=11

SEQ ID NO: 55014 - protein, 439 aa, Thermoproteus tenax; identical to SEQ ID NO: 28172

SEQ ID NO: 55015 - DNA, 1266 bp, Hydrogenobacter thermophilus; identical to SEQ ID NO: 28173
  CDS (1)..(1266): transl_table=11

SEQ ID NO: 55016 - protein, 421 aa, Hydrogenobacter thermophilus; identical to SEQ ID NO: 28174

SEQ ID NO: 55017 - DNA, 975 bp, Halobacterium volcanii; identical to SEQ ID NO: 28175
  CDS (1)..(975): transl_table=11

SEQ ID NO: 55018 - protein, 324 aa, Halobacterium volcanii; identical to SEQ ID NO: 28176

SEQ ID NO: 55019 - DNA, 1098 bp, Brachydanio rerio; identical to SEQ ID NO: 28177
  CDS (1)..(1098)

SEQ ID NO: 55020 - protein, 365 aa, Brachydanio rerio; identical to SEQ ID NO: 28178

SEQ ID NO: 55021 - DNA, 1176 bp, Streptococcus thermophilus; identical to SEQ ID NO: 28179
  CDS (1)..(1176): transl_table=11

SEQ ID NO: 55022 - protein, 391 aa, Streptococcus thermophilus; identical to SEQ ID NO: 28180

SEQ ID NO: 55023 - DNA, 1299 bp, Myxococcus xanthus; identical to SEQ ID NO: 28181
  misc_feature (794)..(794): n is a, c, g, or t
  misc_feature (968)..(968): n is a, c, g, or t
  CDS (1)..(1299): transl_table=11

SEQ ID NO: 55024 - protein, 432 aa, Myxococcus xanthus; identical to SEQ ID NO: 28182
  misc_feature (265)..(265): Xaa can be any naturally occuring amino acid
  misc_feature (323)..(323): Xaa can be any naturally occuring amino acid

SEQ ID NO: 55025 - DNA, 993 bp, Brassica napus; identical to SEQ ID NO: 28183
  CDS (1)..(993)

SEQ ID NO: 55026 - protein, 330 aa, Brassica napus; identical to SEQ ID NO: 28184

SEQ ID NO: 55027 - DNA, 1104 bp, Brassica napus; identical to SEQ ID NO: 28185
  CDS (1)..(1104)

SEQ ID NO: 55028 - protein, 367 aa, Brassica napus; identical to SEQ ID NO: 28186

SEQ ID NO: 55029 - DNA, 1104 bp, Brassica napus; identical to SEQ ID NO: 28187
  CDS (1)..(1104)

SEQ ID NO: 55030 - protein, 367 aa, Brassica napus; identical to SEQ ID NO: 28188

SEQ ID NO: 55031 - DNA, 1290 bp, Thiobacillus thiooxidans; identical to SEQ ID NO: 28189
  CDS (1)..(1290): transl_table=11

SEQ ID NO: 55032 - protein, 429 aa, Thiobacillus thiooxidans; identical to SEQ ID NO: 28190

SEQ ID NO: 55033 - DNA, 1329 bp, Alcaligenes eutrophus; identical to SEQ ID NO: 28191
  CDS (1)..(1329): transl_table=11

SEQ ID NO: 55034 - protein, 442 aa, Alcaligenes eutrophus; identical to SEQ ID NO: 28192

SEQ ID NO: 55035 - DNA, 1104 bp, Arabidopsis thaliana; identical to SEQ ID NO: 28193
  CDS (1)..(1104)

SEQ ID NO: 55036 - protein, 367 aa, Arabidopsis thaliana; identical to SEQ ID NO: 28194

SEQ ID NO: 55037 - DNA, 1125 bp, Arabidopsis thaliana; identical to SEQ ID NO: 28195
  CDS (1)..(1125)

SEQ ID NO: 55038 - protein, 374 aa, Arabidopsis thaliana; identical to SEQ ID NO: 28196

SEQ ID NO: 55039 - DNA, 1047 bp, Coccidioides immitis; identical to SEQ ID NO: 28197
  CDS (1)..(1047)

SEQ ID NO: 55040 - protein, 348 aa, Coccidioides immitis; identical to SEQ ID NO: 28198

SEQ ID NO: 55041 - DNA, 1218 bp, Thermoplasma acidophilum; identical to SEQ ID NO: 28199
  CDS (1)..(1218): transl_table=11

SEQ ID NO: 55042 - protein, 405 aa, Thermoplasma acidophilum; identical to SEQ ID NO: 28200

SEQ ID NO: 55043 - DNA, 1260 bp, Halobacterium volcanii; identical to SEQ ID NO: 28201
  CDS (1)..(1260): transl_table=11

SEQ ID NO: 55044 - protein, 419 aa, Halobacterium volcanii; identical to SEQ ID NO: 28202

SEQ ID NO: 55045 - DNA, 1182 bp, Escherichia coli; identical to SEQ ID NO: 28203
  CDS (1)..(1182): transl_table=11

SEQ ID NO: 55046 - protein, 393 aa, Escherichia coli; identical to SEQ ID NO: 28204

SEQ ID NO: 55047 - DNA, 1119 bp, Arabidopsis thaliana; identical to SEQ ID NO: 28205
  CDS (1)..(1119)

SEQ ID NO: 55048 - protein, 372 aa, Arabidopsis thaliana; identical to SEQ ID NO: 28206

SEQ ID NO: 55049 - DNA, 1284 bp, Coxiella burnetii; identical to SEQ ID NO: 28207
  CDS (1)..(1284): transl_table=11

SEQ ID NO: 55050 - protein, 427 aa, Coxiella burnetii; identical to SEQ ID NO: 28208

SEQ ID NO: 55051 - DNA, 1284 bp, Coxiella burnetii; identical to SEQ ID NO: 28209
  CDS (1)..(1284): transl_table=11

SEQ ID NO: 55052 - protein, 427 aa, Coxiella burnetii; identical to SEQ ID NO: 28210

SEQ ID NO: 55053 - DNA, 1284 bp, Coxiella burnetii; identical to SEQ ID NO: 28211
  CDS (1)..(1284): transl_table=11

SEQ ID NO: 55054 - protein, 427 aa, Coxiella burnetii; identical to SEQ ID NO: 28212

SEQ ID NO: 55055 - DNA, 1284 bp, Coxiella burnetii; identical to SEQ ID NO: 28213
  CDS (1)..(1284): transl_table=11

SEQ ID NO: 55056 - protein, 427 aa, Coxiella burnetii; identical to SEQ ID NO: 28214

SEQ ID NO: 55057 - DNA, 1074 bp, Nicotiana tabacum; identical to SEQ ID NO: 28215
  CDS (1)..(1074)

SEQ ID NO: 55058 - protein, 357 aa, Nicotiana tabacum; identical to SEQ ID NO: 28216

SEQ ID NO: 55059 - DNA, 1116 bp, Nicotiana tabacum; identical to SEQ ID NO: 28217
  CDS (1)..(1116)

SEQ ID NO: 55060 - protein, 371 aa, Nicotiana tabacum; identical to SEQ ID NO: 28218

SEQ ID NO: 55061 - DNA, 1044 bp, Methanococcus jannaschii; identical to SEQ ID NO: 28219
  CDS (1)..(1044): transl_table=11

SEQ ID NO: 55062 - protein, 347 aa, Methanococcus jannaschii; identical to SEQ ID NO: 28220

SEQ ID NO: 55063 - DNA, 1167 bp, Ajellomyces capsulata; identical to SEQ ID NO: 28221
  CDS (1)..(1167)

SEQ ID NO: 55064 - protein, 388 aa, Ajellomyces capsulata; identical to SEQ ID NO: 28222

SEQ ID NO: 55065 - DNA, 1248 bp, Colwellia maris; identical to SEQ ID NO: 28223
  CDS (1)..(1248)

SEQ ID NO: 55066 - protein, 415 aa, Colwellia maris; identical to SEQ ID NO: 28224

SEQ ID NO: 55067 - DNA, 1086 bp, Kluyveromyces lactis; identical to SEQ ID NO: 28225
  CDS (1)..(1086)

SEQ ID NO: 55068 - protein, 361 aa, Kluyveromyces lactis; identical to SEQ ID NO: 28226

SEQ ID NO: 55069 - DNA, 1071 bp, Schizosaccharomyces pombe; identical to SEQ ID NO: 28227
  CDS (1)..(1071)

SEQ ID NO: 55070 - protein, 356 aa, Schizosaccharomyces pombe; identical to SEQ ID NO: 28228

SEQ ID NO: 55071 - DNA, 1107 bp, Kluyveromyces lactis; identical to SEQ ID NO: 28229
  CDS (1)..(1107)

SEQ ID NO: 55072 - protein, 368 aa, Kluyveromyces lactis; identical to SEQ ID NO: 28230

SEQ ID NO: 55073 - DNA, 1137 bp, Schizosaccharomyces pombe; identical to SEQ ID NO: 28231
  CDS (1)..(1137)

SEQ ID NO: 55074 - protein, 378 aa, Schizosaccharomyces pombe; identical to SEQ ID NO: 28232

SEQ ID NO: 55075 - DNA, 1110 bp, Saccharomyces cerevisiae; identical to SEQ ID NO: 28233
  CDS (1)..(1110)

SEQ ID NO: 55076 - protein, 369 aa, Saccharomyces cerevisiae; identical to SEQ ID NO: 28234

SEQ ID NO: 55077 - DNA, 1101 bp, Bos taurus; identical to SEQ ID NO: 28235
  CDS (1)..(1101)

SEQ ID NO: 55078 - protein, 366 aa, Bos taurus; identical to SEQ ID NO: 28236

SEQ ID NO: 55079 - DNA, 1077 bp, Caenorhabditis elegans; identical to SEQ ID NO: 28237
  CDS (1)..(1077)

SEQ ID NO: 55080 - protein, 358 aa, Caenorhabditis elegans; identical to SEQ ID NO: 28238

SEQ ID NO: 55081 - DNA, 1134 bp, Drosophila melanogaster; identical to SEQ ID NO: 28239
  CDS (1)..(1134)

SEQ ID NO: 55082 - protein, 377 aa, Drosophila melanogaster; identical to SEQ ID NO: 28240

SEQ ID NO: 55083 - DNA, 1101 bp, Homo sapiens; identical to SEQ ID NO: 28241
  CDS (1)..(1101)

SEQ ID NO: 55084 - protein, 366 aa, Homo sapiens; identical to SEQ ID NO: 28242

SEQ ID NO: 55085 - DNA, 1101 bp, Mus musculus; identical to SEQ ID NO: 28243
  CDS (1)..(1101)

SEQ ID NO: 55086 - protein, 366 aa, Mus musculus; identical to SEQ ID NO: 28244

SEQ ID NO: 55087 - DNA, 1422 bp, Anabaena sp; identical to SEQ ID NO: 28245
  CDS (1)..(1422): transl_table=11

SEQ ID NO: 55088 - protein, 473 aa, Anabaena sp; identical to SEQ ID NO: 28246

SEQ ID NO: 55089 - DNA, 1281 bp, Aquifex aeolicus; identical to SEQ ID NO: 28247
  CDS (1)..(1281): transl_table=11

SEQ ID NO: 55090 - protein, 426 aa, Aquifex aeolicus; identical to SEQ ID NO: 28248

SEQ ID NO: 55091 - DNA, 1239 bp, Archaeoglobus fulgidus; identical to SEQ ID NO: 28249
  CDS (1)..(1239): transl_table=11

SEQ ID NO: 55092 - protein, 412 aa, Archaeoglobus fulgidus; identical to SEQ ID NO: 28250

SEQ ID NO: 55093 - DNA, 1272 bp, Bacillus subtilis; identical to SEQ ID NO: 28251
  CDS (1)..(1272): transl_table=11

SEQ ID NO: 55094 - protein, 423 aa, Bacillus subtilis; identical to SEQ ID NO: 28252

SEQ ID NO: 55095 - DNA, 1290 bp, Caldococcus noboribetus; identical to SEQ ID NO: 28253
  CDS (1)..(1290): transl_table=11

SEQ ID NO: 55096 - protein, 429 aa, Caldococcus noboribetus; identical to SEQ ID NO: 28254

SEQ ID NO: 55097 - DNA, 1278 bp, Helicobacter pylori J99; identical to SEQ ID NO: 28255
  CDS (1)..(1278): transl_table=11

SEQ ID NO: 55098 - protein, 425 aa, Helicobacter pylori J99; identical to SEQ ID NO: 28256

SEQ ID NO: 55099 - DNA, 1278 bp, Helicobacter pylori; identical to SEQ ID NO: 28257
  CDS (1)..(1278): transl_table=11

SEQ ID NO: 55100 - protein, 425 aa, Helicobacter pylori; identical to SEQ ID NO: 28258

SEQ ID NO: 55101 - DNA, 1452 bp, Rickettsia conorii; identical to SEQ ID NO: 28259
  CDS (1)..(1452): transl_table=11

SEQ ID NO: 55102 - protein, 483 aa, Rickettsia conorii; identical to SEQ ID NO: 28260

SEQ ID NO: 55103 - DNA, 1452 bp, Rickettsia prowazekii; identical to SEQ ID NO: 28261
  CDS (1)..(1452): transl_table=11

SEQ ID NO: 55104 - protein, 483 aa, Rickettsia prowazekii; identical to SEQ ID NO: 28262

SEQ ID NO: 55105 - DNA, 1452 bp, Rickettsia typhi; identical to SEQ ID NO: 28263
  CDS (1)..(1452): transl_table=11

SEQ ID NO: 55106 - protein, 483 aa, Rickettsia typhi; identical to SEQ ID NO: 28264

SEQ ID NO: 55107 - DNA, 1269 bp, Staphylococcus aureus; identical to SEQ ID NO: 28265
  CDS (1)..(1269)

SEQ ID NO: 55108 - protein, 422 aa, Staphylococcus aureus; identical to SEQ ID NO: 28266

SEQ ID NO: 55109 - DNA, 1269 bp, Staphylococcus aureus; identical to SEQ ID NO: 28267
  CDS (1)..(1269): transl_table=11

SEQ ID NO: 55110 - protein, 422 aa, Staphylococcus aureus; identical to SEQ ID NO: 28268

SEQ ID NO: 55111 - DNA, 1269 bp, Staphylococcus aureus; identical to SEQ ID NO: 28269
  CDS (1)..(1269): transl_table=11

SEQ ID NO: 55112 - protein, 422 aa, Staphylococcus aureus; identical to SEQ ID NO: 28270

SEQ ID NO: 55113 - DNA, 1269 bp, Staphylococcus epidermidis; identical to SEQ ID NO: 28271
  CDS (1)..(1269): transl_table=11

SEQ ID NO: 55114 - protein, 422 aa, Staphylococcus epidermidis; identical to SEQ ID NO: 28272

SEQ ID NO: 55115 - DNA, 1182 bp, Streptococcus mutans; identical to SEQ ID NO: 28273
  CDS (1)..(1182): transl_table=11

SEQ ID NO: 55116 - protein, 393 aa, Streptococcus mutans; identical to SEQ ID NO: 28274

SEQ ID NO: 55117 - DNA, 1176 bp, Streptococcus salivarius; identical to SEQ ID NO: 28275
  CDS (1)..(1176): transl_table=11

SEQ ID NO: 55118 - protein, 391 aa, Streptococcus salivarius; identical to SEQ ID NO: 28276

SEQ ID NO: 55119 - DNA, 1428 bp, Synechocystis sp; identical to SEQ ID NO: 28277
  CDS (1)..(1428): transl_table=11

SEQ ID NO: 55120 - protein, 475 aa, Synechocystis sp; identical to SEQ ID NO: 28278

SEQ ID NO: 55121 - DNA, 1491 bp, Thermus thermophilus; identical to SEQ ID NO: 28279
  CDS (1)..(1491): transl_table=11

SEQ ID NO: 55122 - protein, 496 aa, Thermus thermophilus; identical to SEQ ID NO: 28280

SEQ ID NO: 55123 - DNA, 981 bp, Archaeoglobus fulgidus; identical to SEQ ID NO: 28281
  CDS (1)..(981): transl_table=11

SEQ ID NO: 55124 - protein, 326 aa, Archaeoglobus fulgidus; identical to SEQ ID NO: 28282

SEQ ID NO: 55125 - DNA, 1002 bp, Methanococcus jannaschii; identical to SEQ ID NO: 28283
  CDS (1)..(1002): transl_table=11

SEQ ID NO: 55126 - protein, 333 aa, Methanococcus jannaschii; identical to SEQ ID NO: 28284

SEQ ID NO: 55127 - DNA, 990 bp, Methanobacterium thermoautotrophicum; identical to SEQ ID NO: 28285
  CDS (1)..(990): transl_table=11

SEQ ID NO: 55128 - protein, 329 aa, Methanobacterium thermoautotrophicum; identical to SEQ ID NO: 28286

SEQ ID NO: 55129 - DNA, 1074 bp, Solanum tuberosum; identical to SEQ ID NO: 28287
  CDS (1)..(1074)

SEQ ID NO: 55130 - protein, 357 aa, Solanum tuberosum; identical to SEQ ID NO: 28288

SEQ ID NO: 55131 - DNA, 25 bp, Artificial sequence
  Primer sequence
atggaaagtaaagtagttgttccgg

SEQ ID NO: 55132 - DNA, 24 bp, Artificial sequence
  Primer sequence
ttacatgttttcgatgatcgcgtc

SEQ ID NO: 55133 - protein, 481 aa, Artificial sequence; identical to SEQ ID NO: 28291
  Consensus
  Variant (2)..(3): Xaa in position 2 to 3 is any amino acid
  Variant (5)..(5): Xaa in position 5 is any amino acid
  Variant (11)..(11): Xaa in position 11 is any amino acid
  Variant (14)..(19): Xaa in position 14 to 19 is any amino acid
  Variant (21)..(23): Xaa in position 21 to 23 is any amino acid
  Variant (25)..(26): Xaa in position 25 to 26 is any amino acid
  Variant (27)..(34): Xaa in position 27 to 34 is any or no amino acid
  Variant (36)..(36): Xaa in position 36 is any or no amino acid
  Variant (38)..(38): Xaa in position 38 is any amino acid
  Variant (39)..(42): Xaa in position 39 to 42 is any or no amino acid
  Variant (44)..(52): Xaa in position 44 to 52 is any amino acid
  Variant (53)..(62): Xaa in position 53 to 62 is any or no amino acid
  Variant (65)..(65): Xaa in position 65 is any amino acid
  Variant (66)..(67): Xaa in position 66 to 67 is any or no amino acid
  Variant (69)..(70): Xaa in position 69 to 70 is any amino acid
  Variant (72)..(75): Xaa in position 72 to 75 is any amino acid
  Variant (77)..(77): Xaa in position 77 is any amino acid
  Variant (83)..(83): Xaa in position 83 is any amino acid
  Variant (88)..(93): Xaa in position 88 to 93 is any or no amino acid
  Variant (95)..(96): Xaa in position 95 to 96 is any or no amino acid
  Variant (101)..(101): Xaa in position 101 is any amino acid
  Variant (104)..(107): Xaa in position 104 to 107 is any amino acid
  Variant (110)..(111): Xaa in position 110 to 111 is any amino acid
  Variant (115)..(118): Xaa in position 115 to 118 is any amino acid
  Variant (119)..(119): Xaa in position 119 is any or no amino acid
  Variant (121)..(122): Xaa in position 121 to 122 is any or no amino acid
  Variant (124)..(125): Xaa in position 124 to 125 is any amino acid
  Variant (126)..(139): Xaa in position 126 to 139 is any or no amino acid
  Variant (143)..(143): Xaa in position 143 is any amino acid
  Variant (149)..(150): Xaa in position 149 to 150 is any amino acid
  Variant (152)..(152): Xaa in position 152 is any amino acid
  Variant (156)..(164): Xaa in position 156 to 164 is any amino acid
  Variant (165)..(193): Xaa in position 165 to 193 is any or no amino acid
  Variant (196)..(196): Xaa in position 196 is any or no amino acid
  Variant (199)..(200): Xaa in position 199 to 200 is any amino acid
  Variant (203)..(203): Xaa in position 203 is any amino acid
  Variant (206)..(208): Xaa in position 206 to 208 is any amino acid
  Variant (210)..(211): Xaa in position 210 to 211 is any amino acid
  Variant (214)..(216): Xaa in position 214 to 216 is any amino acid
  Variant (217)..(221): Xaa in position 217 to 221 is any or no amino acid
  Variant (223)..(224): Xaa in position 223 to 224 is any amino acid
  Variant (227)..(227): Xaa in position 227 is any amino acid
  Variant (236)..(236): Xaa in position 236 is any amino acid
  Variant (240)..(240): Xaa in position 240 is any amino acid
  Variant (242)..(247): Xaa in position 242 to 247 is any amino acid
  Variant (250)..(251): Xaa in position 250 to 251 is any amino acid
  Variant (252)..(322): Xaa in position 252 to 322 is any or no amino acid
  Variant (324)..(326): Xaa in position 324 to 326 is any or no amino acid
  Variant (328)..(328): Xaa in position 328 is any amino acid
  Variant (330)..(330): Xaa in position 330 is any amino acid
  Variant (332)..(336): Xaa in position 332 to 336 is any amino acid
  Variant (339)..(340): Xaa in position 339 to 340 is any amino acid
  Variant (342)..(343): Xaa in position 342 to 343 is any amino acid
  Variant (345)..(345): Xaa in position 345 is any amino acid
  Variant (346)..(347): Xaa in position 346 to 347 is any or no amino acid
  Variant (350)..(352): Xaa in position 350 to 352 is any amino acid
  Variant (355)..(355): Xaa in position 355 is any amino acid
  Variant (358)..(358): Xaa in position 358 is any amino acid
  Variant (362)..(363): Xaa in position 362 to 363 is any amino acid
  Variant (366)..(366): Xaa in position 366 is any amino acid
  Variant (367)..(367): Xaa in position 367 is any or no amino acid
  Variant (374)..(374): Xaa in position 374 is any amino acid
  Variant (376)..(376): Xaa in position 376 is any amino acid
  Variant (380)..(383): Xaa in position 380 to 383 is any amino acid
  Variant (384)..(387): Xaa in position 384 to 387 is any or no amino acid
  Variant (393)..(393): Xaa in position 393 is any amino acid
  Variant (399)..(400): Xaa in position 399 to 400 is any amino acid
  Variant (403)..(406): Xaa in position 403 to 406 is any amino acid
  Variant (409)..(409): Xaa in position 409 is any amino acid
  Variant (416)..(416): Xaa in position 416 is any amino acid
  Variant (420)..(420): Xaa in position 420 is any amino acid
  Variant (421)..(421): Xaa in position 421 is any or no amino acid
  Variant (424)..(428): Xaa in position 424 to 428 is any amino acid
  Variant (430)..(431): Xaa in position 430 to 431 is any amino acid
  Variant (433)..(434): Xaa in position 433 to 434 is any amino acid
  Variant (437)..(439): Xaa in position 437 to 439 is any amino acid
  Variant (441)..(445): Xaa in position 441 to 445 is any amino acid
  Variant (446)..(447): Xaa in position 446 to 447 is any or no amino acid
  Variant (449)..(449): Xaa in position 449 is any amino acid
  Variant (451)..(459): Xaa in position 451 to 459 is any amino acid
  Variant (460)..(472): Xaa in position 460 to 472 is any or no amino acid
  Variant (474)..(476): Xaa in position 474 to 476 is any amino acid
  Variant (478)..(480): Xaa in position 478 to 480 is any amino acid

SEQ ID NO: 55134 - protein, 7 aa, Artificial sequence
  Consensus
  Variant (2)..(2): Xaa in position 2 is any amino acid
  Variant (6)..(6): Xaa in position 6 is any amino acid
IXGDGXG

SEQ ID NO: 55135 - protein, 30 aa, Artificial sequence; identical to SEQ ID NO: 28293
  Consensus
  Variant (2)..(2): Xaa in position 2 is any amino acid
  Variant (3)..(3): Xaa in position 3 is any or no amino acid
  Variant (5)..(5): Xaa in position 5 is any or no amino acid
  Variant (7)..(7): Xaa in position 7 is any amino acid
  Variant (8)..(8): Xaa in position 8 is Ala, Gly or Ser
  Variant (9)..(9): Xaa in position 9 is any amino acid
  Variant (11)..(12): Xaa in position 11 to 12 is any amino acid
  Variant (14)..(14): Xaa in position 14 is Ile, Leu, Met or Val
  Variant (16)..(16): Xaa in position 16 is Leu or Val
  Variant (17)..(17): Xaa in position 17 is any amino acid
  Variant (18)..(18): Xaa in position 18 is Ile, Leu, Met or Val
  Variant (20)..(23): Xaa in position 20 to 23 is any amino acid
  Variant (25)..(25): Xaa in position 25 is Phe or Tyr
  Variant (26)..(26): Xaa in position 26 is any amino acid
  Variant (27)..(27): Xaa in position 27 is Cys or Asn
  Variant (28)..(28): Xaa in position 28 is any amino acid

SEQ ID NO: 55136 - protein, 12 aa, Artificial sequence
  Consensus
  Variant (4)..(4): Xaa in position 4 is Glu, Ser or Thr
  Variant (6)..(6): Xaa in position 6 is Asp or Gly
  Variant (7)..(7): Xaa in position 7 is any amino acid
  Variant (9)..(9): Xaa in position 9 is any amino acid
  Variant (11)..(11): Xaa in position 11 is Ile, Leu or Val
RENXEXXYXGXE

SEQ ID NO: 55137 - protein, 35 aa, Artificial sequence; identical to SEQ ID NO: 28295
  Consensus
  Variant (2)..(5): Xaa in position 2 to 5 is any amino acid
  Variant (6)..(6): Xaa in position 6 is any or no amino acid
  Variant (8)..(15): Xaa in position 8 to 15 is any amino acid
  Variant (16)..(19): Xaa in position 16 to 19 is any or no amino acid
  Variant (21)..(23): Xaa in position 21 to 23 is any amino acid
  Variant (25)..(25): Xaa in position 25 is Ala, Asp or Gly
  Variant (27)..(27): Xaa in position 27 is Ile or Val
  Variant (28)..(28): Xaa in position 28 is any amino acid
  Variant (29)..(29): Xaa in position 29 is Lys or Arg
  Variant (30)..(30): Xaa in position 30 is any amino acid
  Variant (31)..(31): Xaa in position 31 is Ala, Ser or Thr
  Variant (32)..(32): Xaa in position 32 is any amino acid
  Variant (34)..(34): Xaa in position 34 is any amino acid

SEQ ID NO: 55138 - protein, 31 aa, Artificial sequence; identical to SEQ ID NO: 28296
  Consensus
  Variant (2)..(3): Xaa in position 2 to 3 is any amino acid
  Variant (4)..(5): Xaa in position 4 to 5 is any or no amino acid
  Variant (8)..(8): Xaa in position 8 is any amino acid
  Variant (11)..(12): Xaa in position 11 to 12 is any amino acid
  Variant (15)..(20): Xaa in position 15 to 20 is any amino acid
  Variant (21)..(21): Xaa in position 21 is any or no amino acid
  Variant (23)..(23): Xaa in position 23 is Gly or Ser
  Variant (24)..(24): Xaa in position 24 is Ile, Leu, Pro or Val
  Variant (26)..(26): Xaa in position 26 is Phe, Ile, Leu, Met or Val
  Variant (27)..(27): Xaa in position 27 is any amino acid
  Variant (28)..(28): Xaa in position 28 is Ala, Gly or Pro
  Variant (29)..(29): Xaa in position 29 is Gly or Ser
  Variant (30)..(30): Xaa in position 30 is any amino acid
  Variant (31)..(31): Xaa in position 31 is Asp or Asn

SEQ ID NO: 55139 - protein, 29 aa, Artificial sequence
  Consensus
  Variant (2)..(2): Xaa in position 2 is Ala, Pro or Ser
  Variant (3)..(3): Xaa in position 3 is any amino acid
  Variant (6)..(6): Xaa in position 6 is Ser or Thr
  Variant (9)..(10): Xaa in position 9 to 10 is any amino acid
  Variant (13)..(13): Xaa in position 13 is any amino acid
  Variant (14)..(14): Xaa in position 14 is Ala, Asp, Gly or Asn
  Variant (15)..(16): Xaa in position 15 to 16 is any amino acid
  Variant (19)..(20): Xaa in position 19 to 20 is any amino acid
  Variant (21)..(22): Xaa in position 21 to 22 is any or no amino acid
  Variant (24)..(28): Xaa in position 24 to 28 is any amino acid
  Variant (29)..(29): Xaa in position 29 is Phe, Ile, Leu or Met
EXXHGXAPXXAGXXXXNPXXXXLXXXXXX

SEQ ID NO: 55140 - DNA, 951 bp, Escherichia coli
  CDS (1)..(951)
atgagtaaacttgatacttttatccaacatgctgtaaacgctgttccggtcagtggcacatctttgatctcctctctgtatggtgattcgctttcccatcgtggtggtgaaatctggttgggtagtctggctgctttgctggaagggctgggatttggtgagcgtttcgtgcgcaccgctttgtttcgtcttaataaagaaggctggctggatgtttcccgcatcgggcgacgcagtttctatagcctcagtgataaaggcttgcgcctgacgcgacgggcagaaagtaaaatttatcgcgcagagcaacctgcatgggatggtaaatggctcctgttgctctcggaaggtttagataaatcaacgctggctgatgtcaaaaagcagttgatctggcaaggttttggcgcactggcacccagcctgatggcatcgccgtcgcaaaaactggccgatgtacagacacttttgcatgaagcgggtgtggcggataacgtgatttgttttgaagcgcaaataccactggcgctttctcgcgcagcactgcgtgccagagtagaagagtgctggcatttaactgaacaaaatgccatgtacgaaacctttattcagtcattccgcccgctggtgccgcttttaaaagaggcggcagacgagttaaccccggagcgggcatttcatattcagcttttactgatccatttttatcgccgtgtcgtccttaaagacccattgttgccggaggagttgcttccggcacactgggcagggcatacggcgcgtcagctgtgtatcaacatttatcagcgcgtagcgcctgctgctttagcgttcgttagtgaaaaaggtgaaacctcggtcggtgaactgcctgcgccgggaagcctgtattttcaacgttttggcggcttgaatattgaacaggaggcgttatgccaatttatcagatag

SEQ ID NO: 55141 - protein, 316 aa, Escherichia coli
MSKLDTFIQHAVNAVPVSGTSLISSLYGDSLSHRGGEIWLGSLAALLEGLGFGERFVRTALFRLNKEGWLDVSRIGRRSFYSLSDKGLRLTRRAESKIYRAEQPAWDGKWLLLLSEGLDKSTLADVKKQLIWQGFGALAPSLMASPSQKLADVQTLLHEAGVADNVICFEAQIPLALSRAALRARVEECWHLTEQNAMYETFIQSFRPLVPLLKEAADELTPERAFHIQLLLIHFYRRVVLKDPLLPEELLPAHWAGHTARQLCINIYQRVAPAALAFVSEKGETSVGELPAPGSLYFQRFGGLNIEQEALCQFIR

SEQ ID NO: 55142 - DNA, 897 bp, Bacillus halodurans C-125
  CDS (1)..(897): transl_table=11
ttggagaatcaaccaaatactcgttcaatgatttttacgttatacggagattatattcgtcactatggaaatgtgatatggattggtagcttaattcgttttttgcaggagttcggccataacgagcaatccgttcgtgcagcggtttcacgaatgagcaagcaaggttggattcagtcggaaaaaaaagggaacaaaagctactattccctcaccgatcagggccgaaaacgaatggctgaagccgcacaacggatttacaaactagaagccccctcttgggacgaaaagtggcgtttgttgatttactcaatcccggaggaaaaacgaagcttacgggatgaactgcggaaagagctcgtttggagtggttttggacttttagcgaatagttgctggattaccccgaacccattggaagaacaagttgaaacactgatcgaaaaatatgagatttccccctacgtccattttttctgcgcggactacagaggcatgggtgaaccaaaaacgttgatcgaaaagtgttgggatctagatgaaattaatgaaaagtatttagcttttatccaaaagtacagccagaaatatgtgattgataagaacaaaattgaaaaaggagaaatgagtgatggggcctgctttgttgagcggacattgctcgtccacgaatatcgtaaattcctttttattgatccgggtcttccgcaagagctcttacctgaaaaatggttaggtgattcagctgcccatctgtttgccgattattatcgcacccttgccgaaccggcgagacgcttttttgaatctgtctttgcagagggcaactctctagtaaaaaaggataaggaatacaatttccttgaccatccgtttatgtccgaaagccaatcatag

SEQ ID NO: 55143 - protein, 298 aa, Bacillus halodurans C-125
MENQPNTRSMIFTLYGDYIRHYGNVIWIGSLIRFLQEFGHNEQSVRAAVSRMSKQGWIQSEKKGNKSYYSLTDQGRKRMAEAAQRIYKLEAPSWDEKWRLLIYSIPEEKRSLRDELRKELVWSGFGLLANSCWITPNPLEEQVETLIEKYEISPYVHFFCADYRGMGEPKTLIEKCWDLDEINEKYLAFIQKYSQKYVIDKNKIEKGEMSDGACFVERTLLVHEYRKFLFIDPGLPQELLPEKWLGDSAAHLFADYYRTLAEPARRFFESVFAEGNSLVKKDKEYNFLDHPFMSESQS

SEQ ID NO: 55144 - DNA, 801 bp, Sulfolobus solfataricus P2
  CDS (1)..(801): transl_table=11
atgaagatacaatcgttattctttacattgtatggagattacataaaagatgcgggaggaacgataagttccaaaagcttgattattattcttaaagaatttggtttttcagaaggtgcgattagagctggtttacacagaatgaagaaagccggtttaatagtctctgaaaggggaaaagataagaaaataagatataaattgtctgaaaaagggctgttgagattactagaaggaactaggagagtctatgaaaagactagaagaagatgggatggcaaatggaggatagtagtgtataacattccagaaaataacagggaggtaagagatagattgaggagagagctaaaatggttaggatttggaatgctagctcagtcaacatggatatcaccaaatcctattgaagatacgttaaggaaatttatcaatgatctctacaactcgaccaatagcgtgaaggtagacatttttgtggcagattatttagatcaacctaatcatttggtagaaagatgttggaatttagttgaagtcgaacaagcttacaagtcttttttagaagaatggtctccaatgcttaaaaaggtcaactccatgaaaagtaatgaagcgtttgtaactaggatagaattagtccatgaatatagaaaatttctaaatatagaccctgatttaccagaagatttattgccccagaattggataggttataaggcatatgacctcttcatgaaactgagagaggaattaacaccaaaggcaaatgagttcttttacaaggtgtatgagccataa

SEQ ID NO: 55145 - protein, 266 aa, Sulfolobus solfataricus P2
MKIQSLFFTLYGDYIKDAGGTISSKSLIIILKEFGFSEGAIRAGLHRMKKAGLIVSERGKDKKIRYKLSEKGLLRLLEGTRRVYEKTRRRWDGKWRIVVYNIPENNREVRDRLRRELKWLGFGMLAQSTWISPNPIEDTLRKFINDLYNSTNSVKVDIFVADYLDQPNHLVERCWNLVEVEQAYKSFLEEWSPMLKKVNSMKSNEAFVTRIELVHEYRKFLNIDPDLPEDLLPQNWIGYKAYDLFMKLREELTPKANEFFYKVYEP

SEQ ID NO: 55146 - DNA, 801 bp, Sulfolobus solfataricus P2
  CDS (1)..(801): transl_table=11
atgaagatacagtcattgttctttacactctatggagattatgtgaaggattctggaggaacgataagttctaaaagtctaatcgtaatctttaaggaatttggattttccgaaggagcaataagggcaggattacatagaatgaagaaagcaggacttatagtaggaataaaaggagaaaataggaaagttagctacaaattatcagaaaaaggtatgctaagattattggaaggaactaggagggtttatgaaaaagttaggagaagatgggataataagtggaggatagtagtatataatatcccagagaacaatagagaactaagagataagttaaggagagagctgaagtggcttggatttggtatgttagcgcaatcgacgtggatctcaccaaacccaattgaagataccttaaagaatttcattaacgatcactatggttcatctaatggtatacaagtagacattttcgttgcaaattatctaggagaacctaagggactagtagaaaaatgttggaatttatctgaagttgaacaagcttatagagcgttcttagaaaaatggactggagtactagaaaaggtaagtagtctaaaaagtaatgaggcgttcgtaactaggatactacttgtccacgaatatagaaaatttttaaacattgatccagatttacctgaggatttattacctccaaattggatagggtatacagcatatgatctatttatgaaattaagggaggaacttactcctaaggctaacgagttcttttataaggtttatgaaccatga

SEQ ID NO: 55147 - protein, 266 aa, Sulfolobus solfataricus P2
MKIQSLFFTLYGDYVKDSGGTISSKSLIVIFKEFGFSEGAIRAGLHRMKKAGLIVGIKGENRKVSYKLSEKGMLRLLEGTRRVYEKVRRRWDNKWRIVVYNIPENNRELRDKLRRELKWLGFGMLAQSTWISPNPIEDTLKNFINDHYGSSNGIQVDIFVANYLGEPKGLVEKCWNLSEVEQAYRAFLEKWTGVLEKVSSLKSNEAFVTRILLVHEYRKFLNIDPDLPEDLLPPNWIGYTAYDLFMKLREELTPKANEFFYKVYEP

SEQ ID NO: 55148 - DNA, 921 bp, Sinorhizobium meliloti 1021
  CDS (1)..(921): transl_table=11
atgcaggcgaatggcgaaaattcggcagagcagggctcgaggatcatccggccaattttggatgaaacgccgctcagggccgcaagctttatcgtcaccatctacggcgacgtggtggagccgcgcggcggcgcgatctggatcggcaacctgatcgagatctgcgcgggcgtcggtatcagcgagacgcttgtgagaaccgccgtgtcccgtctcgtcgccgccggccagctcgccggagagcgggagggacggcgcagcttctatcggctgacggatgccgcacgcgcggaattcgccgcggcggcgcgggtgatcttcggaccgccggaggaagcgagctggcacttcgtgcagctgatgggttcgtcggccgaggagcggatgcagatgctcgagcgctccggccatgcgcggctgggcccccggctcgcggtcggcgtgcggccgttcccgagcgcgatcatgcccgccgtggtcttccgcgcggagcctgcccagggtgcgagcgagttgaaggcctttgcctcgggctgttgggacctcggacctcacgcgcaggcataccggcggtttctcgcctgcttcggcaagctcgccgttcttccggataccgctagggcgattgctcccgccgagtgcctttctgcacgcctcctcatggtacaccagttccgcttcgttacgctccgcgagccgcgcctgccggccgagattctgcccgctgattggccaggcgacgaagcccgccgcctgtttgcccggctgtaccgcagcctgtctccccaggcggacctgcatgtcgcgcggaactgcgtcacgcttacgggtccgctgccgaaggcgaccggggcgacggagcatcggcttcgaatgctgtgcggtgaagctgcgcctgggaaatccggcaaccccgtttaa

SEQ ID NO: 55149 - protein, 306 aa, Sinorhizobium meliloti 1021
MQANGENSAEQGSRIIRPILDETPLRAASFIVTIYGDVVEPRGGAIWIGNLIEICAGVGISETLVRTAVSRLVAAGQLAGEREGRRSFYRLTDAARAEFAAAARVIFGPPEEASWHFVQLMGSSAEERMQMLERSGHARLGPRLAVGVRPFPSAIMPAVVFRAEPAQGASELKAFASGCWDLGPHAQAYRRFLACFGKLAVLPDTARAIAPAECLSARLLMVHQFRFVTLREPRLPAEILPADWPGDEARRLFARLYRSLSPQADLHVARNCVTLTGPLPKATGATEHRLRMLCGEAAPGKSGNPV

SEQ ID NO: 55150 - DNA, 846 bp, Streptomyces coelicolor A3(2)
  CDS (1)..(846): transl_table=11
atgatcaacgtgtccgacctgcacctacagcccgctccgaggtccctcatcgtcacgctctacggcgcgtacggccgctgcgcgccgggcccggtgcccgtcgccgaactgatccggctgctggccgcggtcggggtggacgcgccctccgtgcgttcgtcggtgtcccggctgaaacggcgcgggctgctgctgcccgcccgtacggccgccggcgcggcggggtacgaactctccgccgaggcccgccagttgctcgacgacggggaccggcgcgtctacgccaccgcgccccacggggacgagggctgggtgctcgccgtgttctccgtgcccgagtcggagcggcagaagcggcacgtcctgcgttcgcgcctggccggtctcggcttcggcaccgcggcgcccggtgtgtggatcgccccggcccggctgtacgcggagacccggcacaccctgggccgcctcggtctggactcctacgtggacttcttccgcggtgagcacctgggcttcacggccaccgccgaggcggtggcccgctggtgggacctggccgcgatcgccaaggagcacgaggccttcctcgaccgccacgagcgcgtcctgcacgactgggagcgccgggcggacacgccgcccgaggaggcctaccgcgactacctcctcgccctggactcctggcgccacctgccctacacggaccccgggctgcccgcccggctgctgcccgagggctggcccggcacgcgctcggcggccgtcttccgggcgctgcacgagcggctgcgcgacgcgggcgcccagtacgcggccatgggaccgactccgcctcccgggcagtga

SEQ ID NO: 55151 - protein, 281 aa, Streptomyces coelicolor A3(2)
MINVSDLHLQPAPRSLIVTLYGAYGRCAPGPVPVAELIRLLAAVGVDAPSVRSSVSRLKRRGLLLPARTAAGAAGYELSAEARQLLDDGDRRVYATAPHGDEGWVLAVFSVPESERQKRHVLRSRLAGLGFGTAAPGVWIAPARLYAETRHTLGRLGLDSYVDFFRGEHLGFTATAEAVARWWDLAAIAKEHEAFLDRHERVLHDWERRADTPPEEAYRDYLLALDSWRHLPYTDPGLPARLLPEGWPGTRSAAVFRALHERLRDAGAQYAAMGPTPPPGQ

SEQ ID NO: 55152 - DNA, 924 bp, Pseudomonas putida KT2440
  CDS (1)..(924): transl_table=11
atgagcaatctcgcaccactgaaccacttgatcacccgctttcaggagcagacgccaatccgcgccagttccctgatcatcacgttgtacggcgatgccatcgagccgcacggcggtacagtctggctcggtagcctgatcaacctgctggagccgatcggcatcaatgaacggctgatacgcacgtcgatctttcgcctgaccaaagaaggttggctcactgcagaaaaggtgggccgacgcagttattacagcctgacaggcactggccgtcggcgtttcgaaaaagccttcaagcgcgtctatagcccgagccagccagcctgggacggggcctggacactggtgttgctgtcgcaactcgaggcgggtaaacgcaaggccgtgcgtgaggagctagagtggcaggggtttggtgtcatggcgccgaacctgctgggttgcccacgggcagaccgtgccgacctggtggccacgttgcatgatcttgaggcgggcgacgacagtatcgtcttcgaaacccacacccaagaggtactcgcgtccaaggcgatgcgcgcccaggtgcgggaaagctggcgtatcgacgaactggggcagcaatacagcgagtttatccaactgttcaggccgctgtggcaaggtttgaaagagcagccgttgctggatgcccaagattgcttccttgcgcgcacgctgctgattcacgagtaccgccgcctgctgctgcgcgacccgcaactacccgacgagctgctgccaggggactgggagggaagggctgcgcgacagttgtgccgtaacctctaccgactggtgtttgccaaagccgaagaatggttgaatgcagcgctggaaacagcagatggcccattgccggacgtgagcgagagtttttacaagcgttttggcgggttggcttga

SEQ ID NO: 55153 - protein, 307 aa, Pseudomonas putida KT2440
MSNLAPLNHLITRFQEQTPIRASSLIITLYGDAIEPHGGTVWLGSLINLLEPIGINERLIRTSIFRLTKEGWLTAEKVGRRSYYSLTGTGRRRFEKAFKRVYSPSQPAWDGAWTLVLLSQLEAGKRKAVREELEWQGFGVMAPNLLGCPRADRADLVATLHDLEAGDDSIVFETHTQEVLASKAMRAQVRESWRIDELGQQYSEFIQLFRPLWQGLKEQPLLDAQDCFLARTLLIHEYRRLLLRDPQLPDELLPGDWEGRAARQLCRNLYRLVFAKAEEWLNAALETADGPLPDVSESFYKRFGGLA

SEQ ID NO: 55154 - DNA, 864 bp, Bradyrhizobium japonicum USDA 110
  CDS (1)..(864): transl_table=11
atggcgcatccgctctcccgcatcatcgaccagctcaagcgcgaaccgtcgcgcaccggctccatcgtcatcaccgtgttcggcgacgccatcgtgccgcgcgggggctcggtgtggctcggcacgctgctggaattcttcgagagcctggacatcgacagcggggtggtgcgcaccgcgatgtcgcgcctggcggctgacggctggctgacgcgtgaaaaggtcggccgcaacagtttctatcgtctcgccgacaagggccaccagaccttcgaggccgcgacgcgccacatctacgatccgccgccgtcggactggaccgggcgtttcgagctgctgctgatcaatggcgaggaccgcgacgcctcgcgcgaggcgctgcgcaatgccggcttcggcagtccgctgcccggcgtgtgggttgcgccgtcgggcgtgccggtgccggatgaggctgcgggcgctatccgtctcgaggtctccgcggaggacgacagcgggcgccgcctgctcagcgcaagctggccgctcgatcgcaccgcggatgcctatctgaagttcatgaagacgttcgagccgctgcgcaccgcgatcggccgcggaacgactctctccgacgccgacgccttcaccgcgcggatcctgctgatccaccactatcgccgcgtcgtgctgcgcgatccgctgctgcccgagagcctgctgcctgcggattggccgggcagggccgcccgcgaactctgcggcgagatctatcgcgcgctgcttgctccgtccgaacaatggcttgatggccatggaaccaatgaaaaagggccattgccggcggcgcgaaaactcctggaacggaggttcggcgcctga

SEQ ID NO: 55155 - protein, 287 aa, Bradyrhizobium japonicum USDA 110
MAHPLSRIIDQLKREPSRTGSIVITVFGDAIVPRGGSVWLGTLLEFFESLDIDSGVVRTAMSRLAADGWLTREKVGRNSFYRLADKGHQTFEAATRHIYDPPPSDWTGRFELLLINGEDRDASREALRNAGFGSPLPGVWVAPSGVPVPDEAAGAIRLEVSAEDDSGRRLLSASWPLDRTADAYLKFMKTFEPLRTAIGRGTTLSDADAFTARILLIHHYRRVVLRDPLLPESLLPADWPGRAARELCGEIYRALLAPSEQWLDGHGTNEKGPLPAARKLLERRFGA

SEQ ID NO: 55156 - DNA, 843 bp, Streptomyces avermitilis MA-4680
  CDS (1)..(843): transl_table=11
gtgatcaacgtgtccgatcagcacgctccccggtccctcatcgtcacgttctacggcgcgtacggccgcttcttccccggcccggtgccggtggcggagctgatccggctgctcgccgccgtcggcgtcgacgcgccctccgtcagatcgtcggtgtcccggctgaagcggcgcggcctgctggtgccggcccgcacggcggccggcgcggccgggtacgcgctgtcgccggacgcccgccaactgctcgacgacggcgacctgcgcgtgtacgcgaccactcccccacgggacgagggctgggtgctcgcggtgttctccgtgccggagtcggaacggcagaagcggcatgtactgcgctcgcgcctggccgggctcggcttcgggacggcggcccccggggtgtggatcgccccggcgcggctgtacgaggagacccggcacaccctggggcggctgcgcctcgacccgtacgtcgacttcttccgcggcgagcacctgggcttcgccgcgaccttcgaggccgtcgcgcgctggtgggacctggccgcgatcgccaagcagcacgaggagttcctcgaccgccacgcgcgcgtgctgcacgactgggaggcacgcgaggacaccgagcccgaggaggcgtaccgcgactatctgctcgccctggactcctggcgccacctcccgtacgccgatcccggcctgcccgccgcactgcttcccgaggactggccgggcgcccgctcggccgccgtcttccgggcactgcacgagcggctgcgcgatgcgggagcggccttcgcggctgggacggagacactcgaccccgccggtgaaacgtga

SEQ ID NO: 55157 - protein, 280 aa, Streptomyces avermitilis MA-4680
MINVSDQHAPRSLIVTFYGAYGRFFPGPVPVAELIRLLAAVGVDAPSVRSSVSRLKRRGLLVPARTAAGAAGYALSPDARQLLDDGDLRVYATTPPRDEGWVLAVFSVPESERQKRHVLRSRLAGLGFGTAAPGVWIAPARLYEETRHTLGRLRLDPYVDFFRGEHLGFAATFEAVARWWDLAAIAKQHEEFLDRHARVLHDWEAREDTEPEEAYRDYLLALDSWRHLPYADPGLPAALLPEDWPGARSAAVFRALHERLRDAGAAFAAGTETLDPAGET

SEQ ID NO: 55158 - DNA, 930 bp, Bordetella pertussis Tohama I
  CDS (1)..(930): transl_table=11
atggcaagcactccgtcaccgctggaccgctttctctcccgtctgctgaaaaacgatccgccccgcgccaaatcgctgtgcgtcagcctgctgggcgacgcgctggcgccgcacggcggcgccatctggctgggcgacctgatcgagctgctggcccctatcggcatcaacgaacgcctgctacgcaccagcgtgttcaggctggtcgcgcagggctggctgcaatccgagcgccatggacggcgcagcctgtatctgttgtcggaacacggcctgcgccacaccgcgcacgcctcgcagcgcatctatgacgggccggcgcgcgcctggaacggcgaatggacactggtggcgctgccgcgcgccggcaacaatggcctggccgagcggggcgagctgcgccgcgaactgctctgggaagggttcggcatggtggccccgggcctgttcgcccacccgcagaccgaagcgcgcgccgcgcacgatatcctcgaaaagctgggtatccccgacaaggccctggtgctgtcggcgcgcgaccaggccggcgccggcggcctgccgatcgccagcctggcgggacaatgctggaatctcgatgaggtggcggaccaataccgcctgttctcgcgcaatttcggcccggtggaaaaactgctggatccgccccccacccccgcgcaggccttcgcggtgcgggtgctgttgctgcacaactggcagcgcatcgtgctgcacgatccgcagctgcccacccccatggaaccggacggctggcccggcaacgcggcccgcgcactgtgccggcgcatctactggcaagtcttcgacgcctcggaacgccacctggatgccgtggccggccgcgagaacgcgcgctatcggccggcccaggccgacatcatgggccgcttcggcgggcggccgtag

SEQ ID NO: 55159 - protein, 309 aa, Bordetella pertussis Tohama I
MASTPSPLDRFLSRLLKNDPPRAKSLCVSLLGDALAPHGGAIWLGDLIELLAPIGINERLLRTSVFRLVAQGWLQSERHGRRSLYLLSEHGLRHTAHASQRIYDGPARAWNGEWTLVALPRAGNNGLAERGELRRELLWEGFGMVAPGLFAHPQTEARAAHDILEKLGIPDKALVLSARDQAGAGGLPIASLAGQCWNLDEVADQYRLFSRNFGPVEKLLDPPPTPAQAFAVRVLLLHNWQRIVLHDPQLPTPMEPDGWPGNAARALCRRIYWQVFDASERHLDAVAGRENARYRPAQADIMGRFGGRP

SEQ ID NO: 55160 - DNA, 930 bp, Bordetella bronchiseptica RB50
  CDS (1)..(930): transl_table=11
atggcaagcactccgtcaccgctggaccgctttctctcccgtctgctgaaaaacgatccgccccgcgccaaatcgctgtgcgtcagcctgctgggcgacgcgctggcgccgcacggcggcgccatctggctgggcgacctgatcgagctgctggcccctatcggcatcaacgaacgcctgctgcgcaccagcgtgttcaggctggtcgcgcagggctggctgcaatccgagcgccatggacggcgcagcctgtatctgttgtcggaacacggcctgcgccacaccgcgcacgcctcgcagcgcatctatgacgggccggcgcgcgcctggaacggcgaatggacactggtggcgctgccgcgcgccggcaacaatggcctggccgagcggggcgagctgcgccgcgaactgctctgggaagggttcggcatggtggccccgggcctgttcgcccacccgcagaccgaagcgcgcgccgcgcacgatatcctcgaaaagctgggtatccccgacaaggccctggtgctgtcggcgcgcgacctggccggcgccggcggcctgccgatcgccagcctggcgggacaatgctggaatctcgatgaggtggcggaccaataccgcctgttctcgcgcaatttcggcccggtggaaaaactgctggatccgccccccacccccgcgcaggccttcgcggtgcgggtgctgttgctgcacaactggcggcgcatcgtgctgcacgatccgcagctgcccacccccatggaaccggacggctggcccggcaacgcggcccgcgcactgtgccggcgcatctactggcaagtcttcgacgcctcggaacgccacctggatgccgtggccggccgcgagaacgcgcgctatcggccggcccaggccgacatcatgggccgcttcggcgggcggccgtag

SEQ ID NO: 55161 - protein, 309 aa, Bordetella bronchiseptica RB50
MASTPSPLDRFLSRLLKNDPPRAKSLCVSLLGDALAPHGGAIWLGDLIELLAPIGINERLLRTSVFRLVAQGWLQSERHGRRSLYLLSEHGLRHTAHASQRIYDGPARAWNGEWTLVALPRAGNNGLAERGELRRELLWEGFGMVAPGLFAHPQTEARAAHDILEKLGIPDKALVLSARDLAGAGGLPIASLAGQCWNLDEVADQYRLFSRNFGPVEKLLDPPPTPAQAFAVRVLLLHNWRRIVLHDPQLPTPMEPDGWPGNAARALCRRIYWQVFDASERHLDAVAGRENARYRPAQADIMGRFGGRP

SEQ ID NO: 55162 - DNA, 783 bp, Thermus thermophilus HB27
  CDS (1)..(783): transl_table=11
atgcgggccaggtccaccatcttcaccctgttcgtggagtacgtctacccggagcgggcggcccgggtgcgggacctcgtggccatgatggccgccctgggcttctcggagatggcggtgcgggcggcgctttcccggagcgccaagcggggctgggtggtgcccaagcgggaggggcgggccgcctactacgccctctccgaccgggtctactggcaggtgcgccaggtgcgccgccgcctctacggctccctccccccgtgggacgggcgcttcctcctcgtccttcccgaggggcccaaggaccggggggagagggagaggttccgtcgggagatggcccttttgggctacggggggctgcagagcggggtctatctgggggtcggggcggacctcgaggccacccgggagctcctcggcttctacggccttagcgccacctgcttccaaggggagcttctcgggggaaaggaggaggtcctcagggccttccccctggaggaggccaaggcgggctacgggcggctttccgccctcctgggtcaaagccccgaggaccccgtggaggccttccgccacctcacccggctcgtccacgaggcgaggaagctcctcttcctggaccccggcctcccccaagagcttttgggccccgactttccggggccaaaggtgcgccgcctcttcctttcggcccgggaggagctgagggcccgggcagcccccttcctcaaggacctttcccttctcctttcagacctctcacccgtttcccggtag

SEQ ID NO: 55163 - protein, 260 aa, Thermus thermophilus HB27
MRARSTIFTLFVEYVYPERAARVRDLVAMMAALGFSEMAVRAALSRSAKRGWVVPKREGRAAYYALSDRVYWQVRQVRRRLYGSLPPWDGRFLLVLPEGPKDRGERERFRREMALLGYGGLQSGVYLGVGADLEATRELLGFYGLSATCFQGELLGGKEEVLRAFPLEEAKAGYGRLSALLGQSPEDPVEAFRHLTRLVHEARKLLFLDPGLPQELLGPDFPGPKVRRLFLSAREELRARAAPFLKDLSLLLSDLSPVSR

SEQ ID NO: 55164 - DNA, 858 bp, Symbiobacterium thermophilum IAM 14863
  CDS (1)..(858): transl_table=11
atgaaggcccggtcgctgctgttcaacctgtggggcgactacatccagcatgtcggaggcgaggcctgggcgtcgaccctggccgcctgggtgcgcccgttcggcgtcagcgaggcggccctgcggcaggcgctctcgcgcatggctcgccagggatggctggaggtgcgtaaggtcggaaaccggacctgttatgcgctctccgcggcgggacgccgccgcattgccgaggcgtcgcggcgcgtgtacgacggccgggacgtggactgggacggccgctggcgggtactggtctattcggtccccgaggccctgcggaaccggcgcaacgacctgcgccgggagctgatctggacgggcttcgcccacctgtcgccgggtacctggatctcgcccaacccactcgaggactcggtgcgggagctgctccggcgctacgggctggagccctacgccacgctgttcgtcgcgccgtacgcggagccctggtcggcgcccgacctggtgcgccgctgctgggatctggaggcgatccaggcgagctacgaccggttcatcgcgcgctgggagccccgcctggaggcgtcgtcgaggctgcacagcgacgaggagcgcttcgtcgagcagatccgcctcgtccacgactaccggaagttcctgttcgtcgacccggggctgccgcgccggctcctgcccgatacctggcgggggcacgacgcgcgcaggctgttccaggcgtactatgccaggctgcggcccggggcgctccggttcctggagaggcactttgaacccacacaagcccacgatggaggaggagaggaccgtggcgtacgagaacatcctggtctttcgtga

SEQ ID NO: 55165 - protein, 285 aa, Symbiobacterium thermophilum IAM 14863
MKARSLLFNLWGDYIQHVGGEAWASTLAAWVRPFGVSEAALRQALSRMARQGWLEVRKVGNRTCYALSAAGRRRIAEASRRVYDGRDVDWDGRWRVLVYSVPEALRNRRNDLRRELIWTGFAHLSPGTWISPNPLEDSVRELLRRYGLEPYATLFVAPYAEPWSAPDLVRRCWDLEAIQASYDRFIARWEPRLEASSRLHSDEERFVEQIRLVHDYRKFLFVDPGLPRRLLPDTWRGHDARRLFQAYYARLRPGALRFLERHFEPTQAHDGGGEDRGVREHPGLS

SEQ ID NO: 55166 - DNA, 870 bp, Nocardia farcinica IFM 10152
  CDS (1)..(870): transl_table=11
atgacggctgagctcgaaccgaccggcgcgggtacggcaggcggccgggacactcgcctcgcccagttcatcatcacgatcttcggcctgtgcgcccgcgcggaaggcaactggctctccgtcgcgtcggtggtcgcgctgatggccgacctcggcgcggagggccaggccgtccgttcctccatctcccggctcaagcgccgcggtgtgctggtgagcgagcggcacgggggcgcggcgggctactcgctcgccccgcagacactggaggtgatcgccgaaggcgacatccgcatcttccaccgcacccgcgccaccgaggacgacggctgggtggtcgtggtgttctcggtgcccgaaaccgagcgcgagaagcggcattccctgcgaaccacgttgacccgcctgggtttcggcaccgcggcccccggggtgtgggtggcgcccggaaacctggtgcgcgagaccgagcagaccttgcagcgccgcggattgtcctcctacgtcgaccttttccgcggcaggcacctcggcttcggcgacccgcgggagaaggtcaccacctggtgggatctggacgagctcaccgcgctctacaccgagttcctccagcagtaccggccggtgctgtatcgggtgaccagcgaaaccgtcaccgcgcgtgaggctttccagctctacgtgccgatgctcacgcagtggcgacggctgccctaccgcgacccgggcatcccgctgtcgctgctgccgcccgcctggcagggcgaagccgcgggcacgctgttcgaccagctcaacgaggtgctcaacccgctggcccacaagcacgcgctcgcggtgatccacggcaaacgcccccaggtcagctga

SEQ ID NO: 55167 - protein, 289 aa, Nocardia farcinica IFM 10152
MTAELEPTGAGTAGGRDTRLAQFIITIFGLCARAEGNWLSVASVVALMADLGAEGQAVRSSISRLKRRGVLVSERHGGAAGYSLAPQTLEVIAEGDIRIFHRTRATEDDGWVVVVFSVPETEREKRHSLRTTLTRLGFGTAAPGVWVAPGNLVRETEQTLQRRGLSSYVDLFRGRHLGFGDPREKVTTWWDLDELTALYTEFLQQYRPVLYRVTSETVTAREAFQLYVPMLTQWRRLPYRDPGIPLSLLPPAWQGEAAGTLFDQLNEVLNPLAHKHALAVIHGKRPQVS

SEQ ID NO: 55168 - DNA, 783 bp, Thermus thermophilus HB8
  CDS (1)..(783): transl_table=11
atgcgggccaggtccaccatcttcaccctgttcgtggagtacgtctacccggaacgggcggcccgggtgcgggacctcgtggccatgatggccgccctgggcttctcggagatggcggtgcgggcggcgctttcccggagcgccaagcggggctgggtggtgcccaagcgggaggggcgggccgcctactacgccctctccgaccgggtctactggcaggtgcgccaggtgcgccgccgcctctacggctccctccccccgtgggacgggcgcttcctcctcgtccttcccgaggggcccaaggagcggggggagagggagaggttccgtcgggagatggcccttttgggctacggggggctgcagagcggggtctatctgggggtcggggcggacctcgaggccacccgggagctcctcggcttctacggccttagcgccacctgcttccaaggggagcttctcgggggaaaggaggaggtcctcagggccttccccctggaggaggccaaggcgggctacgggcggctttccgccctcctgggtcaaagccccgaggaccccgtggaggccttccgccacctcacccggctcgtccacgaggcgaggaagctcctcttcctggaccccggcctcccccaggagcttttgggccccgactttccggggccaaaggtgcgccgcctcttcctttcggcccgggaggagctgagggcccgggcggcccccttcctcaagggcctttcccttctcctttcagacctctcacccgtttcccggtag

SEQ ID NO: 55169 - protein, 260 aa, Thermus thermophilus HB8
MRARSTIFTLFVEYVYPERAARVRDLVAMMAALGFSEMAVRAALSRSAKRGWVVPKREGRAAYYALSDRVYWQVRQVRRRLYGSLPPWDGRFLLVLPEGPKERGERERFRREMALLGYGGLQSGVYLGVGADLEATRELLGFYGLSATCFQGELLGGKEEVLRAFPLEEAKAGYGRLSALLGQSPEDPVEAFRHLTRLVHEARKLLFLDPGLPQELLGPDFPGPKVRRLFLSAREELRARAAPFLKGLSLLLSDLSPVSR

SEQ ID NO: 55170 - DNA, 876 bp, Geobacillus kaustophilus HTA426
  CDS (1)..(876): transl_table=11
gtgaagccgagatcgctcatgtttacgttatttggagaatatattcaacattatgggaacgaagtatggatcggaagcttaatccaaatgatgtcccacttcggcatttccgagtcgtccatccgcggagcggcgttgcgcatggtgcagcaagggttttttgaggtgcggaaaatcggcaacaacagctattactcgctgacgccgaaagggaaacggacgatgatggacgggttcaaccgcgtctattcgcaacggaactacaaatgggacggtcaatggcgcgtgttgacgtactccgttcccgagcaaaaacgggagctgcgcaaccaaattcgcaaagaattgagcttgatggggtttggtctcatttcccacgggacgtgggcgagcccgaatccgatcgagccgcaagtgatggaatgggttaaagactatcatttggagccgtacgtcattttgtttacggcgagctccatcgtgtcgcacagcaatgagcaaatcatcgagcgcggctgggatttcccgtacatcgccaaggagtatgaccggtttattgaaacgtacgaacgaaaatacgaagagttccaacatcgggcttggaacaatgaactgaccgaccgcgaatgcttcattgaacggacgaagctcgtgcatgagtatcggagctttttctttatcgatccaggattcccgaacgacttgttgcctgatgattggagcggaacgagagcgcgggagctgtttttcaatgtccaccagttgctcgccattccggccatctgttattttgaaacattgtttgaggccgcaccggatcgtgaggtgacatttaaccgcgataaggcgattaatccatttatggaaatgatttag

SEQ ID NO: 55171 - protein, 291 aa, Geobacillus kaustophilus HTA426
MKPRSLMFTLFGEYIQHYGNEVWIGSLIQMMSHFGISESSIRGAALRMVQQGFFEVRKIGNNSYYSLTPKGKRTMMDGFNRVYSQRNYKWDGQWRVLTYSVPEQKRELRNQIRKELSLMGFGLISHGTWASPNPIEPQVMEWVKDYHLEPYVILFTASSIVSHSNEQIIERGWDFPYIAKEYDRFIETYERKYEEFQHRAWNNELTDRECFIERTKLVHEYRSFFFIDPGFPNDLLPDDWSGTRARELFFNVHQLLAIPAICYFETLFEAAPDREVTFNRDKAINPFMEMI

SEQ ID NO: 55172 - DNA, 858 bp, Geobacillus kaustophilus HTA426
  CDS (1)..(858): transl_table=11
atgaacacacgctcaatgatctttacgatttacggcgactacatccgccattacggcggtgaaatttggatcgggagcctaatccgcctcctccgcgagttcggccataacgaccaggcggtgcgggcggcggtgtcgcgcatgagcaaacaaggctggattcgcgcggaaaaacgcggcaataaaagctactattcgctcacggaacgcggcgtcaagcggatggaagaagcggcgcggcgcatttacaaaacgcgccccgagcattgggacgggaaatggcgcattctcatctatacgattcctgaggataagcggcatttgcgcgatgaactgcgaaaggagcttgtttggagcgggttcggcacgatttccaacagttgctggatttcaccgaataatttggagcaacaagtgtacgacttgatcgacaagtatgacatccgcccatatgtcgacttctttcttgccgaatacgatggaccgcatacgaataagcagcttgtggaaaagtgctggaacttagaagagatcaaccaaaaatacgagcagtttattgcggtctacagtcaaaaatatgtgattgacaaacataaaatcgagcgcggcgaaatgtcggacgcggaatgttttgtcgagcggacgaagctcgtccatgaataccgaaaatttttgttcatcgaccccggcttgccggaagagctgttgccgaatgagtggatgggaagccatgcggccgccttgttcaacgactattatcaacaactcgcggcaccggccagccgtttctttgaagcggtgtttcaagaaggggcagagcttgacaaaaaagaagaggaagagatatcggtggaatga

SEQ ID NO: 55173 - protein, 285 aa, Geobacillus kaustophilus HTA426
MNTRSMIFTIYGDYIRHYGGEIWIGSLIRLLREFGHNDQAVRAAVSRMSKQGWIRAEKRGNKSYYSLTERGVKRMEEAARRIYKTRPEHWDGKWRILIYTIPEDKRHLRDELRKELVWSGFGTISNSCWISPNNLEQQVYDLIDKYDIRPYVDFFLAEYDGPHTNKQLVEKCWNLEEINQKYEQFIAVYSQKYVIDKHKIERGEMSDAECFVERTKLVHEYRKFLFIDPGLPEELLPNEWMGSHAAALFNDYYQQLAAPASRFFEAVFQEGAELDKKEEEEISVE

SEQ ID NO: 55174 - DNA, 957 bp, Azoarcus sp. EbN1
  CDS (1)..(957): transl_table=11
atgaagagtcggttcatcacgcagtggatcaacgattacctggcggaacgccgcgtacgcgcgaactcgctgatcatcaccatctacggagatttcatcgccccgcacggcggaaccgtgtggctcggcagtttcatacggctggtcgagccgctgggcctgaacgagagaatggtccgcaccagcgtctatcgcctgtcgcaggacaagtggctggtttccgagcagatcggacgcaaaagctattacagcctcactgcctcgggacgacggcgcttcgaacacgcctatcgccggatctacgacgcacggcagctaccgtggaacggcgaatggcagctcgtgatcctgccttcgacgctgcccgccccgcagcgggacgcactgcgcaaggaactgtcatgggcgggttacggaacgatcgctccgtgcgtgctcgcacacccgtcggcagacaccgaaaccttgctggaaatcctgcaggagaccggcacccacgacaaggtcgtaccgatgaccgcgcacaatctcggcgcgctgtcgaaccgcccgctgcaggatctggcgcgtgaatgctggaatctggaggcaatcggcgcgacttaccgggagttcgcggaccggctgcggcccgtgctgcgggcgctgcgtactgctcgcgacctggacccggaacagtgcttcctcgtgcagaccctgacgatgcacgattttcgtcgcgccctgctgcacgacccgctgctgcccgatcaactgatgcctgtcgactggagcggtgcggtcgcccgcgaagtgtgccgagacatttatcgcatcacgtatcgccttgcccagcagcacctgatggcgacatgcaagacgccaaatggcccgctgccgcccgccgcgccgtatttctacgaacgtttcggcggcctcgaggacactacacaccgtgaagcagcggagcagcagtag

SEQ ID NO: 55175 - protein, 318 aa, Azoarcus sp. EbN1
MKSRFITQWINDYLAERRVRANSLIITIYGDFIAPHGGTVWLGSFIRLVEPLGLNERMVRTSVYRLSQDKWLVSEQIGRKSYYSLTASGRRRFEHAYRRIYDARQLPWNGEWQLVILPSTLPAPQRDALRKELSWAGYGTIAPCVLAHPSADTETLLEILQETGTHDKVVPMTAHNLGALSNRPLQDLARECWNLEAIGATYREFADRLRPVLRALRTARDLDPEQCFLVQTLTMHDFRRALLHDPLLPDQLMPVDWSGAVAREVCRDIYRITYRLAQQHLMATCKTPNGPLPPAAPYFYERFGGLEDTTHREAAEQQ

SEQ ID NO: 55176 - DNA, 801 bp, Silicibacter pomeroyi DSS-3
  CDS (1)..(801): transl_table=11
atgacacgacacaccccctggttcgacaccgccgtcacccggcttgccgacccgcagaaccagcgggtctggtcgatcatcgtctcgctgctgggggatctggcccggcgcaagggcgaccggatttcgggcagcgcgctgacccgcattacccagccgatgggcatcaaacccgaggcgatgcgcgtcgcgctgcaccggctgcgcaaggatggatggatcgaaagcagccgcgaggggcgcagttcggtccattacctgtccgaatatggccgcacccaatcggaccgcgtgaccccccgcatctatacccgcacacccgaattgcccgaggcctggcatatcctgatcgccgaggatggcagcagcctcaacacgctcaacgacctgctgctgaccgacacctatatcgggatcgggcgcacggtggcgctgggatccgggccggtacccggggattgcgacgatctggccgggttcgaggtgagcgcccgcgccattcccggctggctgcaaacccgcctcttccccgaggatctggggaccgcctgtcagagcctgcatcaggattgcgccgaattgcgcgcggcgggcgtgcccgggctgctgaccccgtttcaggtggcaaccctgcgcacgctgctggtgcatcgctggcgccgggtggccttgcgccatcccgacctgcccgctgccttccagccccggggctggatgggacccgcctgccgcgagcaggtctttgccctgctcgacgccctgccgctgccgcccctgcccgcgctgaacgaagccgaatga

SEQ ID NO: 55177 - protein, 266 aa, Silicibacter pomeroyi DSS-3
MTRHTPWFDTAVTRLADPQNQRVWSIIVSLLGDLARRKGDRISGSALTRITQPMGIKPEAMRVALHRLRKDGWIESSREGRSSVHYLSEYGRTQSDRVTPRIYTRTPELPEAWHILIAEDGSSLNTLNDLLLTDTYIGIGRTVALGSGPVPGDCDDLAGFEVSARAIPGWLQTRLFPEDLGTACQSLHQDCAELRAAGVPGLLTPFQVATLRTLLVHRWRRVALRHPDLPAAFQPRGWMGPACREQVFALLDALPLPPLPALNEAE

SEQ ID NO: 55178 - DNA, 789 bp, Sulfolobus acidocaldarius DSM 639
  CDS (1)..(789): transl_table=11
atgaagtttcaaacgctgttcttcacgatttatggagactacattataaactacggaaatagcataactgtgaggagtttgataaagataatgagagagttcggtttcacagagggggcaataagggcaggtctattccgtttaaggcaaaagggactggtggacatgattgacaggaggaggtgtagtttatccgaagctgggttatataggttacaggaaggtatgaaaagagtctacgagaagaggaacggagagtgggacggaaaatggagaatagtagtttacaatatacctgagtcaaataggagtgtcagagacgagatgagaaaaaccttaaagtggttgggctttggatacctggctcaatcgacatggatatcgccaaacccagttgaggagagcctaactaaattcattaatgaattaaaagatagtagaaccaatgttgacatattcttctttatttcggactttgttggaaatccccttgagatagtaaggaagtgttgggatctgaaagaggtcgaggagaaatataaggagtttgtgaaccaatggggcaaagttatggagaacatatcttctctgaaaccaaatgaggcattcataaccagaattagattggttcatgaatacaggaaatttttacacattgatccaaacttacctaaagatctactaccgccaaattgggtaggttacgaggcatatgagctatttcaaaaactgaggaataagctctcaacattgtctgaccagttctttaagtcggtatatgaaccttga

SEQ ID NO: 55179 - protein, 262 aa, Sulfolobus acidocaldarius DSM 639
MKFQTLFFTIYGDYIINYGNSITVRSLIKIMREFGFTEGAIRAGLFRLRQKGLVDMIDRRRCSLSEAGLYRLQEGMKRVYEKRNGEWDGKWRIVVYNIPESNRSVRDEMRKTLKWLGFGYLAQSTWISPNPVEESLTKFINELKDSRTNVDIFFFISDFVGNPLEIVRKCWDLKEVEEKYKEFVNQWGKVMENISSLKPNEAFITRIRLVHEYRKFLHIDPNLPKDLLPPNWVGYEAYELFQKLRNKLSTLSDQFFKSVYEP

SEQ ID NO: 55180 - DNA, 924 bp, Pseudomonas fluorescens Pf-5
  CDS (1)..(924): transl_table=11
atgtcgtccctagcgccactgaaccacctgatcaaacgtttccaggagcagactccgatccgcgccagttcgctgatcatcaccctgtacggcgatgccatcgagccccacggcggcacggtgtggctgggcagcctgattcagttgctggagcccatggggatcaacgagcgcttgatccgcacctcgatcttccgcctgagcaaagagggctggctgagcgctgaaaaggtcggccggcgcagttactacagcctgaccctgaccggacgccggcgcttcgacaaagccttcaagcgcgtgtacagcgccggagtgccggcctgggacggcgcctggtgcctggtgatgctctcgcaactgtctgtcgagttgcgcaagcaggtgcgcgaagagttggaatggcaggggttcggcgccatgtcgccggtactgctggcctgcccgcgcagtgatcgggccgatatcaacgccaccctggcggagcttggtgcccaggaagacaccatcgtcttcgagaccacgccccaggatgtcctgggttccagggccctgcgcctgcaagtgcgggaaagctggaacatcgatgaactggcagcccactacagcgagttcatccagctgttccgcccgctctggcaggccctgcgcgagcaggagcagttgcagccccaggattgcttcctggcccggctgctgctgattcatgagtaccgcaagctgctgctgcgcgatccgcaactgcccgacgaactgctgcccggggattgggaaggccgcgcggcgcgccagttgtgtcgcaacatctatcgcctgatccaggcccgggccgaagaatggctggccactgccctggagaacgccgatggcccgttgccggatgtcggcgaaagctactaccggcgttttggcgggctggtctag

SEQ ID NO: 55181 - protein, 307 aa, Pseudomonas fluorescens Pf-5
MSSLAPLNHLIKRFQEQTPIRASSLIITLYGDAIEPHGGTVWLGSLIQLLEPMGINERLIRTSIFRLSKEGWLSAEKVGRRSYYSLTLTGRRRFDKAFKRVYSAGVPAWDGAWCLVMLSQLSVELRKQVREELEWQGFGAMSPVLLACPRSDRADINATLAELGAQEDTIVFETTPQDVLGSRALRLQVRESWNIDELAAHYSEFIQLFRPLWQALREQEQLQPQDCFLARLLLIHEYRKLLLRDPQLPDELLPGDWEGRAARQLCRNIYRLIQARAEEWLATALENADGPLPDVGESYYRRFGGLV

SEQ ID NO: 55182 - DNA, 924 bp, Ralstonia eutropha JMP134
  CDS (1)..(924): transl_table=11
atggccactcgttcggcgacacaaccggtttccccgcaggtcgcgcggctcgcacgcggccttaagctcggcgccaattcgatgctcgtgacactgtttggcgatgtggtcgcgccgcggcctcaggcgctgtggctgggcagcctgatccgcctggccgagccgttcggcatcaacgaccggcttgtacgcactgcgacgttccggctgacgtccgatgactggctcaacgccacgcgcatcgggcggcgcagctactacggcttgtccgaggcggggctgcagcgctgcctgcatgccggcaagcgcatctacgccggcgacgcacccgactgggacggccgctggacgttggcgctggtgcgtggcgacgcgcgcgccaccatccgccagcgattgaagcgcgagctgctgtgggaaggcttcggcgcgatcgcgccgggcgtgtatgcgcatccgaatgccgatgcaaactcgctaggcgagatcatccgtgcagcgcatgcgcaggacttcgtcgcggtgatggacgcgaccagcctcgagacattctcgatccgaccgctgcagacgttgatgcaccagacgttcaagctcggcgacgtggcgtccgcgtggcaggcgctgctgcgccgcttctcgcccgtgctggccgacgcacatgccatgacgccggccgacgcctttttcgtacgcacgctgctgctgcacgaataccgccgcgtgctgctgcgcgacccgaacctgccggaacaactgctgcccacggactggcccggtcgcactgcgcgagacctgtgccgtgatatgtacgcggcactgctggatgccagcgaggactatctgcgcgaggttgtggaggtatccgaaggtacgctggccaacgccacccggcttctgcgcaggcgctttgccatggcgtag

SEQ ID NO: 55183 - protein, 307 aa, Ralstonia eutropha JMP134
MATRSATQPVSPQVARLARGLKLGANSMLVTLFGDVVAPRPQALWLGSLIRLAEPFGINDRLVRTATFRLTSDDWLNATRIGRRSYYGLSEAGLQRCLHAGKRIYAGDAPDWDGRWTLALVRGDARATIRQRLKRELLWEGFGAIAPGVYAHPNADANSLGEIIRAAHAQDFVAVMDATSLETFSIRPLQTLMHQTFKLGDVASAWQALLRRFSPVLADAHAMTPADAFFVRTLLLHEYRRVLLRDPNLPEQLLPTDWPGRTARDLCRDMYAALLDASEDYLREVVEVSEGTLANATRLLRRRFAMA

SEQ ID NO: 55184 - DNA, 948 bp, Dechloromonas aromatica RCB
  CDS (1)..(948)
atgagcaccgccatccaatcccgcctgaatgaattccggcaacagcgccgtgtccaggctggctcgctgatcatcaccgtctttggcgacgcgatcctgccgcgcggcggacgcatctggctaggcagcctgatccgcctgctcgaaccactcgaactcaacgaacggctgatccgcacctccgtcttccgtctggtcaaggaggaatggctgcgcaccgaaaccatcggccggcgtgccgactacgtgctgacgccatcgggccgtcggcgtttcgaggaagcttcacgccacatctacgcctcggatgcgccactctgggatcgccgctggcgcctgatcctggtcgtcggcgatctggaccccaagctgcgtgagcaggtccggcgcgccttgttctggcaggggttcggcgccttgggggccgattgcttcgtgcaccctagcgccgagttgtccagcgtgctcgacacgctgattaccgaaggcctgtcatcggccatcggcgcgctgatgcccttgttcgcggccgattcgcgttcggcccagtcggccagcgacgccgacctcgtgcaccgcgcctgggatctcgggcatctggccgaggcctacagcgccttcgtcgccacctatcagcccattctcgacgaactccggcgcgaccatctggccggggtcagcgagcaggatgccttcctgctgcgcatcctgctcatccacgattaccggcgcctgctgctgcgcgatccggaattgccggaagtcctgctgccggccaactggccaggtcagcagtcgcgactgttgtgcaaggaactgtacaagcggctggaacccctcgccagccgccacctcgaccagcagttgtgcctggccgatggacgcgtgccggaagaggacctgtcgctccccgagcgcttcccgcagaacgatccgctatcggcctga

SEQ ID NO: 55185 - protein, 315 aa, Dechloromonas aromatica RCB
MSTAIQSRLNEFRQQRRVQAGSLIITVFGDAILPRGGRIWLGSLIRLLEPLELNERLIRTSVFRLVKEEWLRTETIGRRADYVLTPSGRRRFEEASRHIYASDAPLWDRRWRLILVVGDLDPKLREQVRRALFWQGFGALGADCFVHPSAELSSVLDTLITEGLSSAIGALMPLFAADSRSAQSASDADLVHRAWDLGHLAEAYSAFVATYQPILDELRRDHLAGVSEQDAFLLRILLIHDYRRLLLRDPELPEVLLPANWPGQQSRLLCKELYKRLEPLASRHLDQQLCLADGRVPEEDLSLPERFPQNDPLSA

SEQ ID NO: 55186 - DNA, 843 bp, Ralstonia eutropha JMP134
  CDS (1)..(843)
atgctcgtgacactgtttggcgatgtggtcgcgccgcggcctcaggcgctgtggctgggcagcctgatccgcctggccgagccgttcggcatcaacgaccggcttgtacgcactgcgacgttccggctgacgtccgatgactggctcaacgccacgcgcatcgggcggcgcagctactacggcttgtccgaggcggggctgcagcgctgcctgcatgccggcaagcgcatctacgccggcgacgcacccgactgggacggccgctggacgttggcgctggtgcgtggcgacgcgcgcgccaccatccgccagcgattgaagcgcgagctgctgtgggaaggcttcggcgcgatcgcgccgggcgtgtatgcgcatccgaatgccgatgcaaactcgctaggcgagatcatccgtgcagcgcatgcgcaggacttcgtcgcggtgatggacgcgaccagcctcgagacattctcgatccgaccgctgcagacgttgatgcaccagacgttcaagctcggcgacgtggcgtccgcgtggcaggcgctgctgcgccgcttctcgcccgtgctggccgacgcacatgccatgacgccggccgacgcctttttcgtacgcacgctgctgctgcacgaataccgccgcgtgctgctgcgcgacccgaacctgccggaacaactgctgcccacggactggcccggtcgcactgcgcgagacctgtgccgtgatatgtacgcggcactgctggatgccagcgaggactatctgcgcgaggttgtggaggtatccgaaggtacgctggccaacgccacccggcttctgcgcaggcgctttgccatggcgtag

SEQ ID NO: 55187 - protein, 280 aa, Ralstonia eutropha JMP134
MLVTLFGDVVAPRPQALWLGSLIRLAEPFGINDRLVRTATFRLTSDDWLNATRIGRRSYYGLSEAGLQRCLHAGKRIYAGDAPDWDGRWTLALVRGDARATIRQRLKRELLWEGFGAIAPGVYAHPNADANSLGEIIRAAHAQDFVAVMDATSLETFSIRPLQTLMHQTFKLGDVASAWQALLRRFSPVLADAHAMTPADAFFVRTLLLHEYRRVLLRDPNLPEQLLPTDWPGRTARDLCRDMYAALLDASEDYLREVVEVSEGTLANATRLLRRRFAMA

SEQ ID NO: 55188 - DNA, 816 bp, Brevibacterium linens BL2
  CDS (1)..(816)
atgacggttcacccgcagtcactcttcttcgcgctcgccggcctgcacatgcttgatgaccccaggccgctgagcggggcctcgatcgtgttcgtcatgggcaggctgggtgtgggggagtcggcggccaggtccgtgctgcagcggatggcggcgaagaacttcatcgtgcgacacaaagagggccgcaagaccttctacacgctctccgatcgcggacgggcgattctgcgcgagggtcaggagaagatgttcgccggctggcagccccaggattgggacggccgatggacctttgtgcgcatccaggtgcccgagtcgaagaggacactgcgccaccagatggcgtcgaggctgtcgtgggctggtttcgctcaggtggatggcggcccttgggtggctcccgggccgcatgatgttgccacgatactggggccggagcagtcggtgatctctccgattgtcgtctatggcgagcctaagcccccgacgtccgaagagatgctggcaggcgctttcgacctggcggagttggccgccgactatgagtcgttcggcgagaagtggcgagctgttgatccggattcactgtcgccggttgacgcgctggtcaagcgagtcgagctccacttggattggctggctcttgcgcgtacggacccgcagctgccagcgacgttgttgccgaagggatggccgggggccgcgcagagtatttcgtttcgagagcttgatgctgagttgggcactcgggaagttcatgcagtgtcgggttttttcgcgggagatctgaatgaactctattcatttttgtga

SEQ ID NO: 55189 - protein, 271 aa, Brevibacterium linens BL2
MTVHPQSLFFALAGLHMLDDPRPLSGASIVFVMGRLGVGESAARSVLQRMAAKNFIVRHKEGRKTFYTLSDRGRAILREGQEKMFAGWQPQDWDGRWTFVRIQVPESKRTLRHQMASRLSWAGFAQVDGGPWVAPGPHDVATILGPEQSVISPIVVYGEPKPPTSEEMLAGAFDLAELAADYESFGEKWRAVDPDSLSPVDALVKRVELHLDWLALARTDPQLPATLLPKGWPGAAQSISFRELDAELGTREVHAVSGFFAGDLNELYSFL

SEQ ID NO: 55190 - DNA, 828 bp, Brevibacterium linens BL2
  CDS (1)..(828)
ttgctgcggaccttcgtcggtcttcacctgcgtgacctgggcggttggatccgagtcgctgccctgctcgatcttctcgccaccgccggggtctcgaactcctcaactcgcagcgccgtgtcgagactcaagggcaagggactgctcattccggacaagcgggaggcagtagccggatatcgtttggactcggcggccgtgtccggacttgaacgcggggatcggaggatctttacctaccgtggtcagagagatgacgagccctggtgcctggtgtcctactccctgcccgaggtggaccggtcgaagcgggtgcagctgcgtcgaacactgatggggttgggattcggagcggtcaccgacgggctgtggattgcgcccgggcatctgcgcgccgaagtcgaggacgccctggtcggccttgacgtgcgagaccgggcgacgatcttcatcacgcagacacccctgaccgctgaacccttcgctcaagcggcggcgaaatggtggcagctggacaccctggctgccaggcacaccgaattccttcgccggtacgaacacgctgcgccactgtcggagaactcagccccactgccagagaactcagcgccgaagtcgtctctcgaaccgcgtgaggcgttcgttctgtggctgcactgcgtcgacgagtggaaggcgatcccctacgtcgatccgggccttccacccagcgccctgccctcggactggcccgggatgagaagcgtggaactcttcgcacagctgcgccgcacccaggcggagcctgcccgtgcccacgtccgggagatcagctcagcagagtcgtga

SEQ ID NO: 55191 - protein, 275 aa, Brevibacterium linens BL2
MLRTFVGLHLRDLGGWIRVAALLDLLATAGVSNSSTRSAVSRLKGKGLLIPDKREAVAGYRLDSAAVSGLERGDRRIFTYRGQRDDEPWCLVSYSLPEVDRSKRVQLRRTLMGLGFGAVTDGLWIAPGHLRAEVEDALVGLDVRDRATIFITQTPLTAEPFAQAAAKWWQLDTLAARHTEFLRRYEHAAPLSENSAPLPENSAPKSSLEPREAFVLWLHCVDEWKAIPYVDPGLPPSALPSDWPGMRSVELFAQLRRTQAEPARAHVREISSAES

SEQ ID NO: 55192 - DNA, 885 bp, Exiguobacterium sp. 255-15
  CDS (1)..(885): transl_table=11
atgagtgcgaatacacaatcgatgatttttacggtctacggggattacatccgtcattacggcaatcaaatctgggtcggcagtctgattcgtctgctcaaagagtttggtcataatgaacaggcggtccgggtcgcggtttcccggatggtcaagcaaggctggctcacctcacaaaaacaaggcacgaaaagtttttattcgctgaccccgcgtggtgtcgagcggatggaagaagccgcccggcggatttataaatcgacacctcatgtctgggacggaaaatggcggacgctgatgtacacgattccggaagacaaacggcaaatccgtgatgaattgcggaaagagttgtcgtggagcggattcggaaatttatcgaacggtgtctggatttcgccgaacccactcgaaaaagaagcggaacggttgattgaagcttatgatatcaaggcgtatatcgacttttttgtcggcgaataccacggaccgcaacaggatcaatcactggtcgaacgggcctttccgctcgatgaattacaggaacgatatgaacagttcattgctgagtacagccggcgttacatcgtccatcaaagccggatccagctcggtgaaatggatgaggaacagtgttttgtcgaacggacgacactcgtccatgaataccggaagtttttatttacggatcccggactgccgcaggagctgttgccggatgagtggagcggtcatcacgcggccttgttgtttgaacaatactaccggctgctcgcagaaccggcgagccggttttttgaatccatttttcgtgaaacccacgatgtgacgcaaaaaagtgccgattatgatgcttcggaacatccgttgttcgcagaacgctaa

SEQ ID NO: 55193 - protein, 294 aa, Exiguobacterium sp. 255-15
MSANTQSMIFTVYGDYIRHYGNQIWVGSLIRLLKEFGHNEQAVRVAVSRMVKQGWLTSQKQGTKSFYSLTPRGVERMEEAARRIYKSTPHVWDGKWRTLMYTIPEDKRQIRDELRKELSWSGFGNLSNGVWISPNPLEKEAERLIEAYDIKAYIDFFVGEYHGPQQDQSLVERAFPLDELQERYEQFIAEYSRRYIVHQSRIQLGEMDEEQCFVERTTLVHEYRKFLFTDPGLPQELLPDEWSGHHAALLFEQYYRLLAEPASRFFESIFRETHDVTQKSADYDASEHPLFAER

SEQ ID NO: 55194 - DNA, 1002 bp, Frankia sp. EAN1pec
  CDS (1)..(1002): transl_table=11
gtgacagcgcccgcgcggctcgcaggtcgcgaccgtgatccgggtcgtggccggcgcccgaccgtccgccggccgcaggtcggggcccaaggagcgaatccggcacctccaacggtcgacgtcgtcgacctgcccagggtccaggcgggcgcacagccccagcacctgctcaccaccctgctcggcgattactgggccggccgccgggagcacgtcccgtcggtggtgctggtcagcctgctcgcggatttcgacgtcagcacggtcggtgcccgggcggcgctgagccggctgtcgcggcgcgggctgctggagtcgtcccggatcggccgcaacacctactacgggctgacagcggaggcctcggccgcgatcctcgcgtcggcgaaccggatcttcaccttcggcctgcggcacgacccgtgggacgggcgctggacggtggcggcgttctccatccccgaggaccagcgcgacgtgcggcacgccgtgcgtgcacggctgcgttggctgggcttcgctccgctctacgacgggatgtgggtcaccccgcggtctgccggtgaggcggcccgccgggtgttcgccgagttgggcgtcatcgcgtcgacggtgctgatcacgacgtcggaggcgcgccgcagcgacccccgcccgccgatggccgcctgggatctcaccgagctgcagcgcacctacgaggagttcgtccgcacctacacccccctgttggaacgggtccggcacggcgaggtgtgcggcgcggaggcactggccgcacgcaccgcggtgatggagtcctgggggcgcttcccgagcctcgacccggaccttccgatcgacctgctgcccggccgctggccgcggcgcgaggcccgcacggtcttcgccgagatctacgacgggctggccgtcccggctgtggcgcgggtccgggagctgctggcggaggtgtcgccggagctggccgacctcgtccggctgcgtacgacggtctcctga

SEQ ID NO: 55195 - protein, 333 aa, Frankia sp. EAN1pec
MTAPARLAGRDRDPGRGRRPTVRRPQVGAQGANPAPPTVDVVDLPRVQAGAQPQHLLTTLLGDYWAGRREHVPSVVLVSLLADFDVSTVGARAALSRLSRRGLLESSRIGRNTYYGLTAEASAAILASANRIFTFGLRHDPWDGRWTVAAFSIPEDQRDVRHAVRARLRWLGFAPLYDGMWVTPRSAGEAARRVFAELGVIASTVLITTSEARRSDPRPPMAAWDLTELQRTYEEFVRTYTPLLERVRHGEVCGAEALAARTAVMESWGRFPSLDPDLPIDLLPGRWPRREARTVFAEIYDGLAVPAVARVRELLAEVSPELADLVRLRTTVS

SEQ ID NO: 55196 - DNA, 906 bp, Silicibacter sp. TM1040
  CDS (1)..(906): transl_table=11
atggcagttgggctggcgctaacccgcgccagcccttatcgtatctgcatgacacaacacaccgacgactggtttaccactgcaatcacggcgctcactgaaccggatggcctgagggtctggtccatcatcgtgtccttcctcggagatatggcgcaagacaaaggcgccggcgtcagcagtgctgccttgacgcgggttattactccgcttggcatcaaaccagaggccattcgggttgcgctgcaccgtttgcgtaaggatggctggaccgagagccagcgacgcgggcggggctcctttcatttcctgactccctttgggcggcagcaatccgcgttggtgaccccccgtatctacgcgcgcagcacatgtgaaacagacgcctggaccttgcttgttgcgggcacgccagacgggctggagacgctggatgcgctctgcgaccagacgccactaaccagcatccgggtcaatcgccacgccgcgatcacaccgggccctgccatgcagcacgccgcagagacctcgcacatgctggttgcaaatctcgatgtggcgcatgtgcccggctggctacaggacgatctctttccagaaccattgcggcagagctgcgcggctcttgaccaggcccttgcgcccctcgggagcccaccagacctctctcccttgcaacgcgcctgcctgcgcacgctcctcgtccatcgctggcgccggattacgctccgacacccggacgtgccacgcatatttcaccccgcagattggagcggagaatcctgtcgcacgcgggtctttgccctgctcgacaagttgccgcagcccgaactggcagaaatcgaagacgctgcccctgtggccgtacaagctgcgccccaaggcacaatcgccgtaactggctga

SEQ ID NO: 55197 - protein, 301 aa, Silicibacter sp. TM1040
MAVGLALTRASPYRICMTQHTDDWFTTAITALTEPDGLRVWSIIVSFLGDMAQDKGAGVSSAALTRVITPLGIKPEAIRVALHRLRKDGWTESQRRGRGSFHFLTPFGRQQSALVTPRIYARSTCETDAWTLLVAGTPDGLETLDALCDQTPLTSIRVNRHAAITPGPAMQHAAETSHMLVANLDVAHVPGWLQDDLFPEPLRQSCAALDQALAPLGSPPDLSPLQRACLRTLLVHRWRRITLRHPDVPRIFHPADWSGESCRTRVFALLDKLPQPELAEIEDAAPVAVQAAPQGTIAVTG

SEQ ID NO: 55198 - DNA, 855 bp, Paracoccus denitrificans PD1222
  CDS (1)..(855): transl_table=11
atgcggcagggcgagatggccaagcgcgggctgatcgacgggatattggaggggatggcgctgcgttcggccgcgttcatcgtcaccgtctatggcgatgtggtcgtgccgcgcggcggcgtgttgtggaccggcacgctgatcgaggtctgcgagcgggtcggcatcagcgaatcgctggtgcgcaccgccgtctcgcgccttgtcgccgcccaccggctgcggggcgagcggctggggcggcgcagctattaccggctggacgcctcggcccagcgggagttcgaccaggcggcgcggttgctttacaaacccgaggttccggcgcgcggctggcagatcctgcacgcccccgacctcaccgaggacgaggcccgccaccagcgcatgggccatatgggcggggcggtcttcatccgtcccgaccgcggccagccggtgcccgagggcgcgctgcctttccttgcctcggacccgcccgaactgggccggatcgggcagttctgggatctctcggcgctgcatcagcgttatctcgacatgctggtgcgctttgcgccgctggccgaggcaggggcggcgctgtcggacgagatggcgctgatcgcccggctgctcttggtgcatgattatcgcggcgtcctgctgcgcgatccgcgcctgccgcagcccgccctgccgccggactggcaggggcatgaagcgcgggcgctgttccgccgcctctatcgccagctttcgccggcggcggagcgctggatcgggacgcatttcgagggcagcggcggcttcctgcccgagaaaaccgccgaaagcgaggcgaggctggccgatctgtgccaggcaacagattga

SEQ ID NO: 55199 - protein, 284 aa, Paracoccus denitrificans PD1222
MRQGEMAKRGLIDGILEGMALRSAAFIVTVYGDVVVPRGGVLWTGTLIEVCERVGISESLVRTAVSRLVAAHRLRGERLGRRSYYRLDASAQREFDQAARLLYKPEVPARGWQILHAPDLTEDEARHQRMGHMGGAVFIRPDRGQPVPEGALPFLASDPPELGRIGQFWDLSALHQRYLDMLVRFAPLAEAGAALSDEMALIARLLLVHDYRGVLLRDPRLPQPALPPDWQGHEARALFRRLYRQLSPAAERWIGTHFEGSGGFLPEKTAESEARLADLCQATD

SEQ ID NO: 55200 - DNA, 984 bp, Nocardioides sp. JS614
  CDS (1)..(984): transl_table=11
atgccgcgcccttccttggtgacctccagcggaccgtcgcctgtccgcggcttcatcgccgccatccgcgcaccttcctcttgtgatgtggcagcgggcctccgaggacccggctgcgccgtacgcacggaccattatcccctatccgacggtgacgcggagcacagcccgcccggagcccggccgggctactggcacactcctgacatgcaggcccgctcggcgctcttcgacgtgtacggcgaccacctgcgcgcgcgcggcagcgaggccccggtggccgcgttggtgcggctcctggacccggtcggcatcgcggccccggccgtgcgcacggcgatctcccggatggtgatgcagggctggctcgagccggtccagctcgacggcggccgcggctaccgcaccaccacgcgggcggaccggcgtctcgacgagaccgggcgtcgcgtctaccgccgcgacgcacccgcctgggacggccactggcacctggcgttcgtcagcccgccgccgggccgggccgcccgggcccggctgcgcgccgggctcaccttcatcgggtacgccgagctcgccgaccacgtgtgggtcaccccgttcgagcggaccgagctcggctcggtgctggaccgcgagcgcgccagcgccacgaccgcgcgggccgaccgcttcgaccccccgccgaccggcgcctgggacctggccgccctgcggctggcctacgaggggtggctgcaggccgccgacgacctggtcgaacagcacctcgccgcccacgaggaccccgacgaggccgcgttcgcggcccggttccacctcgtccacgagtggcgcaagttcctcttcaccgaccccgggctgcccgacgccctgctgccgcgcgactggccgggccacgccgcggccgagctgttcgcgggcgcggccggccggctcaagccgggggccgaccggttcgtggcccgctgcctgggcgactga

SEQ ID NO: 55201 - protein, 327 aa, Nocardioides sp. JS614
MPRPSLVTSSGPSPVRGFIAAIRAPSSCDVAAGLRGPGCAVRTDHYPLSDGDAEHSPPGARPGYWHTPDMQARSALFDVYGDHLRARGSEAPVAALVRLLDPVGIAAPAVRTAISRMVMQGWLEPVQLDGGRGYRTTTRADRRLDETGRRVYRRDAPAWDGHWHLAFVSPPPGRAARARLRAGLTFIGYAELADHVWVTPFERTELGSVLDRERASATTARADRFDPPPTGAWDLAALRLAYEGWLQAADDLVEQHLAAHEDPDEAAFAARFHLVHEWRKFLFTDPGLPDALLPRDWPGHAAAELFAGAAGRLKPGADRFVARCLGD

SEQ ID NO: 55202 - DNA, 924 bp, Pseudomonas putida
  CDS (1)..(924): transl_table=11
atgagcaatcttgccccactgaacaacctgatcactcgctttcaggagcagacgccaatccgcgccagctcactgatcatcaccttgtacggcgatgccatcgagccccatggggggaccgtctggctgggtagcctgatcaacctgctggagccgatcggcatcaacgaacgactgatccgcacgtcgatctttcgcctcaccaaagagggttggctcaccgctgaaaaagttggccgacgcagttactacagcctgacgggcactggccgccgccgtttcgaaaaagccttcaaacgtgtctacagcccgagccaaccggcctgggatggcgcctggacgctggtgttgctgtcgcagcttgaggccggcaagcgcaaggccttgcgtgaagagctggaatggcaggggtttggcgttatggcgccgaacctgcttggctgcccacgggcagaccgcgctgatctgaccgcaaccttgcgtgacctggaagccagcgacgacagtatcgtcttcgaaacccacacccaggaagtgctcgcgtccaaggccatgcgcgcccaggtgcgggagagctggcgtatcgatgagctggggcagcagtacagcgagttcatccagctgttcaggccgctgtggcagagcctgaaagagcagcaactgctcgatgcgcaagattgtttcctggcgcgcaccctgctgattcacgagtaccgccgcctgctgttgcgcgacccgcaactgccagacgagctgctgccaggggactgggagggaagggctgcgcggcagttgtgccgcaacctgtatcggctggtgtttgccaaggcagaggagtggctgaatgcagccctggagacggccgacgggcctttgccggatgtgaacgagggtttctaccagcgctttggcgggctggcctga

SEQ ID NO: 55203 - protein, 307 aa, Pseudomonas putida
MSNLAPLNNLITRFQEQTPIRASSLIITLYGDAIEPHGGTVWLGSLINLLEPIGINERLIRTSIFRLTKEGWLTAEKVGRRSYYSLTGTGRRRFEKAFKRVYSPSQPAWDGAWTLVLLSQLEAGKRKALREELEWQGFGVMAPNLLGCPRADRADLTATLRDLEASDDSIVFETHTQEVLASKAMRAQVRESWRIDELGQQYSEFIQLFRPLWQSLKEQQLLDAQDCFLARTLLIHEYRRLLLRDPQLPDELLPGDWEGRAARQLCRNLYRLVFAKAEEWLNAALETADGPLPDVNEGFYQRFGGLA

SEQ ID NO: 55204 - DNA, 927 bp, Klebsiella sp
  CDS (1)..(927): transl_table=11
atgagtaaactcgatacctttattcaacaggccacggaaacgatgcccatcagtggaacctcgcttattgcttctttatacggcgacgccttgctccaacgcggtggggaggtctggctcggcagcgtagcggcgctgctggagggactgggcttcggcgaacgattcgtgcgtactgcgctgttccgcctgaataaagaagagtggcttgacgtggtgcgcattggccgccgaagcttctaccgtctcagcgacaaaggtctgcgcttgactcgccgcgccgaacataaaatctatcgcgtcagcgccccggaatgggacggcacctggctactgctactgtcggaagggcttgagaagagcacgctggcggaggtcaaaaaacagctgctatggcagggatttggcgcgctggcgccgagcctgctggcttcaccgtcgcaaaagctggcggatgtgcaatctctgctgcacgacgcgggcgtggcggaaaatgtcatctgcttcgaagcccactccccgctggcgctctcccgggcggcgctgcgcgcccgcgttgaagagtgctggcatctcaccgaacagaacgcgatgtatgagacgtttatcaatttgtttcgtcctctgctgccgctgcttcgcgactgcgagcccgcagaactgacgcccgaacgctgctttcacattcaactactgctgattcacctctaccgccgggtggtgcttaaggatccgctgctgcccgaagaactgctccctgcacactgggccgggcaaaccgcgcgccagctgtgcatcaatatttatcaacgcgttgcgcccggcgcgctggccttcgtcggcgagaggggcgaaagctcggtgggggaacttcccgcgccggggccgctctatttccagcgtttcggcggactgtcgggcgtataa

SEQ ID NO: 55205 - protein, 308 aa, Klebsiella sp
MSKLDTFIQQATETMPISGTSLIASLYGDALLQRGGEVWLGSVAALLEGLGFGERFVRTALFRLNKEEWLDVVRIGRRSFYRLSDKGLRLTRRAEHKIYRVSAPEWDGTWLLLLSEGLEKSTLAEVKKQLLWQGFGALAPSLLASPSQKLADVQSLLHDAGVAENVICFEAHSPLALSRAALRARVEECWHLTEQNAMYETFINLFRPLLPLLRDCEPAELTPERCFHIQLLLIHLYRRVVLKDPLLPEELLPAHWAGQTARQLCINIYQRVAPGALAFVGERGESSVGELPAPGPLYFQRFGGLSGV

SEQ ID NO: 55206 - DNA, 924 bp, Pseudomonas sp
  CDS (1)..(924): transl_table=11
atgtcgtccctcacaccgctcgaccatctgatcgaccgtttccagcagcagacgccgattcgcgccagttccctgatcatcaccctctatggcgatgccatcgaaccccgtggcggcaccgtgtggctgggcagcctgatccagttgctcgaacccatgggcatcaacgagcggctgatccgcacctcgatctttcgcctgaccaaggaaaactggctgactgccgagaaggtcggccggcgcagctactacagcctgaccggcaccgggcggcggcgtttcgagaaagccttcaagcgggtctacgctgccaatccgccggcctgggatggctcctggtgcctggcggtgctgactcaattgccccaggacaagcgcaagatcgttcgcgaagaactggagtggcagggcttcggcgccatctcgccgggggtgctgggctgcccgcgctgcgaccgggccgacgtcaacgccaccctggtggaccttggcgcccaggaagacaccatcctcttcgaaaccaccgcccaggatgtgctggcctccaaggccctgcgcatgcaggtgcgcgagagctggaagatcgacgaactggcggcgcactacagcgagttcatccagttgttccgccccttgtggcagagcctcaaggaacaggacagcctcgacccgaaagcctgcttcctcgcccgcgtgctgctgattcacgagtaccgcaagctgctgctgcgtgatccgcaattgcccgacgagctgctgccgggcgactgggaaggccgtgctgcccggcagctgtgccgcaacatctaccgcctgatccatggcgctgcggagcagtggctggaagcggcgatggaaaccgccgacgggccgctgcccgaggccggggaaggtttctacaagcgctttggcgggctgggctga

SEQ ID NO: 55207 - protein, 307 aa, Pseudomonas sp
MSSLTPLDHLIDRFQQQTPIRASSLIITLYGDAIEPRGGTVWLGSLIQLLEPMGINERLIRTSIFRLTKENWLTAEKVGRRSYYSLTGTGRRRFEKAFKRVYAANPPAWDGSWCLAVLTQLPQDKRKIVREELEWQGFGAISPGVLGCPRCDRADVNATLVDLGAQEDTILFETTAQDVLASKALRMQVRESWKIDELAAHYSEFIQLFRPLWQSLKEQDSLDPKACFLARVLLIHEYRKLLLRDPQLPDELLPGDWEGRAARQLCRNIYRLIHGAAEQWLEAAMETADGPLPEAGEGFYKRFGGLG

SEQ ID NO: 55208 - DNA, 924 bp, Pseudomonas sp
  CDS (1)..(924): transl_table=11
atgacgtccctcgccccactgaaccgcctgattacccgctttcaggagcagacgccgatccgcgccagctcgctgatcattactttttacggcgacgccatcgagccccacggcggcaccgtttggctgggcagcctgatccagctgctggagccgatgggaatcaacgagcgcttgatccgcacctcgattttccgcctgaccaaggagggctggctgagcgcggaaaaggttggccggcgcagctactacagccttaccggtaccggccggcgccgcttcgagaaggccttcaagcgcgtctacagctccagcctgccggcctgggatggctcctggtgcctggcgttgctctcgcaactgccccaggacaagcgcaaacaggtgcgtgaggaactggagtggcaaggctttggtgcgatctcgcccgtcgtcctggcctgcccgcgctgcgaccgggtggatgtggccgccacgctgcaggatctcgacgccctggaagacaccatcctcttcgacacttacgctcaggacgtgctcgcgtccaaggccctgcgcatgcaggtgcgcgagagctggaagatcgacgaactggcgtcccactacagcgagttcatccagctgttccgtccgctctggcaagccttgcgcgagaaggacagcctacagcctgcggactgcttccttgcccgaatcctgctcatccatgagtaccggaagttgctgctgcgcgacccgcagttgcccgacgaactgctcccgggcgactgggaagggcgcgcggcacggcaactgtgccgcaatatctatcgtctgattcacgctgaagctgagcagtggctgaacgatactctggagaccgctgacggcccgttgccggacgtgggggaaagtttctaccaacgctttggaggattagggtaa

SEQ ID NO: 55209 - protein, 307 aa, Pseudomonas sp
MTSLAPLNRLITRFQEQTPIRASSLIITFYGDAIEPHGGTVWLGSLIQLLEPMGINERLIRTSIFRLTKEGWLSAEKVGRRSYYSLTGTGRRRFEKAFKRVYSSSLPAWDGSWCLALLSQLPQDKRKQVREELEWQGFGAISPVVLACPRCDRVDVAATLQDLDALEDTILFDTYAQDVLASKALRMQVRESWKIDELASHYSEFIQLFRPLWQALREKDSLQPADCFLARILLIHEYRKLLLRDPQLPDELLPGDWEGRAARQLCRNIYRLIHAEAEQWLNDTLETADGPLPDVGESFYQRFGGLG

SEQ ID NO: 55210 - DNA, 618 bp, Azoarcus evansii
  CDS (1)..(618): transl_table=11
atgaaaagccgttttctcgaacagtggatcaacgactacctggccgagcgccgggtgcgcgcgaactccctgatcatcaccgtctacggcgacttcatcgcgccgcacggcggcaccgtctggctcggcagcttcatccggctggtcgagcccctgggcctgaacgagcgaatggtgcgcaccagcgtgtatcgcctgtcgcaggacaactggctggaatcggaacagatcgggcgcaagagctactacagcctcacggcctcgggccgccggcgcttcgagcacgcctaccgccgcatctacgacaccccgcaggacacctggaacggcgaatggcagctggtcgtgctgccgtccacgctgggctcgcccgagcgcgacaccctgcgcaaggagctgtcgtgggcgggttacggcaacgtcgcaccgggcgtcatgggccacccatcgcccgacaccgaaacgctgcaggaaatccttcaggacaccggcacgcaggacaaggtcgtgcccatgcaggcgtcgacgatcggcgccctgtcgaccaagccgctgcaggatcttgcacgcgaatgctggaatctcgacgccatcgaggcgacctacagcgaattctag

SEQ ID NO: 55211 - protein, 205 aa, Azoarcus evansii
MKSRFLEQWINDYLAERRVRANSLIITVYGDFIAPHGGTVWLGSFIRLVEPLGLNERMVRTSVYRLSQDNWLESEQIGRKSYYSLTASGRRRFEHAYRRIYDTPQDTWNGEWQLVVLPSTLGSPERDTLRKELSWAGYGNVAPGVMGHPSPDTETLQEILQDTGTQDKVVPMQASTIGALSTKPLQDLARECWNLDAIEATYSEF

SEQ ID NO: 55212 - DNA, 27 bp, Artificial sequence
  Primer sequence
atgagtaaacttgatacttttatccaa

SEQ ID NO: 55213 - DNA, 26 bp, Artificial sequence
  Primer sequence
ttatctgataaattggcataacgcct

SEQ ID NO: 55214 - protein, 276 aa, Artificial sequence
  Consensus
  Variant (4)..(4): Xaa in position 4 is any amino acid
  Variant (10)..(10): Xaa in position 10 is any amino acid
  Variant (12)..(16): Xaa in position 12 to 16 is any amino acid
  Variant (17)..(17): Xaa in position 17 is any or no amino acid
  Variant (19)..(22): Xaa in position 19 to 22 is any amino acid
  Variant (25)..(25): Xaa in position 25 is any amino acid
  Variant (28)..(30): Xaa in position 28 to 30 is any amino acid
  Variant (32)..(36): Xaa in position 32 to 36 is any amino acid
  Variant (39)..(39): Xaa in position 39 is any amino acid
  Variant (42)..(42): Xaa in position 42 is any amino acid
  Variant (45)..(49): Xaa in position 45 to 49 is any amino acid
  Variant (51)..(53): Xaa in position 51 to 53 is any amino acid
  Variant (55)..(56): Xaa in position 55 to 56 is any or no amino acid
  Variant (58)..(59): Xaa in position 58 to 59 is any amino acid
  Variant (61)..(61): Xaa in position 61 is any or no amino acid
  Variant (63)..(63): Xaa in position 63 is any amino acid
  Variant (66)..(67): Xaa in position 66 to 67 is any amino acid
  Variant (69)..(74): Xaa in position 69 to 74 is any amino acid
  Variant (76)..(77): Xaa in position 76 to 77 is any amino acid
  Variant (81)..(87): Xaa in position 81 to 87 is any amino acid
  Variant (88)..(92): Xaa in position 88 to 92 is any or no amino acid
  Variant (94)..(94): Xaa in position 94 is any amino acid
  Variant (96)..(99): Xaa in position 96 to 99 is any amino acid
  Variant (100)..(108): Xaa in position 100 to 108 is any or no amino acid
  Variant (110)..(111): Xaa in position 110 to 111 is any amino acid
  Variant (114)..(115): Xaa in position 114 to 115 is any amino acid
  Variant (117)..(119): Xaa in position 117 to 119 is any amino acid
  Variant (123)..(123): Xaa in position 123 is any amino acid
  Variant (125)..(131): Xaa in position 125 to 131 is any amino acid
  Variant (133)..(138): Xaa in position 133 to 138 is any amino acid
  Variant (139)..(145): Xaa in position 139 to 145 is any or no amino acid
  Variant (147)..(163): Xaa in position 147 to 163 is any amino acid
  Variant (164)..(181): Xaa in position 164 to 181 is any or no amino acid
  Variant (183)..(183): Xaa in position 183 is any amino acid
  Variant (185)..(186): Xaa in position 185 to 186 is any amino acid
  Variant (188)..(190): Xaa in position 188 to 190 is any amino acid
  Variant (192)..(193): Xaa in position 192 to 193 is any amino acid
  Variant (195)..(208): Xaa in position 195 to 208 is any amino acid
  Variant (209)..(226): Xaa in position 209 to 226 is any or no amino acid
  Variant (228)..(232): Xaa in position 228 to 232 is any amino acid
  Variant (236)..(236): Xaa in position 236 is any amino acid
  Variant (239)..(243): Xaa in position 239 to 243 is any amino acid
  Variant (246)..(246): Xaa in position 246 is any amino acid
  Variant (249)..(250): Xaa in position 249 to 250 is any amino acid
  Variant (254)..(255): Xaa in position 254 to 255 is any amino acid
  Variant (257)..(257): Xaa in position 257 is any amino acid
  Variant (259)..(260): Xaa in position 259 to 260 is any amino acid
  Variant (262)..(263): Xaa in position 262 to 263 is any amino acid
  Variant (265)..(271): Xaa in position 265 to 271 is any amino acid
  Variant (273)..(275): Xaa in position 273 to 275 is any amino acid
SLIXTLYGDXIXXXXXXVXXXXLIXLLXXXGXXXXXVRXAVXRLXXXXXLXXXRXXGXXSXYXLSXXGXXXXXXAXXRIYXXXXXXXXXXXXWXLXXXXXXXXXXXXXRXXLRXXLXXXGFGXLXXXXXXXPXXXXXXXXXXXXXLXXXXXXXXXXXXXXXXXXXXXXXXXXXXXXXXXXXWXLXXLXXXYXXFXXXXXXXXXXXXXXXXXXXXXXXXXXXXXXXXFXXXXXLVHXYRXXXXXDPXLPXXLLPXXWXGXXAXXLXXXXXXXLXXXA

SEQ ID NO: 55215 - protein, 73 aa, Artificial sequence
  Consensus
  Variant (2)..(23): Xaa in position 2 to 23 is any amino acid
  Variant (25)..(30): Xaa in position 25 to 30 is any amino acid
  Variant (32)..(32): Xaa in position 32 is Ala, Gly, Ser, Thr or Val
  Variant (33)..(33): Xaa in position 33 is Ala, Gly, Ser or Val
  Variant (34)..(35): Xaa in position 34 to 35 is any amino acid
  Variant (37)..(52): Xaa in position 37 to 52 is any amino acid
  Variant (53)..(56): Xaa in position 53 to 56 is any or no amino acid
  Variant (58)..(58): Xaa in position 58 is Ala, Asp, Ser or Thr
  Variant (59)..(60): Xaa in position 59 to 60 is any amino acid
  Variant (61)..(61): Xaa in position 61 is Ala, Gly or Thr
  Variant (62)..(67): Xaa in position 62 to 67 is any amino acid
  Variant (68)..(68): Xaa in position 68 is Ala, Gly or Val
  Variant (69)..(71): Xaa in position 69 to 71 is any amino acid
  Variant (72)..(72): Xaa in position 72 is Ile, Leu, Met or Val
  Variant (73)..(73): Xaa in position 73 is Phe or Tyr
GXXXXXXXXXXXXXXXXXXXXXXGXXXXXXRXXXXRXXXXXXXXXXXXXXXXXXXXLXXXXXXXXXXXXXXXX

SEQ ID NO: 55216 - protein, 24 aa, Artificial sequence
  Consensus
  Variant (2)..(3): Xaa in position 2 to 3 is any amino acid
  Variant (4)..(4): Xaa in position 4 is any or no amino acid
  Variant (6)..(9): Xaa in position 6 to 9 is any amino acid
  Variant (10)..(11): Xaa in position 10 to 11 is any or no amino acid
  Variant (13)..(13): Xaa in position 13 is Phe or Tyr
  Variant (14)..(14): Xaa in position 14 is Ala or Gly
  Variant (15)..(21): Xaa in position 15 to 21 is any amino acid
  Variant (22)..(22): Xaa in position 22 is Ala, Gly, Ile, Leu or Val
  Variant (23)..(23): Xaa in position 23 is any amino acid
  Variant (24)..(24): Xaa in position 24 is Pro or Val
RXXXRXXXXXXGXXXXXXXXXXXX

SEQ ID NO: 55217 - protein, 21 aa, Artificial sequence
  Consensus
  Variant (2)..(6): Xaa in position 2 to 6 is any amino acid
  Variant (7)..(7): Xaa in position 7 is Asp, Glu or His
  Variant (9)..(9): Xaa in position 9 is any amino acid
  Variant (10)..(10): Xaa in position 10 is Phe, Ile, Leu or Val
  Variant (12)..(15): Xaa in position 12 to 15 is any amino acid
  Variant (17)..(18): Xaa in position 17 to 18 is any amino acid
  Variant (20)..(20): Xaa in position 20 is any amino acid
RXXXXXXPXXPXXXXPXXWXG

SEQ ID NO: 55218 - DNA, 1758 bp, Escherichia coli K12; identical to SEQ ID NO: 20139
  CDS (1)..(1758): transl_table=11

SEQ ID NO: 55219 - protein, 585 aa, Escherichia coli K12; identical to SEQ ID NO: 20140

SEQ ID NO: 55220 - DNA, 1761 bp, Pseudomonas aeruginosa PAO1; identical to SEQ ID NO: 20141
  CDS (1)..(1761): transl_table=11

SEQ ID NO: 55221 - protein, 586 aa, Pseudomonas aeruginosa PAO1; identical to SEQ ID NO: 20142

SEQ ID NO: 55222 - DNA, 1764 bp, Yersinia pestis CO92; identical to SEQ ID NO: 20143
  CDS (1)..(1764): transl_table=11

SEQ ID NO: 55223 - protein, 587 aa, Yersinia pestis CO92; identical to SEQ ID NO: 20144

SEQ ID NO: 55224 - DNA, 1701 bp, Fusobacterium nucleatum subsp. nucleatum ATCC 25586; identical to SEQ ID NO: 20145
  CDS (1)..(1701): transl_table=11

SEQ ID NO: 55225 - protein, 566 aa, Fusobacterium nucleatum subsp. nucleatum ATCC 25586; identical to SEQ ID NO: 20146

SEQ ID NO: 55226 - DNA, 1761 bp, Xanthomonas axonopodis pv. citri str. 306; identical to SEQ ID NO: 20147
  CDS (1)..(1761): transl_table=11

SEQ ID NO: 55227 - protein, 586 aa, Xanthomonas axonopodis pv. citri str. 306; identical to SEQ ID NO: 20148

SEQ ID NO: 55228 - DNA, 1764 bp, Yersinia pestis KIM; identical to SEQ ID NO: 20149
  CDS (1)..(1764): transl_table=11

SEQ ID NO: 55229 - protein, 587 aa, Yersinia pestis KIM; identical to SEQ ID NO: 20150

SEQ ID NO: 55230 - DNA, 1758 bp, Escherichia coli CFT073; identical to SEQ ID NO: 20151
  CDS (1)..(1758): transl_table=11

SEQ ID NO: 55231 - protein, 585 aa, Escherichia coli CFT073; identical to SEQ ID NO: 20152

SEQ ID NO: 55232 - DNA, 1758 bp, Pseudomonas syringae pv. tomato str. DC3000; identical to SEQ ID NO: 20153
  CDS (1)..(1758): transl_table=11

SEQ ID NO: 55233 - protein, 585 aa, Pseudomonas syringae pv. tomato str. DC3000; identical to SEQ ID NO: 20154

SEQ ID NO: 55234 - DNA, 1764 bp, Yersinia pseudotuberculosis IP 32953; identical to SEQ ID NO: 20155
  CDS (1)..(1764): transl_table=11

SEQ ID NO: 55235 - protein, 587 aa, Yersinia pseudotuberculosis IP 32953; identical to SEQ ID NO: 20156

SEQ ID NO: 55236 - DNA, 1764 bp, Xanthomonas campestris pv. campestris str. 8004; identical to SEQ ID NO: 20157
  CDS (1)..(1764): transl_table=11

SEQ ID NO: 55237 - protein, 587 aa, Xanthomonas campestris pv. campestris str. 8004; identical to SEQ ID NO: 20158

SEQ ID NO: 55238 - DNA, 1758 bp, Pseudomonas fluorescens Pf-5; identical to SEQ ID NO: 20159
  CDS (1)..(1758): transl_table=11

SEQ ID NO: 55239 - protein, 585 aa, Pseudomonas fluorescens Pf-5; identical to SEQ ID NO: 20160

SEQ ID NO: 55240 - DNA, 1776 bp, Ralstonia eutropha JMP134; identical to SEQ ID NO: 20161
  CDS (1)..(1776): transl_table=11

SEQ ID NO: 55241 - protein, 591 aa, Ralstonia eutropha JMP134; identical to SEQ ID NO: 20162

SEQ ID NO: 55242 - DNA, 1713 bp, Fusobacterium nucleatum subsp. vincentii ATCC 49256; identical to SEQ ID NO: 20163
  CDS (1)..(1713): transl_table=11

SEQ ID NO: 55243 - protein, 570 aa, Fusobacterium nucleatum subsp. vincentii ATCC 49256; identical to SEQ ID NO: 20164

SEQ ID NO: 55244 - DNA, 1791 bp, Ralstonia eutropha JMP134; identical to SEQ ID NO: 20165
  CDS (1)..(1791)

SEQ ID NO: 55245 - protein, 596 aa, Ralstonia eutropha JMP134; identical to SEQ ID NO: 20166

SEQ ID NO: 55246 - DNA, 1761 bp, Pseudomonas aeruginosa UCBPP-PA14; identical to SEQ ID NO: 20167
  CDS (1)..(1761)

SEQ ID NO: 55247 - protein, 586 aa, Pseudomonas aeruginosa UCBPP-PA14; identical to SEQ ID NO: 20168

SEQ ID NO: 55248 - DNA, 1758 bp, Burkholderia cepacia R18194; identical to SEQ ID NO: 20169
  CDS (1)..(1758)

SEQ ID NO: 55249 - protein, 585 aa, Burkholderia cepacia R18194; identical to SEQ ID NO: 20170

SEQ ID NO: 55250 - DNA, 1770 bp, Burkholderia vietnamiensis G4; identical to SEQ ID NO: 20171
  CDS (1)..(1770): transl_table=11

SEQ ID NO: 55251 - protein, 589 aa, Burkholderia vietnamiensis G4; identical to SEQ ID NO: 20172

SEQ ID NO: 55252 - DNA, 1770 bp, Burkholderia cenocepacia AU 1054; identical to SEQ ID NO: 20173
  CDS (1)..(1770): transl_table=11

SEQ ID NO: 55253 - protein, 589 aa, Burkholderia cenocepacia AU 1054; identical to SEQ ID NO: 20174

SEQ ID NO: 55254 - DNA, 1800 bp, Burkholderia ambifaria AMMD; identical to SEQ ID NO: 20175
  CDS (1)..(1800): transl_table=11

SEQ ID NO: 55255 - protein, 599 aa, Burkholderia ambifaria AMMD; identical to SEQ ID NO: 20176

SEQ ID NO: 55256 - DNA, 23 bp, Artificial sequence
  Primer sequence
atggaaaattcacgcatccctgg

SEQ ID NO: 55257 - DNA, 24 bp, Artificial sequence
  Primer sequence
ttagttatcacgacgcaccgccat

SEQ ID NO: 55258 - protein, 589 aa, Artificial sequence; identical to SEQ ID NO: 20179
  Consensus
  Variant (2)..(4): Xaa in position 2 to 4 is any amino acid
  Variant (6)..(7): Xaa in position 6 to 7 is any amino acid
  Variant (9)..(11): Xaa in position 9 to 11 is any amino acid
  Variant (13)..(15): Xaa in position 13 to 15 is any amino acid
  Variant (22)..(29): Xaa in position 22 to 29 is any amino acid
  Variant (30)..(35): Xaa in position 30 to 35 is any or no amino acid
  Variant (39)..(39): Xaa in position 39 is any amino acid
  Variant (50)..(50): Xaa in position 50 is any amino acid
  Variant (53)..(53): Xaa in position 53 is any amino acid
  Variant (57)..(57): Xaa in position 57 is any amino acid
  Variant (60)..(62): Xaa in position 60 to 62 is any amino acid
  Variant (73)..(73): Xaa in position 73 is any amino acid
  Variant (75)..(75): Xaa in position 75 is any amino acid
  Variant (77)..(77): Xaa in position 77 is any amino acid
  Variant (80)..(80): Xaa in position 80 is any or no amino acid
  Variant (83)..(87): Xaa in position 83 to 87 is any amino acid
  Variant (89)..(89): Xaa in position 89 is any amino acid
  Variant (92)..(93): Xaa in position 92 to 93 is any amino acid
  Variant (96)..(97): Xaa in position 96 to 97 is any amino acid
  Variant (99)..(103): Xaa in position 99 to 103 is any amino acid
  Variant (105)..(106): Xaa in position 105 to 106 is any amino acid
  Variant (108)..(108): Xaa in position 108 is any amino acid
  Variant (110)..(110): Xaa in position 110 is any amino acid
  Variant (121)..(121): Xaa in position 121 is any amino acid
  Variant (125)..(125): Xaa in position 125 is any amino acid
  Variant (131)..(131): Xaa in position 131 is any amino acid
  Variant (134)..(134): Xaa in position 134 is any amino acid
  Variant (143)..(143): Xaa in position 143 is any amino acid
  Variant (153)..(153): Xaa in position 153 is any amino acid
  Variant (156)..(156): Xaa in position 156 is any amino acid
  Variant (159)..(161): Xaa in position 159 to 161 is any amino acid
  Variant (164)..(164): Xaa in position 164 is any amino acid
  Variant (173)..(173): Xaa in position 173 is any amino acid
  Variant (180)..(181): Xaa in position 180 to 181 is any amino acid
  Variant (184)..(184): Xaa in position 184 is any amino acid
  Variant (187)..(188): Xaa in position 187 to 188 is any amino acid
  Variant (190)..(190): Xaa in position 190 is any amino acid
  Variant (193)..(193): Xaa in position 193 is any amino acid
  Variant (195)..(195): Xaa in position 195 is any amino acid
  Variant (199)..(199): Xaa in position 199 is any amino acid
  Variant (203)..(203): Xaa in position 203 is any amino acid
  Variant (206)..(207): Xaa in position 206 to 207 is any amino acid
  Variant (209)..(209): Xaa in position 209 is any amino acid
  Variant (213)..(213): Xaa in position 213 is any amino acid
  Variant (216)..(216): Xaa in position 216 is any amino acid
  Variant (219)..(219): Xaa in position 219 is any amino acid
  Variant (229)..(229): Xaa in position 229 is any amino acid
  Variant (235)..(236): Xaa in position 235 to 236 is any amino acid
  Variant (239)..(240): Xaa in position 239 to 240 is any amino acid
  Variant (243)..(244): Xaa in position 243 to 244 is any amino acid
  Variant (246)..(246): Xaa in position 246 is any amino acid
  Variant (248)..(249): Xaa in position 248 to 249 is any amino acid
  Variant (252)..(254): Xaa in position 252 to 254 is any amino acid
  Variant (256)..(256): Xaa in position 256 is any amino acid
  Variant (269)..(270): Xaa in position 269 to 270 is any amino acid
  Variant (272)..(277): Xaa in position 272 to 277 is any amino acid
  Variant (280)..(282): Xaa in position 280 to 282 is any amino acid
  Variant (284)..(295): Xaa in position 284 to 295 is any amino acid
  Variant (298)..(307): Xaa in position 298 to 307 is any amino acid
  Variant (309)..(310): Xaa in position 309 to 310 is any amino acid
  Variant (312)..(317): Xaa in position 312 to 317 is any amino acid
  Variant (318)..(321): Xaa in position 318 to 321 is any or no amino acid
  Variant (323)..(328): Xaa in position 323 to 328 is any amino acid
  Variant (331)..(335): Xaa in position 331 to 335 is any amino acid
  Variant (337)..(337): Xaa in position 337 is any amino acid
  Variant (340)..(340): Xaa in position 340 is any amino acid
  Variant (343)..(345): Xaa in position 343 to 345 is any amino acid
  Variant (360)..(362): Xaa in position 360 to 362 is any amino acid
  Variant (364)..(366): Xaa in position 364 to 366 is any amino acid
  Variant (369)..(370): Xaa in position 369 to 370 is any amino acid
  Variant (373)..(374): Xaa in position 373 to 374 is any amino acid
  Variant (377)..(377): Xaa in position 377 is any amino acid
  Variant (379)..(379): Xaa in position 379 is any amino acid
  Variant (382)..(382): Xaa in position 382 is any amino acid
  Variant (386)..(386): Xaa in position 386 is any amino acid
  Variant (389)..(390): Xaa in position 389 to 390 is any amino acid
  Variant (392)..(393): Xaa in position 392 to 393 is any amino acid
  Variant (396)..(397): Xaa in position 396 to 397 is any amino acid
  Variant (400)..(401): Xaa in position 400 to 401 is any amino acid
  Variant (403)..(406): Xaa in position 403 to 406 is any amino acid
  Variant (407)..(408): Xaa in position 407 to 408 is any or no amino acid
  Variant (427)..(433): Xaa in position 427 to 433 is any amino acid
  Variant (434)..(440): Xaa in position 434 to 440 is any or no amino acid
  Variant (448)..(449): Xaa in position 448 to 449 is any amino acid
  Variant (452)..(453): Xaa in position 452 to 453 is any amino acid
  Variant (455)..(456): Xaa in position 455 to 456 is any amino acid
  Variant (459)..(461): Xaa in position 459 to 461 is any amino acid
  Variant (463)..(465): Xaa in position 463 to 465 is any amino acid
  Variant (468)..(468): Xaa in position 468 is any or no amino acid
  Variant (470)..(471): Xaa in position 470 to 471 is any amino acid
  Variant (473)..(473): Xaa in position 473 is any amino acid
  Variant (477)..(479): Xaa in position 477 to 479 is any amino acid
  Variant (482)..(482): Xaa in position 482 is any amino acid
  Variant (484)..(484): Xaa in position 484 is any amino acid
  Variant (486)..(486): Xaa in position 486 is any amino acid
  Variant (500)..(500): Xaa in position 500 is any amino acid
  Variant (503)..(504): Xaa in position 503 to 504 is any amino acid
  Variant (506)..(507): Xaa in position 506 to 507 is any amino acid
  Variant (510)..(510): Xaa in position 510 is any amino acid
  Variant (514)..(514): Xaa in position 514 is any amino acid
  Variant (517)..(518): Xaa in position 517 to 518 is any amino acid
  Variant (521)..(521): Xaa in position 521 is any amino acid
  Variant (534)..(535): Xaa in position 534 to 535 is any amino acid
  Variant (538)..(539): Xaa in position 538 to 539 is any amino acid
  Variant (541)..(542): Xaa in position 541 to 542 is any amino acid
  Variant (545)..(548): Xaa in position 545 to 548 is any amino acid
  Variant (549)..(549): Xaa in position 549 is any or no amino acid
  Variant (554)..(554): Xaa in position 554 is any amino acid
  Variant (558)..(558): Xaa in position 558 is any amino acid
  Variant (562)..(562): Xaa in position 562 is any amino acid
  Variant (565)..(566): Xaa in position 565 to 566 is any amino acid
  Variant (570)..(570): Xaa in position 570 is any amino acid
  Variant (572)..(573): Xaa in position 572 to 573 is any amino acid
  Variant (575)..(575): Xaa in position 575 is any amino acid
  Variant (578)..(579): Xaa in position 578 to 579 is any amino acid
  Variant (588)..(588): Xaa in position 588 is any amino acid

SEQ ID NO: 55259 - protein, 9 aa, Artificial sequence
  Consensus
  Variant (8)..(8): Xaa in position 8 is Ala or Gly
HRGHEHSXR

SEQ ID NO: 55260 - protein, 96 aa, Artificial sequence; identical to SEQ ID NO: 20181
  Consensus
  Variant (5)..(5): Xaa in position 5 is any amino acid
  Variant (6)..(6): Xaa in position 6 is Ile, Leu or Val
  Variant (8)..(8): Xaa in position 8 is Ala, Cys, Gly or Ser
  Variant (9)..(9): Xaa in position 9 is Leu or Met
  Variant (11)..(11): Xaa in position 11 is Leu or Val
  Variant (17)..(17): Xaa in position 17 is any amino acid
  Variant (18)..(18): Xaa in position 18 is Ile or Val
  Variant (24)..(24): Xaa in position 24 is Phe or Leu
  Variant (27)..(27): Xaa in position 27 is any amino acid
  Variant (30)..(30): Xaa in position 30 is any amino acid
  Variant (32)..(35): Xaa in position 32 to 35 is any amino acid
  Variant (36)..(36): Xaa in position 36 is Lys or Arg
  Variant (38)..(38): Xaa in position 38 is any amino acid
  Variant (40)..(40): Xaa in position 40 is Phe or Tyr
  Variant (41)..(41): Xaa in position 41 is Ile or Val
  Variant (42)..(42): Xaa in position 42 is Asn or Thr
  Variant (47)..(47): Xaa in position 47 is Ala, Gly or Pro
  Variant (48)..(48): Xaa in position 48 is any amino acid
  Variant (49)..(49): Xaa in position 49 is Phe, Trp or Tyr
  Variant (51)..(51): Xaa in position 51 is Ser or Thr
  Variant (54)..(54): Xaa in position 54 is any amino acid
  Variant (55)..(55): Xaa in position 55 is Ala, Glu or Gln
  Variant (57)..(57): Xaa in position 57 is Ile or Val
  Variant (58)..(58): Xaa in position 58 is any amino acid
  Variant (60)..(60): Xaa in position 60 is Phe or Tyr
  Variant (61)..(61): Xaa in position 61 is any amino acid
  Variant (62)..(62): Xaa in position 62 is Ala, Asn, Gln, Ser or Thr
  Variant (64)..(64): Xaa in position 64 is any amino acid
  Variant (66)..(66): Xaa in position 66 is Ile or Val
  Variant (67)..(67): Xaa in position 67 is Ala or Thr
  Variant (68)..(68): Xaa in position 68 is Lys or Arg
  Variant (69)..(69): Xaa in position 69 is any amino acid
  Variant (71)..(71): Xaa in position 71 is Ala or Ser
  Variant (73)..(73): Xaa in position 73 is Asn or Arg
  Variant (74)..(74): Xaa in position 74 is Ile, Met or Val
  Variant (77)..(77): Xaa in position 77 is Asp or Gly
  Variant (79)..(79): Xaa in position 79 is His or Tyr
  Variant (80)..(80): Xaa in position 80 is any amino acid
  Variant (81)..(81): Xaa in position 81 is Ala or Thr
  Variant (82)..(82): Xaa in position 82 is Ala, Gly or Ser
  Variant (83)..(83): Xaa in position 83 is any amino acid
  Variant (85)..(85): Xaa in position 85 is Ile or Val
  Variant (87)..(87): Xaa in position 87 is Ala, Asp or Ser
  Variant (89)..(89): Xaa in position 89 is Ala or Ser
  Variant (90)..(90): Xaa in position 90 is Ala, Gln or Thr
  Variant (93)..(93): Xaa in position 93 is Gln or Thr
  Variant (94)..(94): Xaa in position 94 is Ile, Leu or Val

SEQ ID NO: 55261 - protein, 53 aa, Artificial sequence; identical to SEQ ID NO: 20182
  Consensus
  Variant (2)..(2): Xaa in position 2 is any amino acid
  Variant (4)..(4): Xaa in position 4 is any amino acid
  Variant (5)..(5): Xaa in position 5 is any or no amino acid
  Variant (7)..(7): Xaa in position 7 is any or no amino acid
  Variant (9)..(9): Xaa in position 9 is any amino acid
  Variant (10)..(10): Xaa in position 10 is Asp, Glu, Gln, Arg or Ser
  Variant (11)..(11): Xaa in position 11 is any amino acid
  Variant (18)..(18): Xaa in position 18 is Ser or Thr
  Variant (22)..(22): Xaa in position 22 is Ile or Val
  Variant (24)..(24): Xaa in position 24 is Gln or Arg
  Variant (26)..(26): Xaa in position 26 is any amino acid
  Variant (27)..(27): Xaa in position 27 is Ala or Pro
  Variant (28)..(28): Xaa in position 28 is any amino acid
  Variant (30)..(31): Xaa in position 30 to 31 is any amino acid
  Variant (32)..(32): Xaa in position 32 is Ala, Gly, Ile or Pro
  Variant (33)..(33): Xaa in position 33 is Phe, Ile, Leu or Val
  Variant (35)..(36): Xaa in position 35 to 36 is any amino acid
  Variant (37)..(37): Xaa in position 37 is Ile or Val
  Variant (39)..(39): Xaa in position 39 is His, Lys or Arg
  Variant (40)..(40): Xaa in position 40 is any amino acid
  Variant (43)..(43): Xaa in position 43 is Asp, Asn or Gln
  Variant (44)..(44): Xaa in position 44 is Ala or Ser
  Variant (45)..(45): Xaa in position 45 is Ile, Pro or Val
  Variant (48)..(48): Xaa in position 48 is any amino acid
  Variant (52)..(52): Xaa in position 52 is any amino acid

SEQ ID NO: 55262 - protein, 93 aa, Artificial sequence; identical to SEQ ID NO: 20183
  Consensus
  Variant (7)..(7): Xaa in position 7 is Ala, Gly, Pro or Ser
  Variant (8)..(8): Xaa in position 8 is Asp, Glu or Ser
  Variant (10)..(11): Xaa in position 10 to 11 is any amino acid
  Variant (12)..(12): Xaa in position 12 is Ile or Val
  Variant (13)..(14): Xaa in position 13 to 14 is any amino acid
  Variant (17)..(17): Xaa in position 17 is any amino acid
  Variant (20)..(20): Xaa in position 20 is Ala or Gly
  Variant (21)..(21): Xaa in position 21 is Ala, Glu, Asn, Gln or Ser
  Variant (23)..(23): Xaa in position 23 is Ile, Leu or Val
  Variant (24)..(24): Xaa in position 24 is any amino acid
  Variant (25)..(25): Xaa in position 25 is Glu or Pro
  Variant (27)..(27): Xaa in position 27 is Ala or Gly
  Variant (28)..(28): Xaa in position 28 is any amino acid
  Variant (30)..(30): Xaa in position 30 is Ile, Leu or Val
  Variant (41)..(41): Xaa in position 41 is Glu or Lys
  Variant (42)..(42): Xaa in position 42 is any amino acid
  Variant (45)..(45): Xaa in position 45 is any amino acid
  Variant (46)..(46): Xaa in position 46 is Ala, Thr or Val
  Variant (48)..(48): Xaa in position 48 is Asn or Thr
  Variant (49)..(49): Xaa in position 49 is Asn or Ser
  Variant (51)..(51): Xaa in position 51 is any amino acid
  Variant (52)..(52): Xaa in position 52 is Ala, Asp, Glu, Gly, Asn or Gln
  Variant (53)..(53): Xaa in position 53 is Asp, Glu or Gly
  Variant (54)..(54): Xaa in position 54 is any amino acid
  Variant (55)..(55): Xaa in position 55 is Ala, Pro or Thr
  Variant (57)..(57): Xaa in position 57 is Met or Val
  Variant (60)..(60): Xaa in position 60 is any amino acid
  Variant (62)..(62): Xaa in position 62 is Ser or Thr
  Variant (64)..(64): Xaa in position 64 is any amino acid
  Variant (68)..(68): Xaa in position 68 is Glu, Gly, Gln, Ser or Thr
  Variant (71)..(72): Xaa in position 71 to 72 is any amino acid
  Variant (76)..(76): Xaa in position 76 is Asp, Glu or Arg
  Variant (78)..(81): Xaa in position 78 to 81 is any amino acid
  Variant (82)..(82): Xaa in position 82 is Ile or Val
  Variant (84)..(85): Xaa in position 84 to 85 is any amino acid
  Variant (89)..(89): Xaa in position 89 is Ser or Thr
  Variant (92)..(92): Xaa in position 92 is Leu or Met

SEQ ID NO: 55263 - DNA, 291 bp, Escherichia coli K12; identical to SEQ ID NO: 18608
  CDS (1)..(291): transl_table=11

SEQ ID NO: 55264 - protein, 96 aa, Escherichia coli K12; identical to SEQ ID NO: 18609

SEQ ID NO: 55265 - DNA, 216 bp, Bacteriophage 933W; identical to SEQ ID NO: 18610
  CDS (1)..(216): transl_table=11

SEQ ID NO: 55266 - protein, 71 aa, Bacteriophage 933W; identical to SEQ ID NO: 18611

SEQ ID NO: 55267 - DNA, 291 bp, Bacteriophage VT2-Sa; identical to SEQ ID NO: 18612
  CDS (1)..(291): transl_table=11

SEQ ID NO: 55268 - protein, 96 aa, Bacteriophage VT2-Sa; identical to SEQ ID NO: 18613

SEQ ID NO: 55269 - DNA, 315 bp, Escherichia coli O157:H7 EDL933; identical to SEQ ID NO: 18614
  CDS (1)..(315): transl_table=11

SEQ ID NO: 55270 - protein, 104 aa, Escherichia coli O157:H7 EDL933; identical to SEQ ID NO: 18615

SEQ ID NO: 55271 - DNA, 315 bp, Escherichia coli O157:H7 EDL933; identical to SEQ ID NO: 18616
  CDS (1)..(315): transl_table=11

SEQ ID NO: 55272 - protein, 104 aa, Escherichia coli O157:H7 EDL933; identical to SEQ ID NO: 18617

SEQ ID NO: 55273 - DNA, 273 bp, Escherichia coli O157:H7 EDL933; identical to SEQ ID NO: 18618
  CDS (1)..(273): transl_table=11

SEQ ID NO: 55274 - protein, 90 aa, Escherichia coli O157:H7 EDL933; identical to SEQ ID NO: 18619

SEQ ID NO: 55275 - DNA, 216 bp, Escherichia coli O157:H7; identical to SEQ ID NO: 18620
  CDS (1)..(216): transl_table=11

SEQ ID NO: 55276 - protein, 71 aa, Escherichia coli O157:H7; identical to SEQ ID NO: 18621

SEQ ID NO: 55277 - DNA, 207 bp, Escherichia coli O157:H7; identical to SEQ ID NO: 18622
  CDS (1)..(207): transl_table=11

SEQ ID NO: 55278 - protein, 68 aa, Escherichia coli O157:H7; identical to SEQ ID NO: 18623

SEQ ID NO: 55279 - DNA, 216 bp, Escherichia coli O157:H7; identical to SEQ ID NO: 18624
  CDS (1)..(216): transl_table=11

SEQ ID NO: 55280 - protein, 71 aa, Escherichia coli O157:H7; identical to SEQ ID NO: 18625

SEQ ID NO: 55281 - DNA, 216 bp, Escherichia coli O157:H7; identical to SEQ ID NO: 18626
  CDS (1)..(216): transl_table=11

SEQ ID NO: 55282 - protein, 71 aa, Escherichia coli O157:H7; identical to SEQ ID NO: 18627

SEQ ID NO: 55283 - DNA, 216 bp, Escherichia coli O157:H7; identical to SEQ ID NO: 18628
  CDS (1)..(216): transl_table=11

SEQ ID NO: 55284 - protein, 71 aa, Escherichia coli O157:H7; identical to SEQ ID NO: 18629

SEQ ID NO: 55285 - DNA, 207 bp, Escherichia coli O157:H7; identical to SEQ ID NO: 18630
  CDS (1)..(207): transl_table=11

SEQ ID NO: 55286 - protein, 68 aa, Escherichia coli O157:H7; identical to SEQ ID NO: 18631

SEQ ID NO: 55287 - DNA, 207 bp, Escherichia coli O157:H7; identical to SEQ ID NO: 18632
  CDS (1)..(207): transl_table=11

SEQ ID NO: 55288 - protein, 68 aa, Escherichia coli O157:H7; identical to SEQ ID NO: 18633

SEQ ID NO: 55289 - DNA, 216 bp, Shigella flexneri 2a str. 301; identical to SEQ ID NO: 18634
  CDS (1)..(216): transl_table=11

SEQ ID NO: 55290 - protein, 71 aa, Shigella flexneri 2a str. 301; identical to SEQ ID NO: 18635

SEQ ID NO: 55291 - DNA, 216 bp, Shigella flexneri 2a str. 301; identical to SEQ ID NO: 18636
  CDS (1)..(216): transl_table=11

SEQ ID NO: 55292 - protein, 71 aa, Shigella flexneri 2a str. 301; identical to SEQ ID NO: 18637

SEQ ID NO: 55293 - DNA, 321 bp, Escherichia coli CFT073; identical to SEQ ID NO: 18638
  CDS (1)..(321): transl_table=11

SEQ ID NO: 55294 - protein, 106 aa, Escherichia coli CFT073; identical to SEQ ID NO: 18639

SEQ ID NO: 55295 - DNA, 216 bp, Escherichia coli CFT073; identical to SEQ ID NO: 18640
  CDS (1)..(216): transl_table=11

SEQ ID NO: 55296 - protein, 71 aa, Escherichia coli CFT073; identical to SEQ ID NO: 18641

SEQ ID NO: 55297 - DNA, 216 bp, Shigella flexneri 2a str. 2457T; identical to SEQ ID NO: 18642
  CDS (1)..(216): transl_table=11

SEQ ID NO: 55298 - protein, 71 aa, Shigella flexneri 2a str. 2457T; identical to SEQ ID NO: 18643

SEQ ID NO: 55299 - DNA, 180 bp, Shigella flexneri 2a str. 2457T; identical to SEQ ID NO: 18644
  CDS (1)..(180): transl_table=11

SEQ ID NO: 55300 - protein, 59 aa, Shigella flexneri 2a str. 2457T; identical to SEQ ID NO: 18645

SEQ ID NO: 55301 - DNA, 213 bp, Yersinia pseudotuberculosis IP 32953; identical to SEQ ID NO: 18646
  CDS (1)..(213): transl_table=11

SEQ ID NO: 55302 - protein, 70 aa, Yersinia pseudotuberculosis IP 32953; identical to SEQ ID NO: 18647

SEQ ID NO: 55303 - DNA, 216 bp, Shigella sonnei Ss046; identical to SEQ ID NO: 18648
  CDS (1)..(216): transl_table=11

SEQ ID NO: 55304 - protein, 71 aa, Shigella sonnei Ss046; identical to SEQ ID NO: 18649

SEQ ID NO: 55305 - DNA, 216 bp, Shigella sonnei Ss046; identical to SEQ ID NO: 18650
  CDS (1)..(216): transl_table=11

SEQ ID NO: 55306 - protein, 71 aa, Shigella sonnei Ss046; identical to SEQ ID NO: 18651

SEQ ID NO: 55307 - DNA, 207 bp, Bacteriophage H19B; identical to SEQ ID NO: 18652
  CDS (1)..(207): transl_table=11

SEQ ID NO: 55308 - protein, 68 aa, Bacteriophage H19B; identical to SEQ ID NO: 18653

SEQ ID NO: 55309 - DNA, 291 bp, Stx1; identical to SEQ ID NO: 18654
  CDS (1)..(291): transl_table=11

SEQ ID NO: 55310 - protein, 96 aa, Stx1; identical to SEQ ID NO: 18655

SEQ ID NO: 55311 - DNA, 150 bp, Escherichia coli; identical to SEQ ID NO: 18656
  CDS (1)..(150): transl_table=11

SEQ ID NO: 55312 - protein, 49 aa, Escherichia coli; identical to SEQ ID NO: 18657

SEQ ID NO: 55313 - DNA, 216 bp, Escherichia coli; identical to SEQ ID NO: 18658
  CDS (1)..(216): transl_table=11

SEQ ID NO: 55314 - protein, 71 aa, Escherichia coli; identical to SEQ ID NO: 18659

SEQ ID NO: 55315 - DNA, 216 bp, Shigella dysenteriae; identical to SEQ ID NO: 18660
  CDS (1)..(216): transl_table=11

SEQ ID NO: 55316 - protein, 71 aa, Shigella dysenteriae; identical to SEQ ID NO: 18661

SEQ ID NO: 55317 - DNA, 216 bp, Escherichia coli O6; identical to SEQ ID NO: 18662
  CDS (1)..(216): transl_table=11

SEQ ID NO: 55318 - protein, 71 aa, Escherichia coli O6; identical to SEQ ID NO: 18663

SEQ ID NO: 55319 - DNA, 216 bp, Bacteriophage P21; identical to SEQ ID NO: 18664
  CDS (1)..(216): transl_table=11

SEQ ID NO: 55320 - protein, 71 aa, Bacteriophage P21; identical to SEQ ID NO: 18665

SEQ ID NO: 55321 - DNA, 24 bp, Artificial sequence
  Primer sequence
atgctgtcaaaactaccccgtaga

SEQ ID NO: 55322 - DNA, 23 bp, Artificial sequence
  Primer sequence
ttactctcctctcgcagccttac

SEQ ID NO: 55323 - protein, 71 aa, Artificial sequence; identical to SEQ ID NO: 18668
  Consensus
  Variant (2)..(3): Xaa in position 2 to 3 is any amino acid
  Variant (14)..(14): Xaa in position 14 is any amino acid
  Variant (18)..(20): Xaa in position 18 to 20 is any amino acid
  Variant (24)..(24): Xaa in position 24 is any amino acid
  Variant (27)..(27): Xaa in position 27 is any amino acid
  Variant (30)..(30): Xaa in position 30 is any amino acid
  Variant (37)..(37): Xaa in position 37 is any amino acid
  Variant (47)..(47): Xaa in position 47 is any amino acid
  Variant (49)..(49): Xaa in position 49 is any amino acid
  Variant (67)..(67): Xaa in position 67 is any amino acid

SEQ ID NO: 55324 - protein, 10 aa, Artificial sequence
  Consensus
  Variant (2)..(2): Xaa in position 2 is Asp or Glu
  Variant (5)..(5): Xaa in position 5 is Ser or Thr
  Variant (7)..(7): Xaa in position 7 is Gly or Ser
  Variant (8)..(8): Xaa in position 8 is Ile or Val
  Variant (9)..(9): Xaa in position 9 is Ala or Ser
MXKIXTXXXY

SEQ ID NO: 55325 - protein, 6 aa, Artificial sequence
  Consensus
  Variant (2)..(2): Xaa in position 2 is Phe or Leu
  Variant (5)..(5): Xaa in position 5 is any amino acid
WXLQXL

SEQ ID NO: 55326 - protein, 14 aa, Artificial sequence
  Consensus
  Variant (5)..(5): Xaa in position 5 is any or no amino acid
  Variant (7)..(7): Xaa in position 7 is any or no amino acid
PSQWXAXIGVLGSL

SEQ ID NO: 55327 - DNA, 1047 bp, Escherichia coli K12; identical to SEQ ID NO: 1323
  CDS (1)..(1047)

SEQ ID NO: 55328 - protein, 348 aa, Escherichia coli K12; identical to SEQ ID NO: 1324

SEQ ID NO: 55329 - DNA, 1235 bp, Salmonella typhimurium; identical to SEQ ID NO: 1325
  CDS (165)..(1235)

SEQ ID NO: 55330 - protein, 356 aa, Salmonella typhimurium; identical to SEQ ID NO: 1326

SEQ ID NO: 55331 - DNA, 1086 bp, Deinococcus radiodurans; identical to SEQ ID NO: 1327
  CDS (1)..(1086)

SEQ ID NO: 55332 - protein, 361 aa, Deinococcus radiodurans; identical to SEQ ID NO: 1328

SEQ ID NO: 55333 - DNA, 1056 bp, Neisseria meningitidis; identical to SEQ ID NO: 1329
  CDS (1)..(1056)

SEQ ID NO: 55334 - protein, 351 aa, Neisseria meningitidis; identical to SEQ ID NO: 1330

SEQ ID NO: 55335 - DNA, 1047 bp, Yersinia pestis; identical to SEQ ID NO: 1331
  CDS (1)..(1047)

SEQ ID NO: 55336 - protein, 348 aa, Yersinia pestis; identical to SEQ ID NO: 1332

SEQ ID NO: 55337 - DNA, 1071 bp, Escherichia coli; identical to SEQ ID NO: 1333
  CDS (1)..(1071)

SEQ ID NO: 55338 - protein, 356 aa, Escherichia coli; identical to SEQ ID NO: 1334

SEQ ID NO: 55339 - DNA, 1131 bp, Nostoc sp. PCC 7120; identical to SEQ ID NO: 1335
  CDS (1)..(1131)

SEQ ID NO: 55340 - protein, 376 aa, Nostoc sp. PCC 7120; identical to SEQ ID NO: 1336

SEQ ID NO: 55341 - DNA, 1053 bp, Salmonella enterica subsp. enterica serovar Typhi; identical to SEQ ID NO: 1337
  CDS (1)..(1053)

SEQ ID NO: 55342 - protein, 350 aa, Salmonella enterica subsp. enterica serovar Typhi; identical to SEQ ID NO: 1338

SEQ ID NO: 55343 - DNA, 1077 bp, Pseudomonas aeruginosa; identical to SEQ ID NO: 1339
  CDS (1)..(1077)

SEQ ID NO: 55344 - protein, 358 aa, Pseudomonas aeruginosa; identical to SEQ ID NO: 1340

SEQ ID NO: 55345 - DNA, 1047 bp, Buchnera sp; identical to SEQ ID NO: 1341
  CDS (1)..(1047)

SEQ ID NO: 55346 - protein, 348 aa, Buchnera sp; identical to SEQ ID NO: 1342

SEQ ID NO: 55347 - DNA, 1074 bp, Vibrio cholerae; identical to SEQ ID NO: 1343
  CDS (1)..(1074)

SEQ ID NO: 55348 - protein, 357 aa, Vibrio cholerae; identical to SEQ ID NO: 1344

SEQ ID NO: 55349 - DNA, 1038 bp, Lactococcus lactis subsp. lactis; identical to SEQ ID NO: 1345
  CDS (1)..(1038)

SEQ ID NO: 55350 - protein, 345 aa, Lactococcus lactis subsp. lactis; identical to SEQ ID NO: 1346

SEQ ID NO: 55351 - DNA, 1023 bp, Lactococcus lactis subsp. lactis; identical to SEQ ID NO: 1347
  CDS (1)..(1023)

SEQ ID NO: 55352 - protein, 340 aa, Lactococcus lactis subsp. lactis; identical to SEQ ID NO: 1348

SEQ ID NO: 55353 - DNA, 1032 bp, Streptococcus pneumoniae; identical to SEQ ID NO: 1349
  CDS (1)..(1032)

SEQ ID NO: 55354 - protein, 343 aa, Streptococcus pneumoniae; identical to SEQ ID NO: 1350

SEQ ID NO: 55355 - DNA, 1095 bp, Pseudomonas aeruginosa; identical to SEQ ID NO: 1351
  CDS (1)..(1095)

SEQ ID NO: 55356 - protein, 364 aa, Pseudomonas aeruginosa; identical to SEQ ID NO: 1352

SEQ ID NO: 55357 - DNA, 1110 bp, Caulobacter crescentus; identical to SEQ ID NO: 1353
  CDS (1)..(1110)

SEQ ID NO: 55358 - protein, 369 aa, Caulobacter crescentus; identical to SEQ ID NO: 1354

SEQ ID NO: 55359 - DNA, 1032 bp, Streptococcus pneumoniae; identical to SEQ ID NO: 1355
  CDS (1)..(1032)

SEQ ID NO: 55360 - protein, 343 aa, Streptococcus pneumoniae; identical to SEQ ID NO: 1356

SEQ ID NO: 55361 - DNA, 1047 bp, Buchnera aphidicola; identical to SEQ ID NO: 1357
  CDS (1)..(1047)

SEQ ID NO: 55362 - protein, 348 aa, Buchnera aphidicola; identical to SEQ ID NO: 1358

SEQ ID NO: 55363 - DNA, 1089 bp, Haemophilus influenzae; identical to SEQ ID NO: 1359
  CDS (1)..(1089)

SEQ ID NO: 55364 - protein, 362 aa, Haemophilus influenzae; identical to SEQ ID NO: 1360

SEQ ID NO: 55365 - DNA, 1502 bp, Candida albicans; identical to SEQ ID NO: 1361
  CDS (336)..(1442)

SEQ ID NO: 55366 - protein, 368 aa, Candida albicans; identical to SEQ ID NO: 1362

SEQ ID NO: 55367 - DNA, 1113 bp, Saccharomyces cerevisiae; identical to SEQ ID NO: 1363
  CDS (1)..(1113)

SEQ ID NO: 55368 - protein, 370 aa, Saccharomyces cerevisiae; identical to SEQ ID NO: 1364

SEQ ID NO: 55369 - DNA, 2048 bp, Saccharomyces cerevisiae; identical to SEQ ID NO: 1365
  CDS (619)..(1731)

SEQ ID NO: 55370 - protein, 370 aa, Saccharomyces cerevisiae; identical to SEQ ID NO: 1366

SEQ ID NO: 55371 - DNA, 1107 bp, Schizosaccharomyces pombe; identical to SEQ ID NO: 1367
  CDS (1)..(1107)

SEQ ID NO: 55372 - protein, 368 aa, Schizosaccharomyces pombe; identical to SEQ ID NO: 1368

SEQ ID NO: 55373 - DNA, 1089 bp, Amycolatopsis orientalis; identical to SEQ ID NO: 1369
  CDS (1)..(1089)

SEQ ID NO: 55374 - protein, 362 aa, Amycolatopsis orientalis; identical to SEQ ID NO: 1370

SEQ ID NO: 55375 - DNA, 1119 bp, Schizosaccharomyces pombe; identical to SEQ ID NO: 1371
  CDS (1)..(1119)

SEQ ID NO: 55376 - protein, 372 aa, Schizosaccharomyces pombe; identical to SEQ ID NO: 1372

SEQ ID NO: 55377 - DNA, 1248 bp, Corynebacterium glutamicum; identical to SEQ ID NO: 1373
  CDS (101)..(1228)

SEQ ID NO: 55378 - protein, 375 aa, Corynebacterium glutamicum; identical to SEQ ID NO: 1374

SEQ ID NO: 55379 - DNA, 1083 bp, Methylophilus methylotrophus; identical to SEQ ID NO: 1375
  CDS (1)..(1083)

SEQ ID NO: 55380 - protein, 360 aa, Methylophilus methylotrophus; identical to SEQ ID NO: 1376

SEQ ID NO: 55381 - DNA, 1107 bp, Debaryomyces hansenii; identical to SEQ ID NO: 1377
  CDS (1)..(1107)

SEQ ID NO: 55382 - protein, 368 aa, Debaryomyces hansenii; identical to SEQ ID NO: 1378

SEQ ID NO: 55383 - DNA, 1074 bp, Yarrowia lipolytica; identical to SEQ ID NO: 1379
  CDS (1)..(1074)

SEQ ID NO: 55384 - protein, 357 aa, Yarrowia lipolytica; identical to SEQ ID NO: 1380

SEQ ID NO: 55385 - DNA, 1089 bp, Yarrowia lipolytica; identical to SEQ ID NO: 1381
  CDS (1)..(1089)

SEQ ID NO: 55386 - protein, 362 aa, Yarrowia lipolytica; identical to SEQ ID NO: 1382

SEQ ID NO: 55387 - DNA, 1119 bp, Kluyveromyces lactis; identical to SEQ ID NO: 1383
  CDS (1)..(1119)

SEQ ID NO: 55388 - protein, 372 aa, Kluyveromyces lactis; identical to SEQ ID NO: 1384

SEQ ID NO: 55389 - DNA, 1095 bp, Kluyveromyces lactis; identical to SEQ ID NO: 1385
  CDS (1)..(1095)

SEQ ID NO: 55390 - protein, 364 aa, Kluyveromyces lactis; identical to SEQ ID NO: 1386

SEQ ID NO: 55391 - DNA, 1074 bp, Erwinia carotovora subsp; identical to SEQ ID NO: 1387
  CDS (1)..(1074)

SEQ ID NO: 55392 - protein, 357 aa, Erwinia carotovora subsp; identical to SEQ ID NO: 1388

SEQ ID NO: 55393 - DNA, 1047 bp, Erwinia carotovora subsp; identical to SEQ ID NO: 1389
  CDS (1)..(1047)

SEQ ID NO: 55394 - protein, 348 aa, Erwinia carotovora subsp; identical to SEQ ID NO: 1390

SEQ ID NO: 55395 - DNA, 1056 bp, Erwinia carotovora subsp; identical to SEQ ID NO: 1391
  CDS (1)..(1056)

SEQ ID NO: 55396 - protein, 351 aa, Erwinia carotovora subsp; identical to SEQ ID NO: 1392

SEQ ID NO: 55397 - DNA, 1113 bp, Acinetobacter sp; identical to SEQ ID NO: 1393
  CDS (1)..(1113)

SEQ ID NO: 55398 - protein, 370 aa, Acinetobacter sp; identical to SEQ ID NO: 1394

SEQ ID NO: 55399 - DNA, 1056 bp, Acinetobacter sp; identical to SEQ ID NO: 1395
  CDS (1)..(1056)

SEQ ID NO: 55400 - protein, 351 aa, Acinetobacter sp; identical to SEQ ID NO: 1396

SEQ ID NO: 55401 - DNA, 1119 bp, Candida glabrata; identical to SEQ ID NO: 1397
  CDS (1)..(1119)

SEQ ID NO: 55402 - protein, 372 aa, Candida glabrata; identical to SEQ ID NO: 1398

SEQ ID NO: 55403 - DNA, 1071 bp, Candida glabrata; identical to SEQ ID NO: 1399
  CDS (1)..(1071)

SEQ ID NO: 55404 - protein, 356 aa, Candida glabrata; identical to SEQ ID NO: 1400

SEQ ID NO: 55405 - DNA, 1083 bp, Photobacterium profundum; identical to SEQ ID NO: 1401
  CDS (1)..(1083)

SEQ ID NO: 55406 - protein, 360 aa, Photobacterium profundum; identical to SEQ ID NO: 1402

SEQ ID NO: 55407 - DNA, 1053 bp, Photobacterium profundum; identical to SEQ ID NO: 1403
  CDS (1)..(1053)

SEQ ID NO: 55408 - protein, 350 aa, Photobacterium profundum; identical to SEQ ID NO: 1404

SEQ ID NO: 55409 - DNA, 1113 bp, Photobacterium profundum; identical to SEQ ID NO: 1405
  CDS (1)..(1113)

SEQ ID NO: 55410 - protein, 370 aa, Photobacterium profundum; identical to SEQ ID NO: 1406

SEQ ID NO: 55411 - DNA, 1056 bp, Photobacterium profundum; identical to SEQ ID NO: 1407
  CDS (1)..(1056)

SEQ ID NO: 55412 - protein, 351 aa, Photobacterium profundum; identical to SEQ ID NO: 1408

SEQ ID NO: 55413 - DNA, 1092 bp, Parachlamydia sp; identical to SEQ ID NO: 1409
  CDS (1)..(1092)

SEQ ID NO: 55414 - protein, 363 aa, Parachlamydia sp; identical to SEQ ID NO: 1410

SEQ ID NO: 55415 - DNA, 1095 bp, Rhodopseudomonas palustris; identical to SEQ ID NO: 1411
  CDS (1)..(1095)

SEQ ID NO: 55416 - protein, 364 aa, Rhodopseudomonas palustris; identical to SEQ ID NO: 1412

SEQ ID NO: 55417 - DNA, 1100 bp, Amycolatopsis methanolica; identical to SEQ ID NO: 1413
  CDS (1)..(1086)

SEQ ID NO: 55418 - protein, 361 aa, Amycolatopsis methanolica; identical to SEQ ID NO: 1414

SEQ ID NO: 55419 - DNA, 1071 bp, Treponema denticola; identical to SEQ ID NO: 1415
  CDS (1)..(1071)

SEQ ID NO: 55420 - protein, 356 aa, Treponema denticola; identical to SEQ ID NO: 1416

SEQ ID NO: 55421 - DNA, 1068 bp, Geobacter sulfurreducens; identical to SEQ ID NO: 1417
  CDS (1)..(1068)

SEQ ID NO: 55422 - protein, 355 aa, Geobacter sulfurreducens; identical to SEQ ID NO: 1418

SEQ ID NO: 55423 - DNA, 1095 bp, Ashbya gossypii; identical to SEQ ID NO: 1419
  CDS (1)..(1095)

SEQ ID NO: 55424 - protein, 364 aa, Ashbya gossypii; identical to SEQ ID NO: 1420

SEQ ID NO: 55425 - DNA, 1122 bp, Ashbya gossypii; identical to SEQ ID NO: 1421
  CDS (1)..(1122)

SEQ ID NO: 55426 - protein, 373 aa, Ashbya gossypii; identical to SEQ ID NO: 1422

SEQ ID NO: 55427 - DNA, 1098 bp, Amycolatopsis balhimycina; identical to SEQ ID NO: 1423
  CDS (1)..(1098)

SEQ ID NO: 55428 - protein, 365 aa, Amycolatopsis balhimycina; identical to SEQ ID NO: 1424

SEQ ID NO: 55429 - DNA, 1071 bp, Vibrio vulnificus; identical to SEQ ID NO: 1425
  CDS (1)..(1071)

SEQ ID NO: 55430 - protein, 356 aa, Vibrio vulnificus; identical to SEQ ID NO: 1426

SEQ ID NO: 55431 - DNA, 1047 bp, Photorhabdus luminescens; identical to SEQ ID NO: 1427
  CDS (1)..(1047)

SEQ ID NO: 55432 - protein, 348 aa, Photorhabdus luminescens; identical to SEQ ID NO: 1428

SEQ ID NO: 55433 - DNA, 1053 bp, Photorhabdus luminescens; identical to SEQ ID NO: 1429
  CDS (1)..(1053)

SEQ ID NO: 55434 - protein, 350 aa, Photorhabdus luminescens; identical to SEQ ID NO: 1430

SEQ ID NO: 55435 - DNA, 1095 bp, Photorhabdus luminescens; identical to SEQ ID NO: 1431
  CDS (1)..(1095)

SEQ ID NO: 55436 - protein, 364 aa, Photorhabdus luminescens; identical to SEQ ID NO: 1432

SEQ ID NO: 55437 - DNA, 1119 bp, Gloeobacter violaceus; identical to SEQ ID NO: 1433
  CDS (1)..(1119)

SEQ ID NO: 55438 - protein, 372 aa, Gloeobacter violaceus; identical to SEQ ID NO: 1434

SEQ ID NO: 55439 - DNA, 1107 bp, Chromobacterium violaceum; identical to SEQ ID NO: 1435
  CDS (1)..(1107)

SEQ ID NO: 55440 - protein, 368 aa, Chromobacterium violaceum; identical to SEQ ID NO: 1436

SEQ ID NO: 55441 - DNA, 1059 bp, Chromobacterium violaceum; identical to SEQ ID NO: 1437
  CDS (1)..(1059)

SEQ ID NO: 55442 - protein, 352 aa, Chromobacterium violaceum; identical to SEQ ID NO: 1438

SEQ ID NO: 55443 - DNA, 1140 bp, Neurospora crassa; identical to SEQ ID NO: 1439
  CDS (1)..(1140)

SEQ ID NO: 55444 - protein, 379 aa, Neurospora crassa; identical to SEQ ID NO: 1440

SEQ ID NO: 55445 - DNA, 1092 bp, Neurospora crassa; identical to SEQ ID NO: 1441
  CDS (1)..(1092)

SEQ ID NO: 55446 - protein, 363 aa, Neurospora crassa; identical to SEQ ID NO: 1442

SEQ ID NO: 55447 - DNA, 1068 bp, Synechococcus sp; identical to SEQ ID NO: 1443
  CDS (1)..(1068)

SEQ ID NO: 55448 - protein, 355 aa, Synechococcus sp; identical to SEQ ID NO: 1444

SEQ ID NO: 55449 - DNA, 1053 bp, Rhodopirellula baltica; identical to SEQ ID NO: 1445
  CDS (1)..(1053)

SEQ ID NO: 55450 - protein, 350 aa, Rhodopirellula baltica; identical to SEQ ID NO: 1446

SEQ ID NO: 55451 - DNA, 1068 bp, Prochlorococcus marinus subsp; identical to SEQ ID NO: 1447
  CDS (1)..(1068)

SEQ ID NO: 55452 - protein, 355 aa, Prochlorococcus marinus subsp; identical to SEQ ID NO: 1448

SEQ ID NO: 55453 - DNA, 1083 bp, Prochlorococcus marinus; identical to SEQ ID NO: 1449
  CDS (1)..(1083)

SEQ ID NO: 55454 - protein, 360 aa, Prochlorococcus marinus; identical to SEQ ID NO: 1450

SEQ ID NO: 55455 - DNA, 1074 bp, Prochlorococcus marinus; identical to SEQ ID NO: 1451
  CDS (1)..(1074)

SEQ ID NO: 55456 - protein, 357 aa, Prochlorococcus marinus; identical to SEQ ID NO: 1452

SEQ ID NO: 55457 - DNA, 1113 bp, Haemophilus ducreyi; identical to SEQ ID NO: 1453
  CDS (1)..(1113)

SEQ ID NO: 55458 - protein, 370 aa, Haemophilus ducreyi; identical to SEQ ID NO: 1454

SEQ ID NO: 55459 - DNA, 1080 bp, Haemophilus ducreyi; identical to SEQ ID NO: 1455
  CDS (1)..(1080)

SEQ ID NO: 55460 - protein, 359 aa, Haemophilus ducreyi; identical to SEQ ID NO: 1456

SEQ ID NO: 55461 - DNA, 1086 bp, Candidatus Blochmannia floridanus; identical to SEQ ID NO: 1457
  CDS (1)..(1086)

SEQ ID NO: 55462 - protein, 361 aa, Candidatus Blochmannia floridanus; identical to SEQ ID NO: 1458

SEQ ID NO: 55463 - DNA, 1074 bp, Bordetella pertussis; identical to SEQ ID NO: 1459
  CDS (1)..(1074)

SEQ ID NO: 55464 - protein, 357 aa, Bordetella pertussis; identical to SEQ ID NO: 1460

SEQ ID NO: 55465 - DNA, 1119 bp, Bordetella bronchiseptica; identical to SEQ ID NO: 1461
  CDS (1)..(1119)

SEQ ID NO: 55466 - protein, 372 aa, Bordetella bronchiseptica; identical to SEQ ID NO: 1462

SEQ ID NO: 55467 - DNA, 1179 bp, Nitrosomonas europaea; identical to SEQ ID NO: 1463
  CDS (1)..(1179)

SEQ ID NO: 55468 - protein, 392 aa, Nitrosomonas europaea; identical to SEQ ID NO: 1464

SEQ ID NO: 55469 - DNA, 1083 bp, Coxiella burnetii; identical to SEQ ID NO: 1465
  CDS (1)..(1083)

SEQ ID NO: 55470 - protein, 360 aa, Coxiella burnetii; identical to SEQ ID NO: 1466

SEQ ID NO: 55471 - DNA, 834 bp, Vibrio anguillarum; identical to SEQ ID NO: 1467
  CDS (1)..(834)

SEQ ID NO: 55472 - protein, 277 aa, Vibrio anguillarum; identical to SEQ ID NO: 1468

SEQ ID NO: 55473 - DNA, 1143 bp, Xylella fastidiosa; identical to SEQ ID NO: 1469
  CDS (1)..(1143)

SEQ ID NO: 55474 - protein, 380 aa, Xylella fastidiosa; identical to SEQ ID NO: 1470

SEQ ID NO: 55475 - DNA, 1053 bp, Vibrio parahaemolyticus; identical to SEQ ID NO: 1471
  CDS (1)..(1053)

SEQ ID NO: 55476 - protein, 350 aa, Vibrio parahaemolyticus; identical to SEQ ID NO: 1472

SEQ ID NO: 55477 - DNA, 1053 bp, Vibrio parahaemolyticus; identical to SEQ ID NO: 1473
  CDS (1)..(1053)

SEQ ID NO: 55478 - protein, 350 aa, Vibrio parahaemolyticus; identical to SEQ ID NO: 1474

SEQ ID NO: 55479 - DNA, 1074 bp, Vibrio parahaemolyticus; identical to SEQ ID NO: 1475
  CDS (1)..(1074)

SEQ ID NO: 55480 - protein, 357 aa, Vibrio parahaemolyticus; identical to SEQ ID NO: 1476

SEQ ID NO: 55481 - DNA, 1083 bp, Pseudomonas syringae; identical to SEQ ID NO: 1477
  CDS (1)..(1083)

SEQ ID NO: 55482 - protein, 360 aa, Pseudomonas syringae; identical to SEQ ID NO: 1478

SEQ ID NO: 55483 - DNA, 1077 bp, Pseudomonas syringae; identical to SEQ ID NO: 1479
  CDS (1)..(1077)

SEQ ID NO: 55484 - protein, 358 aa, Pseudomonas syringae; identical to SEQ ID NO: 1480

SEQ ID NO: 55485 - DNA, 1062 bp, Pseudomonas putida; identical to SEQ ID NO: 1481
  CDS (1)..(1062)

SEQ ID NO: 55486 - protein, 353 aa, Pseudomonas putida; identical to SEQ ID NO: 1482

SEQ ID NO: 55487 - DNA, 1113 bp, Pseudomonas putida; identical to SEQ ID NO: 1483
  CDS (1)..(1113)

SEQ ID NO: 55488 - protein, 370 aa, Pseudomonas putida; identical to SEQ ID NO: 1484

SEQ ID NO: 55489 - DNA, 1086 bp, Bradyrhizobium japonicum; identical to SEQ ID NO: 1485
  CDS (1)..(1086)

SEQ ID NO: 55490 - protein, 361 aa, Bradyrhizobium japonicum; identical to SEQ ID NO: 1486

SEQ ID NO: 55491 - DNA, 1053 bp, Yersinia pestis; identical to SEQ ID NO: 1487
  CDS (1)..(1053)

SEQ ID NO: 55492 - protein, 350 aa, Yersinia pestis; identical to SEQ ID NO: 1488

SEQ ID NO: 55493 - DNA, 1077 bp, Yersinia pestis; identical to SEQ ID NO: 1489
  CDS (1)..(1077)

SEQ ID NO: 55494 - protein, 358 aa, Yersinia pestis; identical to SEQ ID NO: 1490

SEQ ID NO: 55495 - DNA, 1038 bp, Wigglesworthia glossinidia brevipalpis; identical to SEQ ID NO: 1491
  CDS (1)..(1038)

SEQ ID NO: 55496 - protein, 345 aa, Wigglesworthia glossinidia brevipalpis; identical to SEQ ID NO: 1492

SEQ ID NO: 55497 - DNA, 1053 bp, Vibrio vulnificus; identical to SEQ ID NO: 1493
  CDS (1)..(1053)

SEQ ID NO: 55498 - protein, 350 aa, Vibrio vulnificus; identical to SEQ ID NO: 1494

SEQ ID NO: 55499 - DNA, 1053 bp, Vibrio vulnificus; identical to SEQ ID NO: 1495
  CDS (1)..(1053)

SEQ ID NO: 55500 - protein, 350 aa, Vibrio vulnificus; identical to SEQ ID NO: 1496

SEQ ID NO: 55501 - DNA, 1071 bp, Vibrio vulnificus; identical to SEQ ID NO: 1497
  CDS (1)..(1071)

SEQ ID NO: 55502 - protein, 356 aa, Vibrio vulnificus; identical to SEQ ID NO: 1498

SEQ ID NO: 55503 - DNA, 1062 bp, Synechococcus elongatus; identical to SEQ ID NO: 1499
  CDS (1)..(1062)

SEQ ID NO: 55504 - protein, 353 aa, Synechococcus elongatus; identical to SEQ ID NO: 1500

SEQ ID NO: 55505 - DNA, 1032 bp, Streptococcus mutans; identical to SEQ ID NO: 1501
  CDS (1)..(1032)

SEQ ID NO: 55506 - protein, 343 aa, Streptococcus mutans; identical to SEQ ID NO: 1502

SEQ ID NO: 55507 - DNA, 1035 bp, Streptococcus mutans; identical to SEQ ID NO: 1503
  CDS (1)..(1035)

SEQ ID NO: 55508 - protein, 344 aa, Streptococcus mutans; identical to SEQ ID NO: 1504

SEQ ID NO: 55509 - DNA, 1008 bp, Streptococcus agalactiae; identical to SEQ ID NO: 1505
  CDS (1)..(1008)

SEQ ID NO: 55510 - protein, 335 aa, Streptococcus agalactiae; identical to SEQ ID NO: 1506

SEQ ID NO: 55511 - DNA, 1065 bp, Shewanella oneidensis; identical to SEQ ID NO: 1507
  CDS (1)..(1065)

SEQ ID NO: 55512 - protein, 354 aa, Shewanella oneidensis; identical to SEQ ID NO: 1508

SEQ ID NO: 55513 - DNA, 1092 bp, Shewanella oneidensis; identical to SEQ ID NO: 1509
  CDS (1)..(1092)

SEQ ID NO: 55514 - protein, 363 aa, Shewanella oneidensis; identical to SEQ ID NO: 1510

SEQ ID NO: 55515 - DNA, 1059 bp, Shewanella oneidensis; identical to SEQ ID NO: 1511
  CDS (1)..(1059)

SEQ ID NO: 55516 - protein, 352 aa, Shewanella oneidensis; identical to SEQ ID NO: 1512

SEQ ID NO: 55517 - DNA, 1053 bp, Escherichia coli O6; identical to SEQ ID NO: 1513
  CDS (1)..(1053)

SEQ ID NO: 55518 - protein, 350 aa, Escherichia coli O6; identical to SEQ ID NO: 1514

SEQ ID NO: 55519 - DNA, 1170 bp, Corynebacterium efficiens; identical to SEQ ID NO: 1515
  CDS (1)..(1170)

SEQ ID NO: 55520 - protein, 389 aa, Corynebacterium efficiens; identical to SEQ ID NO: 1516

SEQ ID NO: 55521 - DNA, 1134 bp, Bifidobacterium longum; identical to SEQ ID NO: 1517
  CDS (1)..(1134)

SEQ ID NO: 55522 - protein, 377 aa, Bifidobacterium longum; identical to SEQ ID NO: 1518

SEQ ID NO: 55523 - DNA, 1233 bp, Bifidobacterium longum; identical to SEQ ID NO: 1519
  CDS (1)..(1233)

SEQ ID NO: 55524 - protein, 410 aa, Bifidobacterium longum; identical to SEQ ID NO: 1520

SEQ ID NO: 55525 - DNA, 1221 bp, Phytophthora infestans; identical to SEQ ID NO: 1521
  CDS (20)..(1153)

SEQ ID NO: 55526 - protein, 377 aa, Phytophthora infestans; identical to SEQ ID NO: 1522

SEQ ID NO: 55527 - DNA, 1062 bp, Chlorobium tepidum; identical to SEQ ID NO: 1523
  CDS (1)..(1062)

SEQ ID NO: 55528 - protein, 353 aa, Chlorobium tepidum; identical to SEQ ID NO: 1524

SEQ ID NO: 55529 - DNA, 1074 bp, Xanthomonas campestris; identical to SEQ ID NO: 1525
  CDS (1)..(1074)

SEQ ID NO: 55530 - protein, 357 aa, Xanthomonas campestris; identical to SEQ ID NO: 1526

SEQ ID NO: 55531 - DNA, 1074 bp, Xanthomonas axonopodis; identical to SEQ ID NO: 1527
  CDS (1)..(1074)

SEQ ID NO: 55532 - protein, 357 aa, Xanthomonas axonopodis; identical to SEQ ID NO: 1528

SEQ ID NO: 55533 - DNA, 1080 bp, Ralstonia solanacearum; identical to SEQ ID NO: 1529
  CDS (1)..(1080)

SEQ ID NO: 55534 - protein, 359 aa, Ralstonia solanacearum; identical to SEQ ID NO: 1530

SEQ ID NO: 55535 - DNA, 1179 bp, Ralstonia solanacearum; identical to SEQ ID NO: 1531
  CDS (1)..(1179)

SEQ ID NO: 55536 - protein, 392 aa, Ralstonia solanacearum; identical to SEQ ID NO: 1532

SEQ ID NO: 55537 - DNA, 1065 bp, Synechococcus sp; identical to SEQ ID NO: 1533
  CDS (1)..(1065)

SEQ ID NO: 55538 - protein, 354 aa, Synechococcus sp; identical to SEQ ID NO: 1534

SEQ ID NO: 55539 - DNA, 1035 bp, Escherichia coli; identical to SEQ ID NO: 1535
  CDS (1)..(1035)

SEQ ID NO: 55540 - protein, 344 aa, Escherichia coli; identical to SEQ ID NO: 1536

SEQ ID NO: 55541 - DNA, 1200 bp, Stigmatella aurantiaca; identical to SEQ ID NO: 1537
  CDS (62)..(1147)

SEQ ID NO: 55542 - protein, 361 aa, Stigmatella aurantiaca; identical to SEQ ID NO: 1538

SEQ ID NO: 55543 - DNA, 1092 bp, Rhizobium loti; identical to SEQ ID NO: 1539
  CDS (1)..(1092)

SEQ ID NO: 55544 - protein, 363 aa, Rhizobium loti; identical to SEQ ID NO: 1540

SEQ ID NO: 55545 - DNA, 1083 bp, Amycolatopsis mediterranei; identical to SEQ ID NO: 1541
  CDS (1)..(1083)

SEQ ID NO: 55546 - protein, 360 aa, Amycolatopsis mediterranei; identical to SEQ ID NO: 1542

SEQ ID NO: 55547 - DNA, 1053 bp, Pasteurella multocida; identical to SEQ ID NO: 1543
  CDS (1)..(1053)

SEQ ID NO: 55548 - protein, 350 aa, Pasteurella multocida; identical to SEQ ID NO: 1544

SEQ ID NO: 55549 - DNA, 1086 bp, Pasteurella multocida; identical to SEQ ID NO: 1545
  CDS (1)..(1086)

SEQ ID NO: 55550 - protein, 361 aa, Pasteurella multocida; identical to SEQ ID NO: 1546

SEQ ID NO: 55551 - DNA, 1125 bp, Emericella nidulans; identical to SEQ ID NO: 1547
  CDS (1)..(1125)

SEQ ID NO: 55552 - protein, 374 aa, Emericella nidulans; identical to SEQ ID NO: 1548

SEQ ID NO: 55553 - DNA, 1089 bp, Emericella nidulans; identical to SEQ ID NO: 1549
  CDS (1)..(1089)

SEQ ID NO: 55554 - protein, 362 aa, Emericella nidulans; identical to SEQ ID NO: 1550

SEQ ID NO: 55555 - DNA, 1239 bp, Vibrio cholerae; identical to SEQ ID NO: 1551
  CDS (114)..(1175)

SEQ ID NO: 55556 - protein, 353 aa, Vibrio cholerae; identical to SEQ ID NO: 1552

SEQ ID NO: 55557 - DNA, 2184 bp, Candida albicans; identical to SEQ ID NO: 1553
  CDS (461)..(1573)

SEQ ID NO: 55558 - protein, 370 aa, Candida albicans; identical to SEQ ID NO: 1554

SEQ ID NO: 55559 - DNA, 1047 bp, Buchnera aphidicola; identical to SEQ ID NO: 1555
  CDS (1)..(1047)

SEQ ID NO: 55560 - protein, 348 aa, Buchnera aphidicola; identical to SEQ ID NO: 1556

SEQ ID NO: 55561 - DNA, 1047 bp, Buchnera aphidicola; identical to SEQ ID NO: 1557
  CDS (1)..(1047)

SEQ ID NO: 55562 - protein, 348 aa, Buchnera aphidicola; identical to SEQ ID NO: 1558

SEQ ID NO: 55563 - DNA, 1047 bp, Erwinia herbicola; identical to SEQ ID NO: 1559
  CDS (1)..(1047)

SEQ ID NO: 55564 - protein, 348 aa, Erwinia herbicola; identical to SEQ ID NO: 1560

SEQ ID NO: 55565 - DNA, 1047 bp, Salmonella typhimurium; identical to SEQ ID NO: 1561
  CDS (1)..(1047)

SEQ ID NO: 55566 - protein, 348 aa, Salmonella typhimurium; identical to SEQ ID NO: 1562

SEQ ID NO: 55567 - DNA, 23 bp, Artificial sequence
  Primer sequence
atgaacagaactgacgaactccg

SEQ ID NO: 55568 - DNA, 24 bp, Artificial sequence
  Primer sequence
ttagaagcgggtatctaccgcaga

SEQ ID NO: 55569 - protein, 352 aa, Artificial sequence; identical to SEQ ID NO: 19007
  Consensus
  Variant (2)..(3): Xaa in position 2 to 3 is any amino acid
  Variant (5)..(11): Xaa in position 5 to 11 is any amino acid
  Variant (13)..(24): Xaa in position 13 to 24 is any amino acid
  Variant (26)..(30): Xaa in position 26 to 30 is any amino acid
  Variant (32)..(33): Xaa in position 32 to 33 is any amino acid
  Variant (35)..(35): Xaa in position 35 is any amino acid
  Variant (37)..(40): Xaa in position 37 to 40 is any amino acid
  Variant (42)..(43): Xaa in position 42 to 43 is any amino acid
  Variant (45)..(46): Xaa in position 45 to 46 is any amino acid
  Variant (51)..(51): Xaa in position 51 is any amino acid
  Variant (54)..(55): Xaa in position 54 to 55 is any amino acid
  Variant (58)..(59): Xaa in position 58 to 59 is any amino acid
  Variant (62)..(63): Xaa in position 62 to 63 is any amino acid
  Variant (65)..(76): Xaa in position 65 to 76 is any amino acid
  Variant (78)..(80): Xaa in position 78 to 80 is any amino acid
  Variant (83)..(83): Xaa in position 83 is any amino acid
  Variant (85)..(85): Xaa in position 85 is any amino acid
  Variant (91)..(93): Xaa in position 91 to 93 is any amino acid
  Variant (100)..(100): Xaa in position 100 is any amino acid
  Variant (103)..(112): Xaa in position 103 to 112 is any amino acid
  Variant (115)..(117): Xaa in position 115 to 117 is any amino acid
  Variant (119)..(119): Xaa in position 119 is any amino acid
  Variant (121)..(128): Xaa in position 121 to 128 is any amino acid
  Variant (130)..(130): Xaa in position 130 is any amino acid
  Variant (132)..(132): Xaa in position 132 is any amino acid
  Variant (134)..(134): Xaa in position 134 is any amino acid
  Variant (136)..(136): Xaa in position 136 is any amino acid
  Variant (139)..(142): Xaa in position 139 to 142 is any amino acid
  Variant (144)..(146): Xaa in position 144 to 146 is any amino acid
  Variant (148)..(152): Xaa in position 148 to 152 is any amino acid
  Variant (163)..(163): Xaa in position 163 is any amino acid
  Variant (166)..(167): Xaa in position 166 to 167 is any amino acid
  Variant (170)..(170): Xaa in position 170 is any amino acid
  Variant (173)..(173): Xaa in position 173 is any amino acid
  Variant (175)..(175): Xaa in position 175 is any amino acid
  Variant (180)..(180): Xaa in position 180 is any amino acid
  Variant (182)..(182): Xaa in position 182 is any amino acid
  Variant (184)..(187): Xaa in position 184 to 187 is any amino acid
  Variant (189)..(190): Xaa in position 189 to 190 is any amino acid
  Variant (192)..(194): Xaa in position 192 to 194 is any amino acid
  Variant (196)..(198): Xaa in position 196 to 198 is any amino acid
  Variant (200)..(200): Xaa in position 200 is any amino acid
  Variant (202)..(207): Xaa in position 202 to 207 is any amino acid
  Variant (209)..(214): Xaa in position 209 to 214 is any amino acid
  Variant (216)..(216): Xaa in position 216 is any amino acid
  Variant (219)..(221): Xaa in position 219 to 221 is any amino acid
  Variant (223)..(224): Xaa in position 223 to 224 is any amino acid
  Variant (229)..(237): Xaa in position 229 to 237 is any amino acid
  Variant (240)..(268): Xaa in position 240 to 268 is any amino acid
  Variant (270)..(270): Xaa in position 270 is any amino acid
  Variant (273)..(273): Xaa in position 273 is any amino acid
  Variant (276)..(276): Xaa in position 276 is any amino acid
  Variant (278)..(281): Xaa in position 278 to 281 is any amino acid
  Variant (283)..(284): Xaa in position 283 to 284 is any amino acid
  Variant (286)..(291): Xaa in position 286 to 291 is any amino acid
  Variant (293)..(295): Xaa in position 293 to 295 is any amino acid
  Variant (297)..(304): Xaa in position 297 to 304 is any amino acid
  Variant (306)..(306): Xaa in position 306 is any amino acid
  Variant (308)..(308): Xaa in position 308 is any amino acid
  Variant (311)..(314): Xaa in position 311 to 314 is any amino acid
  Variant (316)..(316): Xaa in position 316 is any amino acid
  Variant (318)..(333): Xaa in position 318 to 333 is any amino acid
  Variant (336)..(336): Xaa in position 336 is any amino acid
  Variant (338)..(338): Xaa in position 338 is any amino acid
  Variant (341)..(341): Xaa in position 341 is any amino acid
  Variant (343)..(344): Xaa in position 343 to 344 is any amino acid
  Variant (346)..(347): Xaa in position 346 to 347 is any amino acid
  Variant (349)..(351): Xaa in position 349 to 351 is any amino acid

SEQ ID NO: 55570 - protein, 24 aa, Artificial sequence
  Consensus
  Variant (2)..(2): Xaa in position 2 is any amino acid
  Variant (3)..(3): Xaa in position 3 is Leu, Val, Phe, Ile, Ala or Met
  Variant (4)..(4): Xaa in position 4 is Val, Ile, Leu or Ala
  Variant (5)..(5): Xaa in position 5 is Val or Ile
  Variant (6)..(6): Xaa in position 6 is Val, Ile, Cys or Thr
  Variant (11)..(11): Xaa in position 11 is Ile, Val, Ser or Leu
  Variant (12)..(12): Xaa in position 12 is His or Asp
  Variant (13)..(13): Xaa in position 13 is Asp or Asn
  Variant (14)..(15): Xaa in position 14 to 15 is any amino acid
  Variant (16)..(16): Xaa in position 16 is Ala, Ser, Gln or Thr
  Variant (17)..(17): Xaa in position 17 is Ala, Val or Gly
  Variant (18)..(18): Xaa in position 18 is any amino acid
  Variant (19)..(19): Xaa in position 19 is Glu, Asp, Ala or Gln
  Variant (21)..(21): Xaa in position 21 is Ala, Gly, Cys or Ser
  Variant (22)..(22): Xaa in position 22 is any amino acid
  Variant (23)..(23): Xaa in position 23 is Arg, Lys, Gln, His or Leu
  Variant (24)..(24): Xaa in position 24 is Leu, Ile or Phe
RXXXXXGPCSXXXXXXXXXYXXXX

SEQ ID NO: 55571 - protein, 42 aa, Artificial sequence; identical to SEQ ID NO: 2884
  Consensus
  Variant (1)..(1): Xaa in position 1 is Leu, Ile, Phe or Met
  Variant (2)..(2): Xaa in position 2 is any amino acid
  Variant (3)..(3): Xaa in position 3 is Ile, Val, Leu or Met
  Variant (4)..(4): Xaa in position 4 is Val, Ile or Leu
  Variant (7)..(7): Xaa in position 7 is Val, Ala or Thr
  Variant (9)..(9): Xaa in position 9 is Phe, Leu, Thr or Val
  Variant (10)..(10): Xaa in position 10 is Glu or Ala
  Variant (15)..(16): Xaa in position 15 to 16 is any amino acid
  Variant (17)..(17): Xaa in position 17 is any or no amino acid
  Variant (19)..(19): Xaa in position 19 is Trp or Tyr
  Variant (20)..(20): Xaa in position 20 is Lys or Arg
  Variant (22)..(22): Xaa in position 22 is Leu, Phe, Met or Tyr
  Variant (23)..(23): Xaa in position 23 is Ile, Val, Ala or Leu
  Variant (24)..(24): Xaa in position 24 is any amino acid
  Variant (25)..(25): Xaa in position 25 is Asp, Glu or Gln
  Variant (27)..(27): Xaa in position 27 is any amino acid
  Variant (28)..(28): Xaa in position 28 is Leu, Met, Ile, Val, Ala or Thr
  Variant (29)..(29): Xaa in position 29 is Asp, Asn or Ser
  Variant (30)..(33): Xaa in position 30 to 33 is any amino acid
  Variant (34)..(34): Xaa in position 34 is Ile, Val, Leu or Met
  Variant (35)..(36): Xaa in position 35 to 36 is any amino acid
  Variant (38)..(38): Xaa in position 38 is Leu, Ile, Met or Val
  Variant (39)..(40): Xaa in position 39 to 40 is any amino acid
  Variant (41)..(41): Xaa in position 41 is Ala, Ser, Gly, Val or Thr

SEQ ID NO: 55572 - protein, 65 aa, Artificial sequence; identical to SEQ ID NO: 2885
  Consensus
  Variant (2)..(2): Xaa in position 2 is any amino acid
  Variant (4)..(4): Xaa in position 4 is Asp, Tyr, Gln, Asn or Glu
  Variant (5)..(9): Xaa in position 5 to 9 is any amino acid
  Variant (10)..(10): Xaa in position 10 is Tyr, Phe or Leu
  Variant (11)..(12): Xaa in position 11 to 12 is any amino acid
  Variant (13)..(13): Xaa in position 13 is Asp or Glu
  Variant (14)..(15): Xaa in position 14 to 15 is any amino acid
  Variant (16)..(16): Xaa in position 16 is Ser, Ala, Thr or Cys
  Variant (17)..(17): Xaa in position 17 is Trp, Phe, Tyr, Leu or Val
  Variant (18)..(18): Xaa in position 18 is any amino acid
  Variant (19)..(19): Xaa in position 19 is Ala or Ser
  Variant (20)..(20): Xaa in position 20 is Ile or Val
  Variant (24)..(24): Xaa in position 24 is Thr, Ser or Asn
  Variant (25)..(25): Xaa in position 25 is Thr, Val, Ala, Ser or Ile
  Variant (26)..(26): Xaa in position 26 is Glu or Ala
  Variant (27)..(27): Xaa in position 27 is Ser, Asp or Asn
  Variant (29)..(29): Xaa in position 29 is any amino acid
  Variant (32)..(32): Xaa in position 32 is Glu, Gln, Phe or Met
  Variant (33)..(33): Xaa in position 33 is Leu, Met, Val, Ile or Phe
  Variant (34)..(34): Xaa in position 34 is Ala, Ser, Thr, Cys or Val
  Variant (36)..(36): Xaa in position 36 is Gly, Ala or Asn
  Variant (37)..(39): Xaa in position 37 to 39 is any amino acid
  Variant (40)..(40): Xaa in position 40 is Pro or Ala
  Variant (41)..(41): Xaa in position 41 is Val, Ile, Thr or Leu
  Variant (43)..(43): Xaa in position 43 is Phe, Met, Tyr or Ile
  Variant (46)..(46): Xaa in position 46 is any amino acid
  Variant (47)..(47): Xaa in position 47 is Thr, Ser or Arg
  Variant (48)..(48): Xaa in position 48 is any amino acid
  Variant (50)..(53): Xaa in position 50 to 53 is any amino acid
  Variant (54)..(54): Xaa in position 54 is Ala or Met
  Variant (55)..(55): Xaa in position 55 is any amino acid
  Variant (56)..(56): Xaa in position 56 is Asp, Asn or Glu
  Variant (57)..(57): Xaa in position 57 is Ala or Gly
  Variant (58)..(59): Xaa in position 58 to 59 is any amino acid
  Variant (60)..(60): Xaa in position 60 is Ala or Ser
  Variant (61)..(61): Xaa in position 61 is Ala, Ser, Val or Thr
  Variant (62)..(64): Xaa in position 62 to 64 is any amino acid
  Variant (65)..(65): Xaa in position 65 is His or Gln

SEQ ID NO: 55573 - protein, 71 aa, Artificial sequence; identical to SEQ ID NO: 2886
  Consensus
  Variant (1)..(1): Xaa in position 1 is Thr or Ser
  Variant (2)..(2): Xaa in position 2 is any amino acid
  Variant (5)..(7): Xaa in position 5 to 7 is any amino acid
  Variant (8)..(8): Xaa in position 8 is His or Phe
  Variant (9)..(9): Xaa in position 9 is Val, Ile, Leu or Ala
  Variant (10)..(10): Xaa in position 10 is Ile or Val
  Variant (11)..(11): Xaa in position 11 is Leu or Met
  Variant (14)..(14): Xaa in position 14 is Gly, Ser or Ala
  Variant (15)..(16): Xaa in position 15 to 16 is any amino acid
  Variant (17)..(22): Xaa in position 17 to 22 is any or no amino acid
  Variant (23)..(23): Xaa in position 23 is Pro, Thr or Ser
  Variant (25)..(25): Xaa in position 25 is Tyr, Phe or His
  Variant (26)..(29): Xaa in position 26 to 29 is any amino acid
  Variant (30)..(30): Xaa in position 30 is Val, Ile or Leu
  Variant (31)..(36): Xaa in position 31 to 36 is any amino acid
  Variant (37)..(37): Xaa in position 37 is Leu, Met, Ile, Tyr or His
  Variant (38)..(40): Xaa in position 38 to 40 is any amino acid
  Variant (41)..(51): Xaa in position 41 to 51 is any or no amino acid
  Variant (52)..(52): Xaa in position 52 is Leu, Ile or Val
  Variant (53)..(53): Xaa in position 53 is Met, Val, Ile or Leu
  Variant (54)..(54): Xaa in position 54 is Ile or Val
  Variant (56)..(56): Xaa in position 56 is Cys, Phe, Ala, Thr, Tyr or Val
  Variant (57)..(57): Xaa in position 57 is Ser, Asn or Ala
  Variant (59)..(59): Xaa in position 59 is Gly, Ala or Asp
  Variant (61)..(61): Xaa in position 61 is Ser or Cys
  Variant (62)..(62): Xaa in position 62 is any amino acid
  Variant (64)..(66): Xaa in position 64 to 66 is any amino acid
  Variant (67)..(67): Xaa in position 67 is Arg, Asn, Lys, Leu or Glu
  Variant (69)..(70): Xaa in position 69 to 70 is any amino acid
  Variant (71)..(71): Xaa in position 71 is Val or Ile

SEQ ID NO: 55574 - protein, 41 aa, Artificial sequence; identical to SEQ ID NO: 2887
  Consensus
  Variant (2)..(2): Xaa in position 2 is any amino acid
  Variant (4)..(4): Xaa in position 4 is Ile, Leu, Val, Ala or Met
  Variant (7)..(7): Xaa in position 7 is His, Asn, Phe or Tyr
  Variant (8)..(8): Xaa in position 8 is Leu or Ile
  Variant (9)..(10): Xaa in position 9 to 10 is any amino acid
  Variant (12)..(12): Xaa in position 12 is any amino acid
  Variant (14)..(19): Xaa in position 14 to 19 is any amino acid
  Variant (20)..(30): Xaa in position 20 to 30 is any or no amino acid
  Variant (32)..(32): Xaa in position 32 is any amino acid
  Variant (34)..(34): Xaa in position 34 is Ile or Val
  Variant (37)..(37): Xaa in position 37 is Ala, Pro, Gly, Lys, Ser or Glu
  Variant (39)..(39): Xaa in position 39 is Ile, Leu or Val
  Variant (40)..(40): Xaa in position 40 is any amino acid
  Variant (41)..(41): Xaa in position 41 is Trp, Ile, Leu or Phe

SEQ ID NO: 55575 - DNA, 705 bp, Escherichia coli; identical to SEQ ID NO: 20641
  CDS (1)..(705)

SEQ ID NO: 55576 - protein, 234 aa, Escherichia coli; identical to SEQ ID NO: 20642

SEQ ID NO: 55577 - DNA, 26 bp, Artificial sequence
  Primer sequence
atgtttttagcatcattgttgagacg

SEQ ID NO: 55578 - DNA, 28 bp, Artificial sequence
  Primer sequence
ttaaatttttgctattagattttctgca

SEQ ID NO: 55579 - DNA, 1323 bp, Escherichia coli K12; identical to SEQ ID NO: 20861
  CDS (1)..(1323): transl_table=11

SEQ ID NO: 55580 - protein, 440 aa, Escherichia coli K12; identical to SEQ ID NO: 20862

SEQ ID NO: 55581 - DNA, 1461 bp, Archaeoglobus fulgidus DSM 4304; identical to SEQ ID NO: 20863
  CDS (1)..(1461): transl_table=11

SEQ ID NO: 55582 - protein, 486 aa, Archaeoglobus fulgidus DSM 4304; identical to SEQ ID NO: 20864

SEQ ID NO: 55583 - DNA, 1455 bp, Aeropyrum pernix K1; identical to SEQ ID NO: 20865
  CDS (1)..(1455): transl_table=11

SEQ ID NO: 55584 - protein, 484 aa, Aeropyrum pernix K1; identical to SEQ ID NO: 20866

SEQ ID NO: 55585 - DNA, 1365 bp, Helicobacter pylori J99; identical to SEQ ID NO: 20867
  CDS (1)..(1365): transl_table=11

SEQ ID NO: 55586 - protein, 454 aa, Helicobacter pylori J99; identical to SEQ ID NO: 20868

SEQ ID NO: 55587 - DNA, 1326 bp, Bacillus halodurans C-125; identical to SEQ ID NO: 20869
  CDS (1)..(1326): transl_table=11

SEQ ID NO: 55588 - protein, 441 aa, Bacillus halodurans C-125; identical to SEQ ID NO: 20870

SEQ ID NO: 55589 - DNA, 1425 bp, Pseudomonas aeruginosa PAO1; identical to SEQ ID NO: 20871
  CDS (1)..(1425): transl_table=11

SEQ ID NO: 55590 - protein, 474 aa, Pseudomonas aeruginosa PAO1; identical to SEQ ID NO: 20872

SEQ ID NO: 55591 - DNA, 1377 bp, Fusobacterium nucleatum subsp. nucleatum ATCC 25586; identical to SEQ ID NO: 20873
  CDS (1)..(1377): transl_table=11

SEQ ID NO: 55592 - protein, 458 aa, Fusobacterium nucleatum subsp. nucleatum ATCC 25586; identical to SEQ ID NO: 20874

SEQ ID NO: 55593 - DNA, 1407 bp, Streptococcus pyogenes MGAS8232; identical to SEQ ID NO: 20875
  CDS (1)..(1407): transl_table=11

SEQ ID NO: 55594 - protein, 468 aa, Streptococcus pyogenes MGAS8232; identical to SEQ ID NO: 20876

SEQ ID NO: 55595 - DNA, 1326 bp, Oceanobacillus iheyensis HTE831; identical to SEQ ID NO: 20877
  CDS (1)..(1326): transl_table=11

SEQ ID NO: 55596 - protein, 441 aa, Oceanobacillus iheyensis HTE831; identical to SEQ ID NO: 20878

SEQ ID NO: 55597 - DNA, 1332 bp, Shewanella oneidensis MR-1; identical to SEQ ID NO: 20879
  CDS (1)..(1332): transl_table=11

SEQ ID NO: 55598 - protein, 443 aa, Shewanella oneidensis MR-1; identical to SEQ ID NO: 20880

SEQ ID NO: 55599 - DNA, 1419 bp, Pseudomonas putida KT2440; identical to SEQ ID NO: 20881
  CDS (1)..(1419): transl_table=11

SEQ ID NO: 55600 - protein, 472 aa, Pseudomonas putida KT2440; identical to SEQ ID NO: 20882

SEQ ID NO: 55601 - DNA, 1419 bp, Pseudomonas syringae pv. tomato str. DC3000; identical to SEQ ID NO: 20883
  CDS (1)..(1419): transl_table=11

SEQ ID NO: 55602 - protein, 472 aa, Pseudomonas syringae pv. tomato str. DC3000; identical to SEQ ID NO: 20884

SEQ ID NO: 55603 - DNA, 1407 bp, Streptococcus pyogenes SSI-1; identical to SEQ ID NO: 20885
  CDS (1)..(1407): transl_table=11

SEQ ID NO: 55604 - protein, 468 aa, Streptococcus pyogenes SSI-1; identical to SEQ ID NO: 20886

SEQ ID NO: 55605 - DNA, 1350 bp, Bordetella pertussis Tohama I; identical to SEQ ID NO: 20887
  CDS (1)..(1350): transl_table=11

SEQ ID NO: 55606 - protein, 449 aa, Bordetella pertussis Tohama I; identical to SEQ ID NO: 20888

SEQ ID NO: 55607 - DNA, 1464 bp, Bordetella pertussis Tohama I; identical to SEQ ID NO: 20889
  CDS (1)..(1464): transl_table=11

SEQ ID NO: 55608 - protein, 487 aa, Bordetella pertussis Tohama I; identical to SEQ ID NO: 20890

SEQ ID NO: 55609 - DNA, 1434 bp, Bordetella parapertussis 12822; identical to SEQ ID NO: 20891
  CDS (1)..(1434): transl_table=11

SEQ ID NO: 55610 - protein, 477 aa, Bordetella parapertussis 12822; identical to SEQ ID NO: 20892

SEQ ID NO: 55611 - DNA, 1464 bp, Bordetella parapertussis 12822; identical to SEQ ID NO: 20893
  CDS (1)..(1464): transl_table=11

SEQ ID NO: 55612 - protein, 487 aa, Bordetella parapertussis 12822; identical to SEQ ID NO: 20894

SEQ ID NO: 55613 - DNA, 1446 bp, Bordetella parapertussis 12822; identical to SEQ ID NO: 20895
  CDS (1)..(1446): transl_table=11

SEQ ID NO: 55614 - protein, 481 aa, Bordetella parapertussis 12822; identical to SEQ ID NO: 20896

SEQ ID NO: 55615 - DNA, 1464 bp, Bordetella bronchiseptica RB50; identical to SEQ ID NO: 20897
  CDS (1)..(1464): transl_table=11

SEQ ID NO: 55616 - protein, 487 aa, Bordetella bronchiseptica RB50; identical to SEQ ID NO: 20898

SEQ ID NO: 55617 - DNA, 1314 bp, Bordetella bronchiseptica RB50; identical to SEQ ID NO: 20899
  CDS (1)..(1314): transl_table=11

SEQ ID NO: 55618 - protein, 437 aa, Bordetella bronchiseptica RB50; identical to SEQ ID NO: 20900

SEQ ID NO: 55619 - DNA, 1365 bp, Bdellovibrio bacteriovorus HD100; identical to SEQ ID NO: 20901
  CDS (1)..(1365): transl_table=11

SEQ ID NO: 55620 - protein, 454 aa, Bdellovibrio bacteriovorus HD100; identical to SEQ ID NO: 20902

SEQ ID NO: 55621 - DNA, 1347 bp, Bacillus cereus ATCC 10987; identical to SEQ ID NO: 20903
  CDS (1)..(1347): transl_table=11

SEQ ID NO: 55622 - protein, 448 aa, Bacillus cereus ATCC 10987; identical to SEQ ID NO: 20904

SEQ ID NO: 55623 - DNA, 1347 bp, Bacillus anthracis str. Sterne; identical to SEQ ID NO: 20905
  CDS (1)..(1347): transl_table=11

SEQ ID NO: 55624 - protein, 448 aa, Bacillus anthracis str. Sterne; identical to SEQ ID NO: 20906

SEQ ID NO: 55625 - DNA, 1347 bp, Bacillus thuringiensis serovar konkukian str. 97-27; identical to SEQ ID NO: 20907
  CDS (1)..(1347): transl_table=11

SEQ ID NO: 55626 - protein, 448 aa, Bacillus thuringiensis serovar konkukian str. 97-27; identical to SEQ ID NO: 20908

SEQ ID NO: 55627 - DNA, 1410 bp, Acinetobacter sp. ADP1; identical to SEQ ID NO: 20909
  CDS (1)..(1410): transl_table=11

SEQ ID NO: 55628 - protein, 469 aa, Acinetobacter sp. ADP1; identical to SEQ ID NO: 20910

SEQ ID NO: 55629 - DNA, 1347 bp, Bacillus cereus E33L; identical to SEQ ID NO: 20911
  CDS (1)..(1347): transl_table=11

SEQ ID NO: 55630 - protein, 448 aa, Bacillus cereus E33L; identical to SEQ ID NO: 20912

SEQ ID NO: 55631 - DNA, 1404 bp, Haloarcula marismortui ATCC 43049; identical to SEQ ID NO: 20913
  CDS (1)..(1404): transl_table=11

SEQ ID NO: 55632 - protein, 467 aa, Haloarcula marismortui ATCC 43049; identical to SEQ ID NO: 20914

SEQ ID NO: 55633 - DNA, 1320 bp, Bacillus clausii KSM-K16; identical to SEQ ID NO: 20915
  CDS (1)..(1320): transl_table=11

SEQ ID NO: 55634 - protein, 439 aa, Bacillus clausii KSM-K16; identical to SEQ ID NO: 20916

SEQ ID NO: 55635 - DNA, 1419 bp, Pseudomonas syringae pv. syringae B728a; identical to SEQ ID NO: 20917
  CDS (1)..(1419): transl_table=11

SEQ ID NO: 55636 - protein, 472 aa, Pseudomonas syringae pv. syringae B728a; identical to SEQ ID NO: 20918

SEQ ID NO: 55637 - DNA, 1344 bp, Haemophilus influenzae 86-028NP; identical to SEQ ID NO: 20919
  CDS (1)..(1344): transl_table=11

SEQ ID NO: 55638 - protein, 447 aa, Haemophilus influenzae 86-028NP; identical to SEQ ID NO: 20920

SEQ ID NO: 55639 - DNA, 1419 bp, Pseudomonas fluorescens Pf-5; identical to SEQ ID NO: 20921
  CDS (1)..(1419): transl_table=11

SEQ ID NO: 55640 - protein, 472 aa, Pseudomonas fluorescens Pf-5; identical to SEQ ID NO: 20922

SEQ ID NO: 55641 - DNA, 1425 bp, Pseudomonas syringae pv. phaseolicola 1448A; identical to SEQ ID NO: 20923
  CDS (1)..(1425): transl_table=11

SEQ ID NO: 55642 - protein, 474 aa, Pseudomonas syringae pv. phaseolicola 1448A; identical to SEQ ID NO: 20924

SEQ ID NO: 55643 - DNA, 1407 bp, Streptococcus pyogenes MGAS5005; identical to SEQ ID NO: 20925
  CDS (1)..(1407): transl_table=11

SEQ ID NO: 55644 - protein, 468 aa, Streptococcus pyogenes MGAS5005; identical to SEQ ID NO: 20926

SEQ ID NO: 55645 - DNA, 1449 bp, Ralstonia eutropha JMP134; identical to SEQ ID NO: 20927
  CDS (1)..(1449): transl_table=11

SEQ ID NO: 55646 - protein, 482 aa, Ralstonia eutropha JMP134; identical to SEQ ID NO: 20928

SEQ ID NO: 55647 - DNA, 1344 bp, Haemophilus somnus 2336; identical to SEQ ID NO: 20929
  CDS (1)..(1344)

SEQ ID NO: 55648 - protein, 447 aa, Haemophilus somnus 2336; identical to SEQ ID NO: 20930

SEQ ID NO: 55649 - DNA, 1326 bp, Fusobacterium nucleatum subsp. vincentii ATCC 49256; identical to SEQ ID NO: 20931
  CDS (1)..(1326): transl_table=11

SEQ ID NO: 55650 - protein, 441 aa, Fusobacterium nucleatum subsp. vincentii ATCC 49256; identical to SEQ ID NO: 20932

SEQ ID NO: 55651 - DNA, 1344 bp, Haemophilus influenzae R2866; identical to SEQ ID NO: 20933
  CDS (1)..(1344)

SEQ ID NO: 55652 - protein, 447 aa, Haemophilus influenzae R2866; identical to SEQ ID NO: 20934

SEQ ID NO: 55653 - DNA, 1452 bp, Burkholderia cepacia R18194; identical to SEQ ID NO: 20935
  CDS (1)..(1452)

SEQ ID NO: 55654 - protein, 483 aa, Burkholderia cepacia R18194; identical to SEQ ID NO: 20936

SEQ ID NO: 55655 - DNA, 1290 bp, Burkholderia cepacia R18194; identical to SEQ ID NO: 20937
  CDS (1)..(1290)

SEQ ID NO: 55656 - protein, 429 aa, Burkholderia cepacia R18194; identical to SEQ ID NO: 20938

SEQ ID NO: 55657 - DNA, 1347 bp, Bacillus cereus G9241; identical to SEQ ID NO: 20939
  CDS (1)..(1347): transl_table=11

SEQ ID NO: 55658 - protein, 448 aa, Bacillus cereus G9241; identical to SEQ ID NO: 20940

SEQ ID NO: 55659 - DNA, 1332 bp, Pseudomonas fluorescens PfO-1; identical to SEQ ID NO: 20941
  CDS (1)..(1332)

SEQ ID NO: 55660 - protein, 443 aa, Pseudomonas fluorescens PfO-1; identical to SEQ ID NO: 20942

SEQ ID NO: 55661 - DNA, 1434 bp, Rhodospirillum rubrum; identical to SEQ ID NO: 20943
  CDS (1)..(1434)

SEQ ID NO: 55662 - protein, 477 aa, Rhodospirillum rubrum; identical to SEQ ID NO: 20944

SEQ ID NO: 55663 - DNA, 1035 bp, Haemophilus influenzae 86-028NP; identical to SEQ ID NO: 20945
  CDS (1)..(1035)

SEQ ID NO: 55664 - protein, 344 aa, Haemophilus influenzae 86-028NP; identical to SEQ ID NO: 20946

SEQ ID NO: 55665 - DNA, 1431 bp, Ralstonia eutropha JMP134; identical to SEQ ID NO: 20947
  CDS (1)..(1431)

SEQ ID NO: 55666 - protein, 476 aa, Ralstonia eutropha JMP134; identical to SEQ ID NO: 20948

SEQ ID NO: 55667 - DNA, 1380 bp, Brevibacterium linens BL2; identical to SEQ ID NO: 20949
  CDS (1)..(1380)

SEQ ID NO: 55668 - protein, 459 aa, Brevibacterium linens BL2; identical to SEQ ID NO: 20950

SEQ ID NO: 55669 - DNA, 1242 bp, Bacillus anthracis str. A2012; identical to SEQ ID NO: 20951
  CDS (1)..(1242): Xaa of translated CDS can stand for any naturally occuring amino acid which can be translated from respective CDS-codon

SEQ ID NO: 55670 - protein, 413 aa, Bacillus anthracis str. A2012; identical to SEQ ID NO: 20952
  misc_feature (43)..(43): Xaa can be any naturally occuring amino acid
  misc_feature (129)..(129): Xaa can be any naturally occuring amino acid

SEQ ID NO: 55671 - DNA, 1440 bp, Azotobacter vinelandii AvOP; identical to SEQ ID NO: 20953
  CDS (1)..(1440): transl_table=11

SEQ ID NO: 55672 - protein, 479 aa, Azotobacter vinelandii AvOP; identical to SEQ ID NO: 20954

SEQ ID NO: 55673 - DNA, 1311 bp, Chromohalobacter salexigens DSM 3043; identical to SEQ ID NO: 20955
  CDS (1)..(1311): transl_table=11

SEQ ID NO: 55674 - protein, 436 aa, Chromohalobacter salexigens DSM 3043; identical to SEQ ID NO: 20956

SEQ ID NO: 55675 - DNA, 1356 bp, Shewanella baltica OS155; identical to SEQ ID NO: 20957
  CDS (1)..(1356): transl_table=11

SEQ ID NO: 55676 - protein, 451 aa, Shewanella baltica OS155; identical to SEQ ID NO: 20958

SEQ ID NO: 55677 - DNA, 1338 bp, Ralstonia metallidurans CH34; identical to SEQ ID NO: 20959
  CDS (1)..(1338): transl_table=11

SEQ ID NO: 55678 - protein, 445 aa, Ralstonia metallidurans CH34; identical to SEQ ID NO: 20960

SEQ ID NO: 55679 - DNA, 1395 bp, Rubrobacter xylanophilus DSM 9941; identical to SEQ ID NO: 20961
  CDS (1)..(1395): transl_table=11

SEQ ID NO: 55680 - protein, 464 aa, Rubrobacter xylanophilus DSM 9941; identical to SEQ ID NO: 20962

SEQ ID NO: 55681 - DNA, 1320 bp, Psychrobacter cryohalolentis K5; identical to SEQ ID NO: 20963
  CDS (1)..(1320): transl_table=11

SEQ ID NO: 55682 - protein, 439 aa, Psychrobacter cryohalolentis K5; identical to SEQ ID NO: 20964

SEQ ID NO: 55683 - DNA, 1353 bp, Burkholderia ambifaria AMMD; identical to SEQ ID NO: 20965
  CDS (1)..(1353): transl_table=11

SEQ ID NO: 55684 - protein, 450 aa, Burkholderia ambifaria AMMD; identical to SEQ ID NO: 20966

SEQ ID NO: 55685 - DNA, 1344 bp, Bacillus cereus; identical to SEQ ID NO: 20967
  CDS (1)..(1344): transl_table=11

SEQ ID NO: 55686 - protein, 447 aa, Bacillus cereus; identical to SEQ ID NO: 20968

SEQ ID NO: 55687 - DNA, 1341 bp, Alcaligenes eutrophus; identical to SEQ ID NO: 20969
  CDS (1)..(1341): transl_table=11

SEQ ID NO: 55688 - protein, 446 aa, Alcaligenes eutrophus; identical to SEQ ID NO: 20970

SEQ ID NO: 55689 - DNA, 1239 bp, Aeropyrum pernix; identical to SEQ ID NO: 20971
  CDS (1)..(1239): transl_table=11

SEQ ID NO: 55690 - protein, 412 aa, Aeropyrum pernix; identical to SEQ ID NO: 20972

SEQ ID NO: 55691 - DNA, 1344 bp, Haemophilus influenzae; identical to SEQ ID NO: 20973
  CDS (1)..(1344): transl_table=11

SEQ ID NO: 55692 - protein, 447 aa, Haemophilus influenzae; identical to SEQ ID NO: 20974

SEQ ID NO: 55693 - DNA, 24 bp, Artificial sequence
  Primer sequence
atgattggtcgcatatcgcgtttt

SEQ ID NO: 55694 - DNA, 26 bp, Artificial sequence
  Primer sequence
ttagaacagcgttaaaccaatgacga

SEQ ID NO: 55695 - protein, 465 aa, Artificial sequence; identical to SEQ ID NO: 20977
  Consensus
  Variant (3)..(3): Xaa in position 3 is any amino acid
  Variant (6)..(7): Xaa in position 6 to 7 is any amino acid
  Variant (9)..(11): Xaa in position 9 to 11 is any amino acid
  Variant (13)..(15): Xaa in position 13 to 15 is any amino acid
  Variant (17)..(34): Xaa in position 17 to 34 is any amino acid
  Variant (35)..(44): Xaa in position 35 to 44 is any or no amino acid
  Variant (47)..(47): Xaa in position 47 is any amino acid
  Variant (51)..(51): Xaa in position 51 is any amino acid
  Variant (54)..(54): Xaa in position 54 is any amino acid
  Variant (56)..(56): Xaa in position 56 is any amino acid
  Variant (60)..(60): Xaa in position 60 is any amino acid
  Variant (65)..(65): Xaa in position 65 is any amino acid
  Variant (67)..(68): Xaa in position 67 to 68 is any amino acid
  Variant (71)..(71): Xaa in position 71 is any amino acid
  Variant (74)..(76): Xaa in position 74 to 76 is any amino acid
  Variant (78)..(78): Xaa in position 78 is any amino acid
  Variant (80)..(81): Xaa in position 80 to 81 is any amino acid
  Variant (84)..(91): Xaa in position 84 to 91 is any amino acid
  Variant (94)..(95): Xaa in position 94 to 95 is any amino acid
  Variant (97)..(98): Xaa in position 97 to 98 is any amino acid
  Variant (100)..(101): Xaa in position 100 to 101 is any amino acid
  Variant (103)..(105): Xaa in position 103 to 105 is any amino acid
  Variant (110)..(111): Xaa in position 110 to 111 is any amino acid
  Variant (114)..(115): Xaa in position 114 to 115 is any amino acid
  Variant (118)..(119): Xaa in position 118 to 119 is any amino acid
  Variant (121)..(121): Xaa in position 121 is any amino acid
  Variant (125)..(127): Xaa in position 125 to 127 is any amino acid
  Variant (128)..(132): Xaa in position 128 to 132 is any or no amino acid
  Variant (134)..(134): Xaa in position 134 is any amino acid
  Variant (136)..(139): Xaa in position 136 to 139 is any amino acid
  Variant (144)..(144): Xaa in position 144 is any amino acid
  Variant (146)..(148): Xaa in position 146 to 148 is any amino acid
  Variant (149)..(149): Xaa in position 149 is any or no amino acid
  Variant (151)..(152): Xaa in position 151 to 152 is any amino acid
  Variant (156)..(156): Xaa in position 156 is any amino acid
  Variant (158)..(162): Xaa in position 158 to 162 is any amino acid
  Variant (164)..(175): Xaa in position 164 to 175 is any amino acid
  Variant (176)..(183): Xaa in position 176 to 183 is any or no amino acid
  Variant (186)..(188): Xaa in position 186 to 188 is any amino acid
  Variant (192)..(195): Xaa in position 192 to 195 is any amino acid
  Variant (197)..(203): Xaa in position 197 to 203 is any amino acid
  Variant (205)..(208): Xaa in position 205 to 208 is any amino acid
  Variant (210)..(214): Xaa in position 210 to 214 is any amino acid
  Variant (216)..(241): Xaa in position 216 to 241 is any amino acid
  Variant (242)..(256): Xaa in position 242 to 256 is any or no amino acid
  Variant (259)..(259): Xaa in position 259 is any amino acid
  Variant (262)..(262): Xaa in position 262 is any amino acid
  Variant (264)..(265): Xaa in position 264 to 265 is any amino acid
  Variant (267)..(269): Xaa in position 267 to 269 is any amino acid
  Variant (271)..(273): Xaa in position 271 to 273 is any amino acid
  Variant (275)..(276): Xaa in position 275 to 276 is any amino acid
  Variant (279)..(281): Xaa in position 279 to 281 is any amino acid
  Variant (283)..(289): Xaa in position 283 to 289 is any amino acid
  Variant (290)..(293): Xaa in position 290 to 293 is any or no amino acid
  Variant (295)..(297): Xaa in position 295 to 297 is any amino acid
  Variant (299)..(299): Xaa in position 299 is any amino acid
  Variant (303)..(304): Xaa in position 303 to 304 is any amino acid
  Variant (310)..(311): Xaa in position 310 to 311 is any amino acid
  Variant (312)..(313): Xaa in position 312 to 313 is any or no amino acid
  Variant (315)..(316): Xaa in position 315 to 316 is any amino acid
  Variant (319)..(319): Xaa in position 319 is any amino acid
  Variant (321)..(323): Xaa in position 321 to 323 is any amino acid
  Variant (325)..(329): Xaa in position 325 to 329 is any amino acid
  Variant (337)..(337): Xaa in position 337 is any amino acid
  Variant (342)..(343): Xaa in position 342 to 343 is any amino acid
  Variant (346)..(349): Xaa in position 346 to 349 is any amino acid
  Variant (350)..(356): Xaa in position 350 to 356 is any or no amino acid
  Variant (358)..(360): Xaa in position 358 to 360 is any amino acid
  Variant (363)..(364): Xaa in position 363 to 364 is any amino acid
  Variant (367)..(367): Xaa in position 367 is any amino acid
  Variant (370)..(372): Xaa in position 370 to 372 is any amino acid
  Variant (373)..(373): Xaa in position 373 is any or no amino acid
  Variant (375)..(380): Xaa in position 375 to 380 is any amino acid
  Variant (382)..(382): Xaa in position 382 is any amino acid
  Variant (387)..(389): Xaa in position 387 to 389 is any amino acid
  Variant (396)..(396): Xaa in position 396 is any amino acid
  Variant (398)..(398): Xaa in position 398 is any amino acid
  Variant (400)..(400): Xaa in position 400 is any amino acid
  Variant (403)..(403): Xaa in position 403 is any amino acid
  Variant (406)..(406): Xaa in position 406 is any amino acid
  Variant (409)..(410): Xaa in position 409 to 410 is any amino acid
  Variant (412)..(415): Xaa in position 412 to 415 is any amino acid
  Variant (417)..(424): Xaa in position 417 to 424 is any amino acid
  Variant (427)..(429): Xaa in position 427 to 429 is any amino acid
  Variant (437)..(437): Xaa in position 437 is any amino acid
  Variant (440)..(440): Xaa in position 440 is any amino acid
  Variant (444)..(445): Xaa in position 444 to 445 is any amino acid
  Variant (447)..(448): Xaa in position 447 to 448 is any amino acid
  Variant (455)..(458): Xaa in position 455 to 458 is any amino acid
  Variant (461)..(464): Xaa in position 461 to 464 is any amino acid

SEQ ID NO: 55696 - protein, 36 aa, Artificial sequence; identical to SEQ ID NO: 20978
  Consensus
  Variant (2)..(2): Xaa in position 2 is any amino acid
  Variant (3)..(3): Xaa in position 3 is any or no amino acid
  Variant (5)..(5): Xaa in position 5 is any amino acid
  Variant (7)..(7): Xaa in position 7 is Ile or Leu
  Variant (8)..(8): Xaa in position 8 is any amino acid
  Variant (10)..(10): Xaa in position 10 is Ala, Gly, Ser or Thr
  Variant (14)..(14): Xaa in position 14 is any amino acid
  Variant (15)..(15): Xaa in position 15 is Phe, Ile, Leu, Met or Val
  Variant (16)..(16): Xaa in position 16 is Ile, Leu or Val
  Variant (17)..(17): Xaa in position 17 is Ala, Ile, Leu or Val
  Variant (18)..(18): Xaa in position 18 is Ala, Ile or Val
  Variant (19)..(19): Xaa in position 19 is any amino acid
  Variant (21)..(22): Xaa in position 21 to 22 is any amino acid
  Variant (23)..(23): Xaa in position 23 is Ile, Leu or Val
  Variant (25)..(32): Xaa in position 25 to 32 is any amino acid
  Variant (33)..(35): Xaa in position 33 to 35 is any or no amino acid

SEQ ID NO: 55697 - protein, 29 aa, Artificial sequence
  Consensus
  Variant (2)..(2): Xaa in position 2 is any amino acid
  Variant (3)..(3): Xaa in position 3 is Ala, Leu or Val
  Variant (4)..(4): Xaa in position 4 is Ala, Ile, Leu or Val
  Variant (5)..(5): Xaa in position 5 is any amino acid
  Variant (6)..(6): Xaa in position 6 is Ala or Val
  Variant (7)..(7): Xaa in position 7 is Ala, Cys or Ser
  Variant (8)..(8): Xaa in position 8 is Ala, Gly or Ser
  Variant (10)..(10): Xaa in position 10 is any amino acid
  Variant (12)..(15): Xaa in position 12 to 15 is any amino acid
  Variant (16)..(18): Xaa in position 16 to 18 is any or no amino acid
  Variant (20)..(20): Xaa in position 20 is Phe, Leu or Met
  Variant (21)..(21): Xaa in position 21 is Ala, Gly, Ser or Thr
  Variant (22)..(22): Xaa in position 22 is Ala, Gly or Ser
  Variant (24)..(24): Xaa in position 24 is any amino acid
  Variant (25)..(25): Xaa in position 25 is Ala, Pro or Ser
  Variant (26)..(28): Xaa in position 26 to 28 is any amino acid
  Variant (29)..(29): Xaa in position 29 is Ala, Asn, Ser or Thr
YXXXXXXXYXGXXXXXXXGXXXSXXXXXX

SEQ ID NO: 55698 - protein, 48 aa, Artificial sequence; identical to SEQ ID NO: 20980
  Consensus
  Variant (2)..(2): Xaa in position 2 is Phe or Leu
  Variant (3)..(3): Xaa in position 3 is any amino acid
  Variant (4)..(4): Xaa in position 4 is Phe, Ile or Leu
  Variant (5)..(7): Xaa in position 5 to 7 is any amino acid
  Variant (8)..(8): Xaa in position 8 is Ala, Gly or Ile
  Variant (9)..(10): Xaa in position 9 to 10 is any amino acid
  Variant (12)..(14): Xaa in position 12 to 14 is any amino acid
  Variant (15)..(21): Xaa in position 15 to 21 is any or no amino acid
  Variant (23)..(28): Xaa in position 23 to 28 is any amino acid
  Variant (29)..(29): Xaa in position 29 is Phe, Ile, Leu or Val
  Variant (30)..(31): Xaa in position 30 to 31 is any amino acid
  Variant (32)..(32): Xaa in position 32 is Ala, Gly or Ser
  Variant (33)..(34): Xaa in position 33 to 34 is any amino acid
  Variant (35)..(35): Xaa in position 35 is Ala, Gly, Ser or Thr
  Variant (36)..(37): Xaa in position 36 to 37 is any amino acid
  Variant (39)..(39): Xaa in position 39 is Ile, Leu or Val
  Variant (40)..(40): Xaa in position 40 is Ile, Leu, Met or Val
  Variant (41)..(41): Xaa in position 41 is Ile, Leu or Val
  Variant (43)..(43): Xaa in position 43 is Phe or Tyr
  Variant (45)..(45): Xaa in position 45 is Phe or Leu
  Variant (47)..(47): Xaa in position 47 is Ala or Gly
  Variant (48)..(48): Xaa in position 48 is Gly or Ser

SEQ ID NO: 55699 - protein, 52 aa, Artificial sequence; identical to SEQ ID NO: 20981
  Consensus
  Variant (5)..(5): Xaa in position 5 is Gly or Ser
  Variant (6)..(6): Xaa in position 6 is any amino acid
  Variant (7)..(7): Xaa in position 7 is Phe or Trp
  Variant (8)..(8): Xaa in position 8 is Ala, Ile or Val
  Variant (9)..(9): Xaa in position 9 is Ile or Val
  Variant (10)..(10): Xaa in position 10 is any amino acid
  Variant (11)..(11): Xaa in position 11 is Ala, Gly or Ser
  Variant (13)..(16): Xaa in position 13 to 16 is any amino acid
  Variant (17)..(17): Xaa in position 17 is any or no amino acid
  Variant (19)..(39): Xaa in position 19 to 39 is any amino acid
  Variant (40)..(40): Xaa in position 40 is any or no amino acid
  Variant (42)..(42): Xaa in position 42 is Leu or Met
  Variant (43)..(43): Xaa in position 43 is Ala, Ile, Leu or Val
  Variant (44)..(44): Xaa in position 44 is any amino acid
  Variant (47)..(47): Xaa in position 47 is Phe, Trp or Tyr
  Variant (48)..(48): Xaa in position 48 is any amino acid
  Variant (50)..(50): Xaa in position 50 is Pro or Ser
  Variant (51)..(51): Xaa in position 51 is any amino acid

SEQ ID NO: 55700 - DNA, 1359 bp, Escherichia coli
  CDS (1)..(1359)
atgttgagtatttttaaaccagcgccacacaaagcgcgcttacctgccgcggagatcgatccgacttatcgtcgattgcgctggcaaattttcctggggatattctttggctatgcggcttactatttggttcgtaagaactttgcgcttgctatgccttatctggttgagcagggattctcacgcggtgatttaggttttgccctttcggggatctcgattgcttatggattttcgaaattcatcatgggttcggtatcggatcgctcgaatccgcgcgttttcctgcccgcaggtttgattctggcggcggcagtgatgttgtttatgggctttgtgccatgggcgacgtcgagcattgcggtgatgtttgtactgttgttcctctgcggttggttccaggggatggggtggccgccgtgtggtcgtactatggtgcactggtggtcgcagaaagaacgtggcggcattgtgtcagtgtggaactgtgcgcacaacgtcggtggtggtattccgccgctgctgttcctgctggggatggcctggttcaatgactggcatgcggcgctctatatgcctgctttctgcgccattctggtggcattattcgcctttgcgatgatgcgcgataccccgcaatcctgtggcttgccgccgatcgaagagtacaaaaatgattatccggacgactataacgaaaaagcggaacaggagctgacggcgaagcaaatcttcatgcagtacgtactgccgaacaaactgctgtggtatatcgccatcgccaacgtgttcgtttatctgctgcgttacggcatcctcgactggtcaccgacttatctgaaagaggttaagcatttcgcgctagataaatcctcctgggcctacttcctttatgaatatgcaggtattccgggcactctgctgtgcggctggatgtcggataaagtcttccgtggcaaccgtggggcaaccggcgttttctttatgacactggtgaccatcgcgactatcgtttactggatgaacccggcaggtaacccaaccgtcgatatgatttgtatgattgttatcggcttcctgatctacggtcctgtgatgctgatcggtctgcatgcgctggaactggcaccgaaaaaagcggcaggtacggcagcgggctttaccgggctgtttggttacctgggcggttcggtggcggcgagcgcgattgttggctacaccgtggacttcttcggctgggatggcggctttatggtaatgattggcggcagcattctggcggttatcttgttgattgttgtgatgattggcgaaaaacgtcgccatgaacaattactgcaagaacgcaacggaggctaa

SEQ ID NO: 55701 - protein, 452 aa, Escherichia coli
MLSIFKPAPHKARLPAAEIDPTYRRLRWQIFLGIFFGYAAYYLVRKNFALAMPYLVEQGFSRGDLGFALSGISIAYGFSKFIMGSVSDRSNPRVFLPAGLILAAAVMLFMGFVPWATSSIAVMFVLLFLCGWFQGMGWPPCGRTMVHWWSQKERGGIVSVWNCAHNVGGGIPPLLFLLGMAWFNDWHAALYMPAFCAILVALFAFAMMRDTPQSCGLPPIEEYKNDYPDDYNEKAEQELTAKQIFMQYVLPNKLLWYIAIANVFVYLLRYGILDWSPTYLKEVKHFALDKSSWAYFLYEYAGIPGTLLCGWMSDKVFRGNRGATGVFFMTLVTIATIVYWMNPAGNPTVDMICMIVIGFLIYGPVMLIGLHALELAPKKAAGTAAGFTGLFGYLGGSVAASAIVGYTVDFFGWDGGFMVMIGGSILAVILLIVVMIGEKRRHEQLLQERNGG

SEQ ID NO: 55702 - DNA, 1299 bp, Xenopus tropicalis
  CDS (1)..(1299)
atggcagcgcagggacagggttatggctactaccgtacagttattttttccgcaatgtttgtgggatacacactgtattacttcaatcggaagaccttttcctttgtcatgccatctgtaatgcaggagataaaactggataaagatgatctaggtctgatcaccagcagccagtctgcagcatatgccatcagtaagtttattagtggagttctgtctgatcagatgagcgctcgctggctgttttcctctggcttttgcttggtgggtctggtaaacgtggtattttcctggagttccagtgtgtcagtttttgccattctttggttttttaatggactagctcaaggactcggctggccaccatgtggaaaagtcctgcgcaagtggtttgaaccttcccagttcggcacttggtgggcagtgctctccactagtatgaacttggcaggcagtcttggccccatcatagctactctggtagctgccagttacagttggagatccacattatccctttctggtctgatctgtgtgggagcctctgtcctttgccttatacttataaagaatgagccttctgatgtggggctgaaaaacatagaacctgggcccaaaaaaggaaaacaagcttcccagtctggtgatgaaacaactctaaaggagttcttgctttccccgtacctttggctactgtgtgctggatacctagtggtatttggagtaaaaacctgctgtacagactggggacagctttttctcattcaggacaaaggacagtctgccctgataggcagctcatacatgagcgccctggaggttggtggcttggtgggcagtattgcagctggtttgttgtctgatcgagctgtggctaagatgggattgagaaatcatggtaatcctcgccatggcctgctcctctctatgatggctggaatggctgtgtccttgtacttgttccgtgttactgtcactgcaggatcttcaaaggtctggatcttgattctgggagctgtatttggattttcttcgtatggacctattgcactttttggagtcattgccaatgagagcgccccttccaatttctgtgggacatcacatgctattgtggccctctctgcaaatgtgggtggtttcctcgccggactcccatttagcactattgccaaacactatggttggaacacagcatttcaagcagctgagattacctgcttagctgttacaatcatatttttccttctaaggaatattcaaaccaagatgggccgtctgccgaagaaagcggactga

SEQ ID NO: 55703 - protein, 432 aa, Xenopus tropicalis
MAAQGQGYGYYRTVIFSAMFVGYTLYYFNRKTFSFVMPSVMQEIKLDKDDLGLITSSQSAAYAISKFISGVLSDQMSARWLFSSGFCLVGLVNVVFSWSSSVSVFAILWFFNGLAQGLGWPPCGKVLRKWFEPSQFGTWWAVLSTSMNLAGSLGPIIATLVAASYSWRSTLSLSGLICVGASVLCLILIKNEPSDVGLKNIEPGPKKGKQASQSGDETTLKEFLLSPYLWLLCAGYLVVFGVKTCCTDWGQLFLIQDKGQSALIGSSYMSALEVGGLVGSIAAGLLSDRAVAKMGLRNHGNPRHGLLLSMMAGMAVSLYLFRVTVTAGSSKVWILILGAVFGFSSYGPIALFGVIANESAPSNFCGTSHAIVALSANVGGFLAGLPFSTIAKHYGWNTAFQAAEITCLAVTIIFFLLRNIQTKMGRLPKKAD

SEQ ID NO: 55704 - DNA, 1290 bp, Mus musculus
  CDS (1)..(1290)
atggcagcccaaggctacggctactatcgcactgtcatatttgcggccatgtttggaggctacagcctgtactatttcaaccgcaaaaccttctcctttgtcatgccctccttggtggatgagatcgctctggacaaggacgatttggggctcatcacaagcagccagtcggcagcctacgccatcagcaagtttgtgagcggggttctgtcagatcagatgagcgcccgctggctcttctcctctgggctgctcctggttggtctggtcaacgtagtcttctcatggagctccacagtgtcagcctttgctgctctttggtttcttaatggtctggcacaggggctgggctggcccccctgtgggaagatcctgaggaagtggtttgagccatcccagtttggcacttggtgggctgtgttgtcaaccagcatgaacctggctggaagtttgggacctatcttggcaacgatcctcgcccagagctacagctggcgcagcacactggccctgtctggggcactgtgtgtggttgtctccttcttctgtctgctgcttatccacaatgaacctgctgatgttggactccgaaatctggaccctgccccctccaagggcaaaaagggctcatcaaaggaggagagcaccctacaggatctgctgctgtccccctatctctgggtgctgtccactggctacctcgtggtcttcggagtaaagacttgctgtacagactggggccagttcttccttatccaggagcgagggcagtccgcccttgtgggtagctcctacatcagtgccctcgaggtcggaggccttgtaggaagcattgcagctggttacctgtcagacagggccatggcgaaggcagggctgtctctgtatgggaaccctcgtcacggcctattgctactcatgatggctgggatggcagcatccatgttcctcttccgagtaacggtgaccagtgactcacccaagatctggatcctggttttaggagccgtgtttggtttctcttcttatggtcccattgccttgtttggagtcatagccaatgagagtgcacctcccaacttgtgtggaacctctcatgctattgtgggacttatggccaatgtgggtggatttctggctggcttacccttcagcaccattgccaagcactatagctggagcacagccttctgggtggcagaagtggtttgtggagccagcacagttgtcttcttcttgcttcgaaatatccgcaccaagatgggccgagtatccaagaagggagagtga

SEQ ID NO: 55705 - protein, 429 aa, Mus musculus
MAAQGYGYYRTVIFAAMFGGYSLYYFNRKTFSFVMPSLVDEIALDKDDLGLITSSQSAAYAISKFVSGVLSDQMSARWLFSSGLLLVGLVNVVFSWSSTVSAFAALWFLNGLAQGLGWPPCGKILRKWFEPSQFGTWWAVLSTSMNLAGSLGPILATILAQSYSWRSTLALSGALCVVVSFFCLLLIHNEPADVGLRNLDPAPSKGKKGSSKEESTLQDLLLSPYLWVLSTGYLVVFGVKTCCTDWGQFFLIQERGQSALVGSSYISALEVGGLVGSIAAGYLSDRAMAKAGLSLYGNPRHGLLLLMMAGMAASMFLFRVTVTSDSPKIWILVLGAVFGFSSYGPIALFGVIANESAPPNLCGTSHAIVGLMANVGGFLAGLPFSTIAKHYSWSTAFWVAEVVCGASTVVFFLLRNIRTKMGRVSKKGE

SEQ ID NO: 55706 - DNA, 1506 bp, Mus musculus
  CDS (1)..(1506)
atgcggtcctccctggctcctggtgtctggttccttcgcgccttctctagggacagctggttccgtggcttcatcctgctgctcaccttcctcatttatgcctgttatcacatgtccagaaagcccatcagcatcgtcaagagccgcctgcaccagaactgctcagagatggtcagacctgttaatgacacccacgatctcaatgataccacctggtgcagctggagtccattcgacaaagatgactacaaggagttactaggagctgtggacaatgccttcctagtggcttatgccattggcatgtttattagtggaatctttggggagcggctgcccctgcgttactacctctcggctggaatggtgctaagtggcctattcacctccctctttggcctggggtacttctggaatatccacatgctctggtactttgtgctcatccagatctgcaacgggcttgtgcagactacaggctggccatctgtggtgacctgtgttggcaactggtttgggaagggaaagcggggattcatcatgggcatctggaactctcacacatctgtgggcaacattctgggctctctgattgctggagtctgggtgaaccagcactggggcctgtcattcatcgtgcctggcattatcactgctatcatgggtgtcatcaccttcctctttcttattgaatatccagaagatgtggactgtacccctcctcggcatcatgatgacccggagaaggaacaggacaaccctgaggatcctgtgaatagtccctacagcagcagggagagtaatgtggacattgcagccagctcctccaaggagcagggccctgagcctgaagccatcagtttcctgggggcactcagaattccgggagtgatcgagttctctttatgtctgctctttgccaagttggtcagctatacctttctctactggctgcccttgtacatcttcaatgtggctcactttagtgccaaggaggctggggacctatccacggtttttgatgttggtggcatcataggtggcatcatggcagggctcatcagcgactacaccaatagcagggccaccacttgctgcatcatgctgatcttggctgctcccatgatgttcctgtacaactacattggccagaatgggataaccagttccatagtgatgttaattatctgtggggtcctggtcaatggcccttacgcactcatcacgacagcggtctctgctgacctgggcacacatgagagcctgaagggtaacgccaaggccctctccactgtcacggccattatcgacggcactggttccataggtgcggctctggggcccctactggccgggctcatttccccgacaggctggaacaatgtgttctacatgctcatctctgccgacgtcttggcttgcttgctcctctgcaggttggtgtacaaagagatcctggcctggaagacggcctgcggcagaagcagtgggtacaaacaaatttga

SEQ ID NO: 55707 - protein, 501 aa, Mus musculus
MRSSLAPGVWFLRAFSRDSWFRGFILLLTFLIYACYHMSRKPISIVKSRLHQNCSEMVRPVNDTHDLNDTTWCSWSPFDKDDYKELLGAVDNAFLVAYAIGMFISGIFGERLPLRYYLSAGMVLSGLFTSLFGLGYFWNIHMLWYFVLIQICNGLVQTTGWPSVVTCVGNWFGKGKRGFIMGIWNSHTSVGNILGSLIAGVWVNQHWGLSFIVPGIITAIMGVITFLFLIEYPEDVDCTPPRHHDDPEKEQDNPEDPVNSPYSSRESNVDIAASSSKEQGPEPEAISFLGALRIPGVIEFSLCLLFAKLVSYTFLYWLPLYIFNVAHFSAKEAGDLSTVFDVGGIIGGIMAGLISDYTNSRATTCCIMLILAAPMMFLYNYIGQNGITSSIVMLIICGVLVNGPYALITTAVSADLGTHESLKGNAKALSTVTAIIDGTGSIGAALGPLLAGLISPTGWNNVFYMLISADVLACLLLCRLVYKEILAWKTACGRSSGYKQI

SEQ ID NO: 55708 - DNA, 1290 bp, Rattus norvegicus
  CDS (1)..(1290)
atggcggcccaaggctatggctattaccgcactgtcatattcacagccatgttcggaggctacagcctttactacttcaaccgcaaaaccttctcttttgtcatgccctccttggtggatgagatcgctctggacaaggacgatttggggctcatcacgagcagccagtcggcagcctacgccatcagcaagtttgtgagcggggtgctgtctgatcagatgagtgcccgttggctcttctcctctgggctgctcctggttggtctggtcaacgtagtcttctcgtggagctctacagtgacggcttttgctgctctctggtttcttaatggtctggcacaggggctaggctggcccccctgtgggaagatcctgaggaagtggtttgagccatcccagtttggcacttggtgggctgtgttgtcaaccagcatgaacctggctggaagcctgggacctatcttggcgacaatccttgctcagagctacagctggcgcagcaccctggccctgtctgggtcactgtgtgtggttgtctccttcttctgtctgctgctcatccacaacgaacctgctgatgttggactccgaaatctggaccctgccccctccaagggcaaaaagggctcgtcaaaggaggagagcaccctacaggacctgctgctgtccccctatctctgggtgctctccactggctacctcgtggtctttggggtaaagacttgctgtacagactggggccagttcttccttatccaggagagagggcagtcggccctcgtgggtagttcctacatcagtgccctagaggttggaggccttgtaggcagcattgcagctggctatctgtcagacagggctatggcaaaggcagggctgtctgtgtatgggaaccctcgccacagcctgttgctgctcatgatggctggcatggcagcatccatgttcctcttccgggtaacggtgaccagcgactcgcccaagatctggatcctggtgttgggagccgtgtttggtttctcttcttatggtcccattgccttgtttggagtcatagctaatgagagtgcacctcccaacttgtgtggtacctctcatgctattgtggggctcatggccaatgtgggtggatttctggctgggttacccttcagtaccatcgccaagcactatagctggagcacagccttctgggtggcagaagtgatctgtatagccagcacagttgtcttcttcttgcttcgaaatatccgcaccaagatgggccgagtatccaagaaggcagagtga

SEQ ID NO: 55709 - protein, 429 aa, Rattus norvegicus
MAAQGYGYYRTVIFTAMFGGYSLYYFNRKTFSFVMPSLVDEIALDKDDLGLITSSQSAAYAISKFVSGVLSDQMSARWLFSSGLLLVGLVNVVFSWSSTVTAFAALWFLNGLAQGLGWPPCGKILRKWFEPSQFGTWWAVLSTSMNLAGSLGPILATILAQSYSWRSTLALSGSLCVVVSFFCLLLIHNEPADVGLRNLDPAPSKGKKGSSKEESTLQDLLLSPYLWVLSTGYLVVFGVKTCCTDWGQFFLIQERGQSALVGSSYISALEVGGLVGSIAAGYLSDRAMAKAGLSVYGNPRHSLLLLMMAGMAASMFLFRVTVTSDSPKIWILVLGAVFGFSSYGPIALFGVIANESAPPNLCGTSHAIVGLMANVGGFLAGLPFSTIAKHYSWSTAFWVAEVICIASTVVFFLLRNIRTKMGRVSKKAE

SEQ ID NO: 55710 - DNA, 1533 bp, Arabidopsis thaliana
  CDS (1)..(1533)
atggcgtcgtggacttcatctgaattcctctatgaagaagtaaaaccaccaggtattcatttcctagaacgtttcaggcgttcaggaaaactctctttcaagcaatatcaagcaatggtctttgtcttgaccttcattgcttatattgccttccacgcaacacgaaagcctaacagcatcgtcaaaggaacactctctgaacaaccaaccggacatttcaagggtgcagataaaggtggatgggctcctttcgatggtccagatggaacagctctgcttggacaaatcgatttggctttcctctctgtttacgcggttggaatgtttgtggctggtcatttgggtgatcgtttggacctcaggacgtttctaacaataggtatggtcgggacaggagtgtgtactgctctgtttggagtcgctttttgggccaatatccatgctttctactatttccttgcgattcagacattggcagggtggtttcagtctattggatggccttgcgtggttgcggttttgggaaactggtttgataagaagaggagaggagtcattatgggtgtttggagtgctcatacatcattagggaatatcattgggactttaatcgctacggggcttttgaagtttggttggggatggtcttttgttggtccggctttgctcattacgtttcttggcattgtggtttacctattcttgcctgtgaaccctcatgctgttgaagctgagagagatgggagtgaagttgattccacaatgagactcggtgacaccattacagagagtttcttaagctctaggacgagtactggattcgatagaagagctgtcgggttcttagcggcttggaaaatccccggtgttgctcctttcgccttctgtctcttcttcaccaaactggtctcttacacattcctctattggcttcctttctacgtaagccagactgagataggaggagaacaattgtcacaggagacatcgggaaacttatcgacactcttcgatgttggaggcgttgttggaggaatcttagccggatatttctctgaccagctcgacgggagagcaattacagccggaggattcatctacttaacaatcccagctctgttcctctacagaatatacggtcatgtctcaatgacaatcaatatcatcctcatgttcgtagctggattatttgttaatggaccttacgctctcatcacaaccgcggttgcagctgatctcggtactcacaagtcgcttaaaggcaatgcaagggctttggctacagtgactgctattatagatggaacaggatcagttggtgcagccattggacctgttcttacaggttatatcgctgcgattagttgggatgctgtgttttacatgttgatgactgcagctttgatctctggattgttgctcactacgcttattatagaagaagtgaaaactttgttgtatggatcttctgaagaagatcatgaagtcgctgctgcttctacatcaagacctcccattgatgtcctcatatga

SEQ ID NO: 55711 - protein, 510 aa, Arabidopsis thaliana
MASWTSSEFLYEEVKPPGIHFLERFRRSGKLSFKQYQAMVFVLTFIAYIAFHATRKPNSIVKGTLSEQPTGHFKGADKGGWAPFDGPDGTALLGQIDLAFLSVYAVGMFVAGHLGDRLDLRTFLTIGMVGTGVCTALFGVAFWANIHAFYYFLAIQTLAGWFQSIGWPCVVAVLGNWFDKKRRGVIMGVWSAHTSLGNIIGTLIATGLLKFGWGWSFVGPALLITFLGIVVYLFLPVNPHAVEAERDGSEVDSTMRLGDTITESFLSSRTSTGFDRRAVGFLAAWKIPGVAPFAFCLFFTKLVSYTFLYWLPFYVSQTEIGGEQLSQETSGNLSTLFDVGGVVGGILAGYFSDQLDGRAITAGGFIYLTIPALFLYRIYGHVSMTINIILMFVAGLFVNGPYALITTAVAADLGTHKSLKGNARALATVTAIIDGTGSVGAAIGPVLTGYIAAISWDAVFYMLMTAALISGLLLTTLIIEEVKTLLYGSSEEDHEVAAASTSRPPIDVLI

SEQ ID NO: 55712 - DNA, 1635 bp, Arabidopsis thaliana
  CDS (1)..(1635)
atggcgatgaattcgaagaggaaaacaccacctgggattgcgcttctgaggagagtcagaggaagaaattggagtccaaagacgtttcggtacgcgattttgtttattactttcatcgcatatgcttgttaccatgcttctcgtaaaccaagcagcatagtgaagagcgttttacacccagactcaagcactaagccacctcaagaacataacagcgacaaaatttatccttggcctatgggtaacgtgtttgtgaagagagaaattggtgatatagatgaggttttgttgcatcgtaagtctaaaggatgggaaccgtttaatgggaaagatgggacgtctaggttgggagagattgatgtggcgtttcttgcttgttactctataggaatgtatgttgctggtcatttgggtgatagtttggatctgagattgtttctgacttggggaatgattgggagtgggttctttgttgggttgtttggtatgggttatttctggaacattcatgcgttttggttctttttggttatgcaaatggcggctgggttgtttcaggcgacaggatggccatctgttgtggctgttgttgggaattggtttgggaaaaggaagagaggtcttataatggggatttggaatgctcatacttctgttgggaacatttgtggttctttaattgctgctggtgttcttgaatatggttggggatggtcttttatagctcctggttttgtcatgtctttaggaggagttcttgtttatttgttcttggctgcgtatcctgaggatgttgggtttccagatatcaattctaattcagggaagtttattaagaggaagagagatgttgaagaggaagaagaggaagtagaagaagatttagggacagatgttgaaggggatggggagggatcatcagggtcaggttcagggtatgagaataaaagaagtgttggacttttgcaagcttgtatgatccctggtgttataccgtttgcgttgtgtctctttttctcgaagctggtcgcgtacacgttcttgtactggttaccgttttacttgagccaaacaactattggtggagagtacgtgtctgtgaaaacagcagggaatctctccacactatttgatgttggaggcattgtaggagggattctttgtggttacatttcagacaaattcaaagcaagggctacaactgcagctgcattcatgtacgctgcgattccggcaatgcttgtgtaccattcctatggaggtgtctctcagacagtcaacatcctcctcatgatggttgctggtttgtttgtcaatggtccttatgcactcatcacaaccgcagtctctgcggatctgggaacgcacaagtctttacaaggcgattcaagggcgcttgcgactgttactgctatcattgacgggactggatctgccggtgcggctttaggtccgcttttgacagggtttctttctactctgggttggcaagctgtgttctatatgttggtcgttggagctctctgtgctggtttgcttttgacccgtctggttattgctgaaattagagagaaacttggatatgttgatgaagaagttcctgcttctgaaccactgttaaccgatagaagatga

SEQ ID NO: 55713 - protein, 544 aa, Arabidopsis thaliana
MAMNSKRKTPPGIALLRRVRGRNWSPKTFRYAILFITFIAYACYHASRKPSSIVKSVLHPDSSTKPPQEHNSDKIYPWPMGNVFVKREIGDIDEVLLHRKSKGWEPFNGKDGTSRLGEIDVAFLACYSIGMYVAGHLGDSLDLRLFLTWGMIGSGFFVGLFGMGYFWNIHAFWFFLVMQMAAGLFQATGWPSVVAVVGNWFGKRKRGLIMGIWNAHTSVGNICGSLIAAGVLEYGWGWSFIAPGFVMSLGGVLVYLFLAAYPEDVGFPDINSNSGKFIKRKRDVEEEEEEVEEDLGTDVEGDGEGSSGSGSGYENKRSVGLLQACMIPGVIPFALCLFFSKLVAYTFLYWLPFYLSQTTIGGEYVSVKTAGNLSTLFDVGGIVGGILCGYISDKFKARATTAAAFMYAAIPAMLVYHSYGGVSQTVNILLMMVAGLFVNGPYALITTAVSADLGTHKSLQGDSRALATVTAIIDGTGSAGAALGPLLTGFLSTLGWQAVFYMLVVGALCAGLLLTRLVIAEIREKLGYVDEEVPASEPLLTDRR

SEQ ID NO: 55714 - DNA, 1515 bp, Arabidopsis thaliana
  CDS (1)..(1515)
atggcgtcatggacttcatcccagttcctgtatgaagaaaccaagccatggggtattcagttcttggaaaagtttaagcgttcaggaagactctccttcaagcaataccaagcccttgtcttcattttgacctttgtcgcctacatcgccttccatgctgcccgaaagcccaatagcattgtcaagggaacactttctgcatcaacaatcgaaggcggttgggctccttttgatggacctgatggaacagccttgcttgggcagatcgacttggctttcctctctgtctatgcggttgggatgtttgtggcaggtcacttgggcgatcgtttggatctcaggacgtttctgaccatcggtatgatcgggaccggccttttcacagctctcttcggggtcgcattctgggcgaatttccacagcttctactatttcttggcggttcaggttatggcggggttgtttcagtcgataggttggccttgtatcgtggctgtgctcgggaattggttcgacaagaagagaagaggaatgattatgggtgtttggagcgctcacacttccctcggtaacattgcagggtctctgatcgcgtctgggctgcttagatatgggtggggttggtcatttcttggcccggcttttctcatgacttttcttgggatcgttgtttaccttttcttgccggtgaatcctccaaccgttgaggcagagagagatggaactgaaattgactctaccatgaggctcggtgacaccattacagagagcttattggaatctagaatgagtactggattcgatagaaaggcagtcgggttcatggccgcttggaaaatccccggtgttgctcctttcgccttctgcctcttcttcacaaagttggtctcatacactttcctctactggcttcctttctacgtcagccacaacatgatcggaggagagtacctgtcagaggagacatcaggaaacttgtcgacaatcttcgatgttggaggcgttgttggtggagtcttagccggatacatatctgatcaactcaacggcagagccatcacagcagcaggattcatgtacttggccatcccagctcttttcctctacagagtctttggacacatctcattgaccatcaatgtcatcctcatgttcacatcaggagtcttcatcattggaccatttgctctcatcacaacagctgtctcagctgatctcggaacccacaaatctctcaaaggcaatgcaagggctttggctacagtctcagctatcatagacggcacaggatccgtcggtgctgcgattggaccagtcctcactggttacatctctgccataagctgggacgcagtgttttacatgttgatgactgcagcattgatctctggattgttgctcactaaactaatcatagcagaagtcaaagcgttattgtttggatcagaagatgaagtagctgcatcatcatcatcaccaccagcatccagacctcccattgatgtcctcgtttga

SEQ ID NO: 55715 - protein, 504 aa, Arabidopsis thaliana
MASWTSSQFLYEETKPWGIQFLEKFKRSGRLSFKQYQALVFILTFVAYIAFHAARKPNSIVKGTLSASTIEGGWAPFDGPDGTALLGQIDLAFLSVYAVGMFVAGHLGDRLDLRTFLTIGMIGTGLFTALFGVAFWANFHSFYYFLAVQVMAGLFQSIGWPCIVAVLGNWFDKKRRGMIMGVWSAHTSLGNIAGSLIASGLLRYGWGWSFLGPAFLMTFLGIVVYLFLPVNPPTVEAERDGTEIDSTMRLGDTITESLLESRMSTGFDRKAVGFMAAWKIPGVAPFAFCLFFTKLVSYTFLYWLPFYVSHNMIGGEYLSEETSGNLSTIFDVGGVVGGVLAGYISDQLNGRAITAAGFMYLAIPALFLYRVFGHISLTINVILMFTSGVFIIGPFALITTAVSADLGTHKSLKGNARALATVSAIIDGTGSVGAAIGPVLTGYISAISWDAVFYMLMTAALISGLLLTKLIIAEVKALLFGSEDEVAASSSSPPASRPPIDVLV

SEQ ID NO: 55716 - DNA, 1290 bp, Rickettsia prowazekii str. Madrid E
  CDS (1)..(1290): transl_table=11
atgacaaatatagagtctaaaattaaaatgccaaggtcgccatatgtaaaaaaatataatagttggcgaataaggattttatattctattgttataggttatgcgactttttatttttgtcgtcagaattttaatatagctacccctgctataagagaatattttggtgttactaaaacacaaattggttggatcttaactgctgcatctattatgtatggagttagtaaagcttgtaatgggtttattagcgataaagttaatgcgcgaatatttatggttttagggcttttatttgttgggattattactattctaataggtttttcagattttttatggcttataggaattttatggatagccagtaactggtttcaatcaatgggatggcctcctgcaacaaaaatgctcactcactggtttgctgcaaaagaacttggaactaaatgggctattggtgcgacttctaatcaaataggtggtgctctcgctatgataagttgcggttatttaattgataaatttgattggagagctgctttttttgttccaggtttagttgcgtgtgtagcatcactttttttatataataggttacgtaattctccaaaagaagttgggttatctacagtagaagaatataaagaatatccacctgaagctataggaaattatgagcgattattaactaaacaattacttaagatggtcttttgtaataagctaatatggtatgtttgtttagcaaacatgtttgtttatatcatccgttctggagtaatttattgggctccaacatttttaaaagatttacgtaatataagctttgtaaatgcaggtttacaaattggtttatatgagatgataggtattccaggagcattaatagcaggtattttatctgataagctatttcaaggtcgtagaggtcctattgcatctatatgtatgatattgcttaccttattgttagttttgttttggaaagtccctattcaaagtgaattattaagtatattaattcttgcgttaataggcttttttgttgcaggacctcagctccttgtaggtatagcagctgctgattttagtactcgtcaagctgttggtactgctaatggattatcaggattatttggttatttaggcgctgcgattgcgggagtaggagtaggatggattagtgataattacgggtggaatggagtatttatattttttagtatttctgctcttttagggggagtattatttgctttgacatggaaccattcagctgaaaaatag

SEQ ID NO: 55717 - protein, 429 aa, Rickettsia prowazekii str. Madrid E
MTNIESKIKMPRSPYVKKYNSWRIRILYSIVIGYATFYFCRQNFNIATPAIREYFGVTKTQIGWILTAASIMYGVSKACNGFISDKVNARIFMVLGLLFVGIITILIGFSDFLWLIGILWIASNWFQSMGWPPATKMLTHWFAAKELGTKWAIGATSNQIGGALAMISCGYLIDKFDWRAAFFVPGLVACVASLFLYNRLRNSPKEVGLSTVEEYKEYPPEAIGNYERLLTKQLLKMVFCNKLIWYVCLANMFVYIIRSGVIYWAPTFLKDLRNISFVNAGLQIGLYEMIGIPGALIAGILSDKLFQGRRGPIASICMILLTLLLVLFWKVPIQSELLSILILALIGFFVAGPQLLVGIAAADFSTRQAVGTANGLSGLFGYLGAAIAGVGVGWISDNYGWNGVFIFFSISALLGGVLFALTWNHSAEK

SEQ ID NO: 55718 - DNA, 1410 bp, Vibrio cholerae O1 biovar eltor str. N16961
  CDS (1)..(1410): transl_table=11
gtgagttccgatagtagaggtttataccatcgcaaaaacaatgaggtcactatgttcgagctcttcaaaccggctgcgcatacgcagcggctgccatccgataaggtggacagcgtctattcacgccttcgttggcaacttttcatcggtatttttgttggctatgcaggctactatttgggtcgtaagaactttagtttggcaatgccttacctgattgaacaaggctttagtcgtggcgatctgggtgtggctctcggtgcggtttcaatcgcgtatggtctgtctaaatttttgatggggaacgtctctgaccgttctaacccacgctactttctgagtgcaggtctactcctttcggcactagtgatgttctgcttcggctttatgccatgggcaacgggcagcattactgccatgtttattctgctgttcttaaacggctggttccaaggcatgggttggcctgcttgtggccgtactatggtgcactggtggtcacgcaaagagcgtggtgagattgtttcagtctggaacgtcgctcacaacgtcggtggtggtttgattggccccattttcctgctcggcctatggatgtttaacgatgattggcgcacggccttctatgtccccgctttctttgcggtgctggtggccgtatttacttggctagtcatgcgcgataccccccaatcttgtggtttaccaccgattgaagagtacaaaaacgactatcccgatgattacgataagtcgcatgaaaatgagatgactgcgaaagagatcttctttaagtatgtcttcaacaacaaactgctttggtcgattgcgattgctaacgccttcgtttacctgatccgctacggtgtacttgactgggctccggtttacctcaaagaagccaaacacttcacggttgataaatcttcttgggcttacttcctgtacgagtgggcgggcatcccgggtactttgttgtgtggttggatttccgacaaagtgtttaaaggccgccgcgcgccagcaggcatcctgttcatggttttagtaactctggcagttctggtttactggttcaacccagctggtaacccagcggtagatatggctgctctggtcgcgatcggctttttgatctacggccctgtgatgttgattggcctttacgctctggaactggctccgaagaaagccgccggtaccgcagcaggtctgactggtctctttggctacttaggtggtgctgtggcagctaacgcgatattgggctataccgttgaccacttcggttgggatggcggcttcatggtcttggttgcctcttgtgtactctcagtgctctgcttgatttacgctttcgttggcgaacgcgctcaccataacgataagcttaaacaagcgaccatttaa

SEQ ID NO: 55719 - protein, 469 aa, Vibrio cholerae O1 biovar eltor str. N16961
MSSDSRGLYHRKNNEVTMFELFKPAAHTQRLPSDKVDSVYSRLRWQLFIGIFVGYAGYYLGRKNFSLAMPYLIEQGFSRGDLGVALGAVSIAYGLSKFLMGNVSDRSNPRYFLSAGLLLSALVMFCFGFMPWATGSITAMFILLFLNGWFQGMGWPACGRTMVHWWSRKERGEIVSVWNVAHNVGGGLIGPIFLLGLWMFNDDWRTAFYVPAFFAVLVAVFTWLVMRDTPQSCGLPPIEEYKNDYPDDYDKSHENEMTAKEIFFKYVFNNKLLWSIAIANAFVYLIRYGVLDWAPVYLKEAKHFTVDKSSWAYFLYEWAGIPGTLLCGWISDKVFKGRRAPAGILFMVLVTLAVLVYWFNPAGNPAVDMAALVAIGFLIYGPVMLIGLYALELAPKKAAGTAAGLTGLFGYLGGAVAANAILGYTVDHFGWDGGFMVLVASCVLSVLCLIYAFVGERAHHNDKLKQATI

SEQ ID NO: 55720 - DNA, 1311 bp, Vibrio cholerae O1 biovar eltor str. N16961
  CDS (1)..(1311): transl_table=11
atgaagattgtacctatggtgcaacccattcaggcaatggaaatcgatcaggcttatcgccactggcgcattcatttaatgatttccatgtatgtcggttatggcgtgttctatctcacacgtaaaagcttcaattttgcgatgccgcaaatgctcagtgagttaggactcgattactccgatttgggttttctcagtacgctgttctacctcacttacggggtgtctaaatttgtttctggtttgatgatcgaccgctcccgctcgccctatttcatggggttgggattgatggccaccggcatcatcaacatcgcttttggttttagttcgtccttgttggcttttaccttgttatggacggcgaatgctttttttcaaggctggggctggcctgcgtgtgccaaggtgctcacccactggtattcacgtagcgaacggggcttttggtggtcaatttggaatacttgccacaacttaagtggcgcattgatccccatcgtgattggttttatcagcttaacctttggctggcgttacggattcttgtttgccggcggagttgcgattttcgttgggctttggctctgttatcgcatccaagagaagccaagcgaaatggggttgccttcggtcggcgaatggcgcggtgatgcccttgaactggaacacgaaaaagaaggccaaggtctcgccttccgcgttgcggtttatcgctatgtactgactaatcgctacatttggctgttgtgtggatcttacttgctggtgtacgtggtcagaattggcattaacgactggggatcgctttatctggttgagcggcacgcatacaacattctcagtgccaatagcgcagtagccatgtttgaagtgggcggatttttgggctcgttgcttggtggctggggttccgactattactttcgcggcaaccgtgccccgatgaatttgatttttgcgttaggcatttttgcctccgttgcggccttatggctgacacctatcgatcatttatggtttttggctggctgcttcttctgtatcggattttttgtcttcggcccgcaaatgatgattggtatggctgccgcagaatgcgcaaggaaagatttggcaggcaccgcgaccgggttcgttggcttatttagctatctcggtgcagctttagccagctaccccatgtcactggctattgaagcatggggctgggaaggcttcttctgcctaattactgcggcagcagccgtgatcagtttacaactgctgccctttataaaagctcagcaaccggtgacggaagatgagtga

SEQ ID NO: 55721 - protein, 436 aa, Vibrio cholerae O1 biovar eltor str. N16961
MKIVPMVQPIQAMEIDQAYRHWRIHLMISMYVGYGVFYLTRKSFNFAMPQMLSELGLDYSDLGFLSTLFYLTYGVSKFVSGLMIDRSRSPYFMGLGLMATGIINIAFGFSSSLLAFTLLWTANAFFQGWGWPACAKVLTHWYSRSERGFWWSIWNTCHNLSGALIPIVIGFISLTFGWRYGFLFAGGVAIFVGLWLCYRIQEKPSEMGLPSVGEWRGDALELEHEKEGQGLAFRVAVYRYVLTNRYIWLLCGSYLLVYVVRIGINDWGSLYLVERHAYNILSANSAVAMFEVGGFLGSLLGGWGSDYYFRGNRAPMNLIFALGIFASVAALWLTPIDHLWFLAGCFFCIGFFVFGPQMMIGMAAAECARKDLAGTATGFVGLFSYLGAALASYPMSLAIEAWGWEGFFCLITAAAAVISLQLLPFIKAQQPVTEDE

SEQ ID NO: 55722 - DNA, 1380 bp, Vibrio cholerae O1 biovar eltor str. N16961
  CDS (1)..(1380): transl_table=11
atgcttaatttctttaaaacccgccccgatctgcctttactcagcagctcaaaagcggaaatgttaaaacgctacaaaagctatcaatggcaagtctttattggcctgattttcggttatgccatgttctacgtggtacgtatggcgctcggcgtagtgaaaaaaccgatgctggatgctggcatcgtcaccctcgaagaactcggcatcatgggttcggccttcttctttacttatgcctttggtaagttcctgaacggctttctatctgactacgccaacattggccgctttatgtcgttctcgctgctgctgtcgggcgttgcttcgatcttcatggggatgaacacggtcgcgttcttcttcgttctgctgtggggcttgaacggttggttccagtcggtcggttctgcaccatcttgcgtctctatctaccaatggttctctccaaagcaacgtggtagccgttactccatctggggcggctcacgtaacatcggtgaaggtatcacttggatcctaaccgcaagcttggtgagctactttggctggcgtgcaggtttcatcggtgcgggtatcgcgggtgtcgtggcttctctcatcatgtttaagctactgaaagaccgcccacaaacttatggtatgcctgatccaggcacagcgtttgaggaaggcacggaaatcaaaaaagccaacgatccaaaagaaacacgccgtgcgcaaatgttcatcctgaagcaacctgtggtatggcttatcgctctggcttgtgcggcgatgtacatctctcgctacgccatgtcttcttgggcagtgctgttcctgcaagagcaaaaaggctactcactgattgacgctggttttgccatgtccatgtacccaactgcgggtctggctggtgcgattctgtcaggtatcttgtctgacaaagtgttcaaaggtaaccgtaacatccctaacctgctgtacggattgaccaacatcgctggtatgtgtctgatgttcttcggcccagataaccgtatcgttgatgctgtagcactgagcatgatcggcttctcgatcggtggtctagtcgtgttccttgccggccttatcgcttgtgacctaatgccgaaaaacgcagtcggcgccgtgaaaggcctgatcggtctctgttcttacatcgctgcttctgctcaagaacttatctctgcatcactgatcacagtgactgaagtcgaaggcgtaaaacattacgacttcggtaacgctcagtacttctggttggctgctggggtggtttcagtactactcgccctaaccgtgtggaatgccaagaaagtcgtcgatatcgacgaagcagaaggcaagccgttgaaaacccaaaccgcttcttaa

SEQ ID NO: 55723 - protein, 459 aa, Vibrio cholerae O1 biovar eltor str. N16961
MLNFFKTRPDLPLLSSSKAEMLKRYKSYQWQVFIGLIFGYAMFYVVRMALGVVKKPMLDAGIVTLEELGIMGSAFFFTYAFGKFLNGFLSDYANIGRFMSFSLLLSGVASIFMGMNTVAFFFVLLWGLNGWFQSVGSAPSCVSIYQWFSPKQRGSRYSIWGGSRNIGEGITWILTASLVSYFGWRAGFIGAGIAGVVASLIMFKLLKDRPQTYGMPDPGTAFEEGTEIKKANDPKETRRAQMFILKQPVVWLIALACAAMYISRYAMSSWAVLFLQEQKGYSLIDAGFAMSMYPTAGLAGAILSGILSDKVFKGNRNIPNLLYGLTNIAGMCLMFFGPDNRIVDAVALSMIGFSIGGLVVFLAGLIACDLMPKNAVGAVKGLIGLCSYIAASAQELISASLITVTEVEGVKHYDFGNAQYFWLAAGVVSVLLALTVWNAKKVVDIDEAEGKPLKTQTAS

SEQ ID NO: 55724 - DNA, 1293 bp, Pasteurella multocida subsp. multocida str. Pm70
  CDS (1)..(1293): transl_table=11
atgatgccaatacaaaacttttcgcaaattgaccgcacttatcgctactggcgcattcacttaatgattgccatgtacgtaggctatgccggtttttacctcagccgtaaaagcttgaattatgccatgcccgccttaatcagcgatttggctatggataaaaatgccattggactcatggcaactttgttttatctcacctatggtttatccaaatttttctctggacttttttctgatcaagccaacccccgttacattatggctatcggcttgatgatgacagggatcacgaatattttattcggtttatccagttccgtgtttctgttcacttgcctatgggtcatcaatgcgtggtttcaggggtggggctggcctgcgtgttctaaatatctcactacgtggtattcccgtagcgagcgaggtttatggtggtctatttggaatactgcgcacaatgtgggaggcgccttaattccgctaattgttggctatctcactttacattacagctggcgacacggctttattgtagcaggcataatcgtcatactcatcagtgtatttttactgtggcgtttacctagcacgccagatgcaatggggttgcctagtattggacaatggcgtcatgatcctttggaattagcacaagaaaaggaaggacaagatttaccatggcggcaaatcttgcgtgattatgtgttctacaataaatatctttggctactcgcaatgagctatgcattggtctatctcgtgcggaccgccattaatgactggggtaatctctatctaagtgaacgttatcactatgacttagtcagtgcgaacagcgcactctctttatttgaaatcggtggttttatgggatcactagtcgccggttggggatcagataaactgttttctagcaatcgaggacctatggcattggtgtttgccattggcattttcttttcgattaccgcgctttggctgatgccaaaagaaaacatgctattacagtctggcttatttttctgtgtcggcttttttgtgtttggtccgcaaatgttaatcggcatggctgctgcggaatgtgcccacaaaaaaaccgcaggcaccgccacgggttttgttggcttgtttgcttatctgggggcagccctcgctggctacccactggcactcatcacacaaacgtttcattggaccggtttttttgtcgtaatttcttgctgtgcatttgctattgcgttactgctactgccttttttaaaagtacagccaaatcaatcgtcttgttga

SEQ ID NO: 55725 - protein, 430 aa, Pasteurella multocida subsp. multocida str. Pm70
MMPIQNFSQIDRTYRYWRIHLMIAMYVGYAGFYLSRKSLNYAMPALISDLAMDKNAIGLMATLFYLTYGLSKFFSGLFSDQANPRYIMAIGLMMTGITNILFGLSSSVFLFTCLWVINAWFQGWGWPACSKYLTTWYSRSERGLWWSIWNTAHNVGGALIPLIVGYLTLHYSWRHGFIVAGIIVILISVFLLWRLPSTPDAMGLPSIGQWRHDPLELAQEKEGQDLPWRQILRDYVFYNKYLWLLAMSYALVYLVRTAINDWGNLYLSERYHYDLVSANSALSLFEIGGFMGSLVAGWGSDKLFSSNRGPMALVFAIGIFFSITALWLMPKENMLLQSGLFFCVGFFVFGPQMLIGMAAAECAHKKTAGTATGFVGLFAYLGAALAGYPLALITQTFHWTGFFVVISCCAFAIALLLLPFLKVQPNQSSC

SEQ ID NO: 55726 - DNA, 1446 bp, Pasteurella multocida subsp. multocida str. Pm70
  CDS (1)..(1446): transl_table=11
atgattggtccatttaaacccgcaccgcatattgcggaacttcccgcggataaaattgatgcacgctatcgtttcttacgttggcaagtgtttgctggcatcttttttggttacgccgcttattatttcgtccgtgcaaacttcgatttagcacaaaaaggcttgattgaagctggtatgtataacaaagctgaacttgggattatcggtacaggggcgggtttggcatacggcttatcgaaattctttatggcatccatttccgatcgctcaaacccaaaagtctttttacctttcggtttgctcttatctggtttgtgtatgacgatgatgggtctcatgccatgggcaacctcagggattgctgtgatgttcatcatgattttcttaaacggttggttccaaggtatgggttggccaccatgtggtcgtacaatggtgcattggtggtctaaatctgaacgtggttcgatcgtgtcaatttggaataccgcgcataacttagggggaatggtaccaggggcgatggtgttactcgccagtgccgtttacttcagcacacatggtgttgaagcgaccgcaaaagacgtttggcaacaagctctttattatccaggtattgcagccatgattgcggcgattccaatttattttatgatgaaagacacaccacaatcttgtggtttacctcctatcgaaaaatggcgtaatgattacccagacgattacaacgaaaaaacctatgagcatgatttaagcacaaaagatattttcgtgacttacgtcttaaaaaatcgcctactttggtatatcgcgattgctaacgtattcgtgtatttaatccgctacggtgtcttaaaatggtcgccagtgtaccttggcgaagtgaaacacttcaacatcaaagggactgcttgggcgtacactatttatgaattagccgcggttccagggactttattatgtggttgggtctctgataaagtgttcaaaggtaaacgtggtttaacaggtttcattttcatgattttaaccactgccgccgtcgtagcattatggttaaacccagcaacaccagaagctgaattagctaaatatgcaggtcatgcatggtatgaaaacccatatcagttaatggacttcattctcatgacaaccattggtttcttaatctacggtcctgtgatgcttatcggtttacatgcgcttgagcttgcgccgaaaaaagcggcagggacatctgcaggtttcaccggtttatttggttacttaggtggtactgtatctgcatcagccgtagtgggttgggctgccgaatattatggctgggacggtggtttctacgtcatgatcgcaggtggggtactcgctatcttattaatgttcatcactatgattgaagaaagtaaacataaagcccgtttagaagatcattacggcaaataa

SEQ ID NO: 55727 - protein, 481 aa, Pasteurella multocida subsp. multocida str. Pm70
MIGPFKPAPHIAELPADKIDARYRFLRWQVFAGIFFGYAAYYFVRANFDLAQKGLIEAGMYNKAELGIIGTGAGLAYGLSKFFMASISDRSNPKVFLPFGLLLSGLCMTMMGLMPWATSGIAVMFIMIFLNGWFQGMGWPPCGRTMVHWWSKSERGSIVSIWNTAHNLGGMVPGAMVLLASAVYFSTHGVEATAKDVWQQALYYPGIAAMIAAIPIYFMMKDTPQSCGLPPIEKWRNDYPDDYNEKTYEHDLSTKDIFVTYVLKNRLLWYIAIANVFVYLIRYGVLKWSPVYLGEVKHFNIKGTAWAYTIYELAAVPGTLLCGWVSDKVFKGKRGLTGFIFMILTTAAVVALWLNPATPEAELAKYAGHAWYENPYQLMDFILMTTIGFLIYGPVMLIGLHALELAPKKAAGTSAGFTGLFGYLGGTVSASAVVGWAAEYYGWDGGFYVMIAGGVLAILLMFITMIEESKHKARLEDHYGK

SEQ ID NO: 55728 - DNA, 1335 bp, Pseudomonas aeruginosa PAO1
  CDS (1)..(1335): transl_table=11
atgaacaaccacaacggtaccctgcaccgtggctggcaatcgctccagcgctggcgcatccagatcttcgtcatcacctggctggcctacgccgccttctacttcacccgcaaggccttctcggtggccaagctcggcatcgccgaagacccctccttcgagctcgacaagagcgccatggccgatctcgatgccctctacctggccgcctacgccgtgggccagttcatgtggggggtgttcgccgaccgcttcggcacccgcgtggtggtgctcggcggtttgctcacctcggcgctggcggcgctgatgatgggtaccttcgccaccctgccgatcttcgccgcctgcatggtggtccagggcctggcgcagtccaccggctggtcggggctgtgcaagaacatcggcgccttcttcgccacctacgagcgaggccgcgtgctcggcctgtggagtacctgctacgccttcggcgggctggtggcgacgccgttcgccggctggtgcgcctaccggttgacgcatgactggcgcatggccttcctgtcctcggcgggagtggtgctggcggtggccgtgctgttcttcttcctccagcgcaaccgtccgcaggacgtcggcctgccgcccgtggaggccgaggccgcgccccccgccaacgcgccccggccgagccattccggcgccctgctgaaggcgctcaggaatccccacgtgctggtcctcggcatcgcctacttcctgctcaagccggcgcgctacgcgatcctgctctggggcccggtgatcatctacgaacgcatgccggagatcggcaaggtcgcctcggccatcgtgccttcggccttcgaggtcgccgggctggccgggccgatcctcatcggcctggcctcggacaagctgttcggcgcccgccgcatgccggcctgcgtgctcagcctggcggcgctgaccctgagcctggcgctgttcgtcccggcgatgcagagcggcagcctgtacctggtggtcagcctgctgttcatgatgggcgtcaccctctacgggccggactcgatgatcagcggcgccgccgccatcgacttcggtaccagcgaagcagccggtaccgccaccggcttcgtcaacggctgcggctcggtcggggcgatcctcggcggcctgctgccgggctacttcgacaccctcacggtgttcttcgtgttcaccgccaccgcgctgctcgccagcctgctgctggtgccgttctggaacagccggccaggcgcgtgccgcgtcgaaccgaaggcgcatgccagcgggccgctgctggcggccggcaagccgcgttga

SEQ ID NO: 55729 - protein, 444 aa, Pseudomonas aeruginosa PAO1
MNNHNGTLHRGWQSLQRWRIQIFVITWLAYAAFYFTRKAFSVAKLGIAEDPSFELDKSAMADLDALYLAAYAVGQFMWGVFADRFGTRVVVLGGLLTSALAALMMGTFATLPIFAACMVVQGLAQSTGWSGLCKNIGAFFATYERGRVLGLWSTCYAFGGLVATPFAGWCAYRLTHDWRMAFLSSAGVVLAVAVLFFFLQRNRPQDVGLPPVEAEAAPPANAPRPSHSGALLKALRNPHVLVLGIAYFLLKPARYAILLWGPVIIYERMPEIGKVASAIVPSAFEVAGLAGPILIGLASDKLFGARRMPACVLSLAALTLSLALFVPAMQSGSLYLVVSLLFMMGVTLYGPDSMISGAAAIDFGTSEAAGTATGFVNGCGSVGAILGGLLPGYFDTLTVFFVFTATALLASLLLVPFWNSRPGACRVEPKAHASGPLLAAGKPR

SEQ ID NO: 55730 - DNA, 1371 bp, Pseudomonas aeruginosa PAO1
  CDS (1)..(1371): transl_table=11
atgaatcaacgtcccgggacggcgctgccgtcctctcccgtgtccagcttccagcgctggcgcctgcagatattcgcgatcacctggctggcctacgccgccttctatttcacccgcaaggccttttccgtcgccaagctcggcatcgccgaagatccgggcttccagttggacaagatggcgatggccgatctcgacgccatctacctcgccgcctatgccgtcggccagttcacctggggcgtgctggccgaccgcttcggcccgcgcatcgtggtgttcggcggcctgctgatctccgcactggccgcgctggtcatgggcaccttcgccaccctgccgatcttcgccacttgcatggtggtccagggactggcgcagtccaccggctggtcggggctgtgcaagaacatcggcagtttcttcgccacccacgaacgcggtcgggtgctcggcctgtggagcacctgctacgccttcggcggcctggtcgcctcgccgttcgccggctggtgggcgtacagcgtgttcggtacctggcacgcggcgttctacttcagcgccgcggtggtcggcggcgtggccctgctgttcctgttgttgcagcgcaaccgcccggaagacgtcggccatcctcccgtcgaaccgcaggccgcgagcgaagccgtgcgctatgccggcttcaggccggaaggcggcaacggcggcaacggcggcagcctgcaggtgctcgccaaggtggtgcgcaaccgcacggtgctctgcctcggcctggcctacttcctgctcaagccggcgcgctacgcgatcctcctgtggggaccggtgatcgtctacgaacgcatgccggcgctcggcaaggtcggcgcggcgatcgttcccaccgccttcgaggtagccggcctgctcggcccgatcctgatcggcttcgcctcggacaagctgttcggcgcacggcgcatgccggcctgcgtgatcagcctgctggcgctgaccgtctgcctggcgctgttcgtcccggcgatgaccaccggcagcattccgatagtggtcggcctgctgttcatgatgggactgaccctgtacggcccggactcgatgatctgcggctccgccgccatcgacttcggcaccagcgaggccgccggcaccgcctccggcttcgtcaatggctgcggttcggtgggcgcgatcctcggcggtctgttgcccggctatttcgacacctacacggtgttcatcggcttcaccatcgcagccctgatcgccaccgcggtgctcctcccgcactggaacagccggcccggcggcgcacgggaaagcctgcggaatatccccagcctggcggacttccgtcccatccgctcctga

SEQ ID NO: 55731 - protein, 456 aa, Pseudomonas aeruginosa PAO1
MNQRPGTALPSSPVSSFQRWRLQIFAITWLAYAAFYFTRKAFSVAKLGIAEDPGFQLDKMAMADLDAIYLAAYAVGQFTWGVLADRFGPRIVVFGGLLISALAALVMGTFATLPIFATCMVVQGLAQSTGWSGLCKNIGSFFATHERGRVLGLWSTCYAFGGLVASPFAGWWAYSVFGTWHAAFYFSAAVVGGVALLFLLLQRNRPEDVGHPPVEPQAASEAVRYAGFRPEGGNGGNGGSLQVLAKVVRNRTVLCLGLAYFLLKPARYAILLWGPVIVYERMPALGKVGAAIVPTAFEVAGLLGPILIGFASDKLFGARRMPACVISLLALTVCLALFVPAMTTGSIPIVVGLLFMMGLTLYGPDSMICGSAAIDFGTSEAAGTASGFVNGCGSVGAILGGLLPGYFDTYTVFIGFTIAALIATAVLLPHWNSRPGGARESLRNIPSLADFRPIRS

SEQ ID NO: 55732 - DNA, 1347 bp, Pseudomonas aeruginosa PAO1
  CDS (1)..(1347): transl_table=11
atgttcggaatctttcgtcccgcgccacaccaggcgccactgcccgatgccgaggtggacagcacctaccggcgcctgcgctggcagatcttcgccggtatcttcatcggctacgcgggttactacctgctgcgcaagaacttctccctggccatgccctacctcatcgaggacggctacagccgcggtcaactgggcgtcgcgatgtcggccatcgccatcgcctacggcctgtcgaaattcatcatgggcctggtctcggaccgttccaacccacgggtcttcctgccgttcggcctgttggtgtcggcggcggtgatgttcattttcggattcgcgcactgggctacctccagcgtcgccatcatgttcgtcctgctcttcatcaacggctgggcccagggcatgggctggccgccgagcggacggaccatggtccactggtggtcgcagaaggagcgcggcagcgtggtctcagtgtggaacgtcgcccacaatgtcggcggcggcctgatcggcccgctgttcctgctcggcctggcgctgttcggcgactggcgctcggccttctacgtgccggccatcgtcgccgtgggcgtagccgtgttcgcctatttcgccatgcgcgacaccccgcaatcctgcggcctgccgccgatcgagaagcataaggacgactaccccgaaggctacgacgaacaccacgagcgcgagctgtcgaccaaggagatcttcgtcacctacgtgctgcgcaacaagctgctctggtacatcgccctggccaacgtgttcgtctacctgctgcgctacggtgtgctcgactgggcgccgacctacctcaaggaggccaagcacttcaacgtcgacaagtcgtcctgggcgtacttcttctacgaatgggcggggattcccggcaccctgctctgcggctggctgtcggacaagctgttcaagggcaatcgcggcgccaccggcgtggtgttcatgatcctggtgaccgtcggcaccctgatctactggctgaacccggccggcaacccggcgatcgacatggccgcgctgatcatgatcggcttcctgatctacggcccggtgatgctgatcggcttgcaggccctggagctggcgccgaagaaagcggccggcaccgccgccggcttcaccggtctgttcggctacctcggcggctcggtggcggccaacgccctggtcggctacacggtggatcacttcggctgggacggtggcttcaagctgctgatcggcgcctgcctgctggccatcctgttcctctgcctgaccctgcgcaaacccgcggtccaggccgcgccgcagcaagccggctga

SEQ ID NO: 55733 - protein, 448 aa, Pseudomonas aeruginosa PAO1
MFGIFRPAPHQAPLPDAEVDSTYRRLRWQIFAGIFIGYAGYYLLRKNFSLAMPYLIEDGYSRGQLGVAMSAIAIAYGLSKFIMGLVSDRSNPRVFLPFGLLVSAAVMFIFGFAHWATSSVAIMFVLLFINGWAQGMGWPPSGRTMVHWWSQKERGSVVSVWNVAHNVGGGLIGPLFLLGLALFGDWRSAFYVPAIVAVGVAVFAYFAMRDTPQSCGLPPIEKHKDDYPEGYDEHHERELSTKEIFVTYVLRNKLLWYIALANVFVYLLRYGVLDWAPTYLKEAKHFNVDKSSWAYFFYEWAGIPGTLLCGWLSDKLFKGNRGATGVVFMILVTVGTLIYWLNPAGNPAIDMAALIMIGFLIYGPVMLIGLQALELAPKKAAGTAAGFTGLFGYLGGSVAANALVGYTVDHFGWDGGFKLLIGACLLAILFLCLTLRKPAVQAAPQQAG

SEQ ID NO: 55734 - DNA, 1302 bp, Lactococcus lactis subsp. lactis Il1403
  CDS (1)..(1302): transl_table=11
ttgtataaaatgtggcaaactcgagttttaatttcgacggcattcgtttatattggttattatattattcgattgatctttaccgttcaacaaaatgatatttccaaggcttatggtttttcgatgggacaaattgggacaattctctccatgtttgggattggctatggaatttcaaagcttattatgggaacattagctgaccgggccaatccaaaccgttatgtggcaacaggattgattgtgtcagcgattatcaatgcgctttatggaacaacccaaagttttgggatgatagtctttctgatgttgcttaactcggttatgcaaggtatgggagctgcggcttgtcagcgtttagtcggtttatggtttggccgaaaagcaaaaggttcgattatggcgcgtgggacagcattttcaatctggtcatcagctcataatgctggagctttcatgtgtgtggctgtcattaatttatctgctttctttttcggcgcttcgcttcaatggagtttttggacagcatcaattgtttcgattgtcattgctattatcgttttatttctgggttctgaccgtccaacgacgaaaggattaccgacaattgaagaatattctggcgacaaagtggtcattaaagacggagaaattgttgaaggcgatgtttctaatgacaatgtttttaaaatattttttgaatacattgtcaaaaataaactcgtgtgggcggtcattttgacctcattgtcaatctatgtcgttcgttatggaattatgagttggattccaaactatctggttaatatcaaaggatttgataattcaacagcaaaatggctgacaggaatttttgaacttgcagctgtacctggggttattatcatcggatttatcactgatttacttaaaggtcgtcgggccattatggttttggtttcattgattgcaatgcttgcctgtctgattacttattttgcagcgaccaatcatactttgattattattgtgttattaattatgggaactttcatttatgctccagcaacaattgtcgggctgatggtcaatgaagctgtcccaaaatttgccaatggaatgtcaacgggtacgatggggttctgtcagtacattattggtgaagtgacagcaactctggttattggttggcttgttcaagcatacggctggtcagcaggaaatatcattgtttatatttttgccggcattgccattcttgcttcaatttatatcttggttcatcaaaatcgattatataagaaaattgatgatgcaggctaa

SEQ ID NO: 55735 - protein, 433 aa, Lactococcus lactis subsp. lactis Il1403
MYKMWQTRVLISTAFVYIGYYIIRLIFTVQQNDISKAYGFSMGQIGTILSMFGIGYGISKLIMGTLADRANPNRYVATGLIVSAIINALYGTTQSFGMIVFLMLLNSVMQGMGAAACQRLVGLWFGRKAKGSIMARGTAFSIWSSAHNAGAFMCVAVINLSAFFFGASLQWSFWTASIVSIVIAIIVLFLGSDRPTTKGLPTIEEYSGDKVVIKDGEIVEGDVSNDNVFKIFFEYIVKNKLVWAVILTSLSIYVVRYGIMSWIPNYLVNIKGFDNSTAKWLTGIFELAAVPGVIIIGFITDLLKGRRAIMVLVSLIAMLACLITYFAATNHTLIIIVLLIMGTFIYAPATIVGLMVNEAVPKFANGMSTGTMGFCQYIIGEVTATLVIGWLVQAYGWSAGNIIVYIFAGIAILASIYILVHQNRLYKKIDDAG

SEQ ID NO: 55736 - DNA, 1392 bp, Escherichia coli O157:H7 EDL933
  CDS (1)..(1392): transl_table=11
atgctggctttcttaaaccaggtccgcaagccgaccctggaccttccgctcgaagtgcggcgcaaaatgtggttcaaaccgttcatgcaatcctacctggtggtctttatcggctacctgacgatgtacctgattcgcaagaactttaacatcgcgcagaacgatatgatttcgacctacgggttgagcatgacgcagctggggatgatcggcctgggtttctccatcacttatggcgtgggtaaaacgctggtttcctactacgccgacggcaaaaacaccaaacaattcctgccgttcatgctgatcctgtctgccatttgtatgctgggctttagcgccagtatgggcagcggctcggttagcctgttcctgatgattgccttctacgccttaagtggctttttccagagtaccgggggttcgtgcagttactccaccatcaccaaatggacgccgcgtsgtaaacgcgggacgttcctcggtttctggaacatttctcacaaccttggcggtgcaggcgcagctggtgtggcactgttcggcgcaaattacctgttcgatggccatgtcatcggcatgtttatcttcccgtcgattatcgcgctgattgtcggttttatcggcctgcgttacggcagcgactccccggaatcttatggcctcggcaaagctgaagagctgttcggcgaggagatcagcgaagaggacaaagagacagaatctaccgatatgaccaagtggcagatctttgttgagtatgtgctgaaaaacaaagtgatctggctgctgtgcttcgccaacattttcctctatgtggtgcgtattggtatcgaccagtggtcaactgtgtacgcgttccaggaactgaaactctctaaagcggtggcgattcagggctttacgctgtttgaagctggtgcgctggtcggtacgctgctgtggggctggctctctgacctagcgaacggtcgccgtggcctggtggcctgcatcgcgctggcgctgattatcgccacgctcggtgtgtaccaacatgccagcaacgaatatatctatctggcttctctctttgcgttgggtttcctggtctttggcccgcaattgttgattggtgtggctgctgttggctttgtacctaaaaaagcgattggcgctgccgatggtattaaaggcaccttcgcttacctgattggtgacagctttgccaagttaggtctgggaatgattgccgatgggacgccagtattcggccttaccggctgggcaggcaccttcgctgcgctggatatcgccgcgattggttgtatctgcctgatggcgatagtggcggtgatggaagaacgcaaaatccgccgcgagaaaaaaattcagcagttgacagtggcataa

SEQ ID NO: 55737 - protein, 463 aa, Escherichia coli O157:H7 EDL933
  misc_feature (155)..(155): Xaa can be any naturally occuring amino acid
MLAFLNQVRKPTLDLPLEVRRKMWFKPFMQSYLVVFIGYLTMYLIRKNFNIAQNDMISTYGLSMTQLGMIGLGFSITYGVGKTLVSYYADGKNTKQFLPFMLILSAICMLGFSASMGSGSVSLFLMIAFYALSGFFQSTGGSCSYSTITKWTPRXKRGTFLGFWNISHNLGGAGAAGVALFGANYLFDGHVIGMFIFPSIIALIVGFIGLRYGSDSPESYGLGKAEELFGEEISEEDKETESTDMTKWQIFVEYVLKNKVIWLLCFANIFLYVVRIGIDQWSTVYAFQELKLSKAVAIQGFTLFEAGALVGTLLWGWLSDLANGRRGLVACIALALIIATLGVYQHASNEYIYLASLFALGFLVFGPQLLIGVAAVGFVPKKAIGAADGIKGTFAYLIGDSFAKLGLGMIADGTPVFGLTGWAGTFAALDIAAIGCICLMAIVAVMEERKIRREKKIQQLTVA

SEQ ID NO: 55738 - DNA, 1296 bp, Rickettsia conorii str. Malish 7
  CDS (1)..(1296): transl_table=11
atgacaaatacaagatccaaaattaaaactccaagatcgccatatgtaaaaaaatataatagttggcgagtaaggattttgtattctattattataggttacgcaactttttatttttgtcgtcagaattttaatatagcaactcctgctataagagaatattttggggttactaaaacgcaaattggctggatattaactgcttcatctattatgtatggagttagtaaagcgtgtaacgggtttattagcgataaagttaatgctcggatatttatggttttgggtcttttatttgtcgggatcattactatgctaataggtttttcagattctttatggcttataggaattttatggatagccagtaactggtttcaatctatgggctggcctcctgcaacaaagatgcttactcactggttcgcttcaaaagaacttggaactaaatgggctatgggtgcaacttctaatcaaataggtggtgcccttgctatgataagctgcggttatttaatcgataaatttgattggagagctgccttttttgttccaggtgtagttgcttgtgtagtatcgctttttttatataataggcttcgtaattctccaaaagaagtaggtttatctaccgtagaggaatataaagaatatccgcttgaagctataggagattatgaaaagctattaactccacaattacttaaaatggtcttttgtaataagctaatatggtatgtttgtttagcaaacatgtttgtttatataatacgttccggagtaatttattgggctccaacatttttaaaagatttacgtaatataagtcttgcaaatgcaggcttacaaatcggtttatatgaaatgataggtatcccaggggcattaatagcaggtgtgttatctgataaactatttcaaggtcgtcgaggtcctgttgcatccatatgtatggtattgcttagcttattgttagtcttgttttggaaacttcctattcacagtgaattattaagtatagtaattctttctttaataggcttttttgtttcaggacctcagctccttgtaggtatagcagctgctgattttagtacccgtcaggctgtcggtacggctaatggattatcagggttatttggttatttaggagcggctattgcgggagtcggcgtaggatggattagcgataattatggttggaatggggtatttatatttttcagtatttctgctcttttaggaggaggattatttgctttaatatggaatcgttcagctaaaaaatacatttaa

SEQ ID NO: 55739 - protein, 431 aa, Rickettsia conorii str. Malish 7
MTNTRSKIKTPRSPYVKKYNSWRVRILYSIIIGYATFYFCRQNFNIATPAIREYFGVTKTQIGWILTASSIMYGVSKACNGFISDKVNARIFMVLGLLFVGIITMLIGFSDSLWLIGILWIASNWFQSMGWPPATKMLTHWFASKELGTKWAMGATSNQIGGALAMISCGYLIDKFDWRAAFFVPGVVACVVSLFLYNRLRNSPKEVGLSTVEEYKEYPLEAIGDYEKLLTPQLLKMVFCNKLIWYVCLANMFVYIIRSGVIYWAPTFLKDLRNISLANAGLQIGLYEMIGIPGALIAGVLSDKLFQGRRGPVASICMVLLSLLLVLFWKLPIHSELLSIVILSLIGFFVSGPQLLVGIAAADFSTRQAVGTANGLSGLFGYLGAAIAGVGVGWISDNYGWNGVFIFFSISALLGGGLFALIWNRSAKKYI

SEQ ID NO: 55740 - DNA, 657 bp, Staphylococcus aureus subsp. aureus Mu50
  CDS (1)..(657): transl_table=11
atgacgaaatgggagatctttaaaaaatatatcctgggaaatcctgttatatggattctatgtgtttcaaacgtctttgtatacattgtacgaatcggtattgataactgggcaccgttatatgtgtcagagcatttacactttagtaaaggcgatgcagttaatacgatattctactttgaaattggtgcattagttgcaagtttattatggggctacgtatcagacttattaaaaggtcgtcgtgcaattgtagctattggctgtatgtttatgattacatttgttgtcttattctacacaaatgctacaagtgtcatgatggttaacatttcattgtttgcattaggtgcgttaatctttggtccgcaattattaattggtgtatcattgactggttttgttcctaaaaatgccatcagtgtagcaaacggaatgacaggttcattcgcgtatctattcggtgactcaatggcgaaagttggtttggcggctattgctgatccaacacgtaacggtttaaacatctttggatatacattaagtggatggacagatgttttcatcgtcttctatgttgcattattcctaggcatgattctattaggaatcgttgctttctatgaagaaaagaaaattagaagtttaaaaatttaa

SEQ ID NO: 55741 - protein, 218 aa, Staphylococcus aureus subsp. aureus Mu50
MTKWEIFKKYILGNPVIWILCVSNVFVYIVRIGIDNWAPLYVSEHLHFSKGDAVNTIFYFEIGALVASLLWGYVSDLLKGRRAIVAIGCMFMITFVVLFYTNATSVMMVNISLFALGALIFGPQLLIGVSLTGFVPKNAISVANGMTGSFAYLFGDSMAKVGLAAIADPTRNGLNIFGYTLSGWTDVFIVFYVALFLGMILLGIVAFYEEKKIRSLKI

SEQ ID NO: 55742 - DNA, 1065 bp, Staphylococcus aureus subsp. aureus Mu50
  CDS (1)..(1065): transl_table=11
atgaattttcttaaacctgcaaagcatattaagcctttgccagaaaatcagatagatgatacctataaacgattacgtctccaagtatttcttggtattttcatcggttacgctgggtactatttattacgtaaaaacttttcattagcgatgccagcattgcaagagcaaggttttacaaaagcggaactaggttttgcactttctgctgtttccatcgcatatggatttagtaagttctttatgggtactgtaagtgatcggagcaatgctcggatattcttagttcttggattagcactcactgctatcgtcaatttgttaatgggatttgtaccgttctttacatcaggtatcggtattatgtttgtcctattattcttaaatggatggtttcaaggtatgggctggccaccttcaggccgtgttctcgttcactggtttagtgtaagtgaacgcggaagtaagactgccctttggaacgttgcgcataatgttggtggaggtattatggcacctattgctgcttggggtattacaacaacagcatttatcaactttggttatttaaaaggtttcgaaggtgtattcatttaccctgcactcttagcacttatcattgccgcaatttcatacgtattgattagagacacacctcaatctcaaggtttacctccaatcgaaatttataaaaacgactttgctacaagcgataagaaaacattagaaacagaattaactacaaaagaaattttatttaaatatgtactgaacaataaatgggtatgggcaattgcctttgcaaatatatttgtttatttcgtgcgttatggtgtacttgattgggcgccagtctacttaagtgaagaaaaacatttcgacttaaaagcatcaggttgggcatacttcttatacgaatgggctggaattcctggtacattattatgtggttacatttctgataaattattcaaaggtcgtcgtggacctgcaggtttcttctttatgttaggtgtcacagtatttgtattaatttattggttaaatcctccaggcaatgcttag

SEQ ID NO: 55743 - protein, 354 aa, Staphylococcus aureus subsp. aureus Mu50
MNFLKPAKHIKPLPENQIDDTYKRLRLQVFLGIFIGYAGYYLLRKNFSLAMPALQEQGFTKAELGFALSAVSIAYGFSKFFMGTVSDRSNARIFLVLGLALTAIVNLLMGFVPFFTSGIGIMFVLLFLNGWFQGMGWPPSGRVLVHWFSVSERGSKTALWNVAHNVGGGIMAPIAAWGITTTAFINFGYLKGFEGVFIYPALLALIIAAISYVLIRDTPQSQGLPPIEIYKNDFATSDKKTLETELTTKEILFKYVLNNKWVWAIAFANIFVYFVRYGVLDWAPVYLSEEKHFDLKASGWAYFLYEWAGIPGTLLCGYISDKLFKGRRGPAGFFFMLGVTVFVLIYWLNPPGNA

SEQ ID NO: 55744 - DNA, 1332 bp, Yersinia pestis CO92
  CDS (1)..(1332): transl_table=11
atgtggtttttcctcaaaagtcgcgataacgtaccgctagtaacggatcaaacacaaattgattcatcctataagtattggcgtatccaattaatgtggacgatgtatatcggctacgctgcgttttatttcactcgtaaaagtttcaattttattatgcctgctatgctcacggatctagggctgagcatgtctgatgtcgggattttaggcacgctgttttacatcacttacggctgctctaaatttgtctctgggatgatcagcgatcgctcaaatccgcgttattttatggggatcgggttggtcatgacggggattattaatatcctgtttggcatgagctcatcacttttggtccttggcgccttgtggatcctcaatgcgttcttccaaggttggggctggccaccatgttctaaaatattgaccagttggtactcgcgttctgaacgtggtggctggtgggctatctggaacacctcacataactttggcggggcgctgatccccttgctcgtcggggtgattactctgcactttagctggcgctacgggatgatcatccccggaattataggtgtggtgattggtttgctgatgtgttggcgtctgcgagataagccaagcaccatgggcctaccaagtgtgggtaaatggcgcaatgatgcgatggagctgatccaggaatccgaaggccaggggctgtctaataaagaaattgtgaagcgttatgtcttaaccaataaatatatttggttgttagccgtttcctatgtgctggtttatatcgttcgaaccgcgattaacgactggggtaacctctatctgacccaagagaaaggttattcgttgctgaccgctaactctgcaatttcattatttgaagtgggtggatttattggttcattggtcgcgggttggggttctgataagtggttccgtggcaatcgtgggccgatgaacctgatttttgctattggtatcttcctctcagttgcatcactgtggacgttgccaagcatcagttttgtcttacaggcaggctgcttctttgcgattggtttctttattttcgggccacaaatgctgattggtatggctgctgctgagtgctctcataaggatgccgctggcgctgcaaccggctttgttgggctatttgcctatttaggggcggctttatcgggttaccctatcgctcgcgtcatggaaatctggcattggaatggtttctttgtggttatctctgtggcggcatgtttatctgctttcttcttattgccattcctgcgggcgcaatcgccgcagttaaagcaagcgacaacctga

SEQ ID NO: 55745 - protein, 443 aa, Yersinia pestis CO92
MWFFLKSRDNVPLVTDQTQIDSSYKYWRIQLMWTMYIGYAAFYFTRKSFNFIMPAMLTDLGLSMSDVGILGTLFYITYGCSKFVSGMISDRSNPRYFMGIGLVMTGIINILFGMSSSLLVLGALWILNAFFQGWGWPPCSKILTSWYSRSERGGWWAIWNTSHNFGGALIPLLVGVITLHFSWRYGMIIPGIIGVVIGLLMCWRLRDKPSTMGLPSVGKWRNDAMELIQESEGQGLSNKEIVKRYVLTNKYIWLLAVSYVLVYIVRTAINDWGNLYLTQEKGYSLLTANSAISLFEVGGFIGSLVAGWGSDKWFRGNRGPMNLIFAIGIFLSVASLWTLPSISFVLQAGCFFAIGFFIFGPQMLIGMAAAECSHKDAAGAATGFVGLFAYLGAALSGYPIARVMEIWHWNGFFVVISVAACLSAFFLLPFLRAQSPQLKQATT

SEQ ID NO: 55746 - DNA, 1323 bp, Escherichia coli K12
  CDS (1)..(1323): transl_table=11
atgatgttgccgtttctgaaagcgcctgccgatgcgccattaatgactgataaatatgaaattgatgcccgctatcgctactggcgtcggcatattctgctgaccatctggctgggttacgcgctgttttacttcacgcggaaaagttttaacgccgccgtaccagaaatccttgctaacggcgtgctcagccgtagcgatatcggcctgttagcgaccctgttttacattacctatggcgtgtcgaagtttgtctccggcattgtcagcgatcgctcaaatgcccgttattttatggggatagggcttatcgccacgggcattatcaacattctgtttggcttctcgacgtcgctatgggcgtttgccgtgctctgggtgctgaacgcctttttccagggctggggttcaccggtgtgtgcgcgtctgttaacggcctggtattcacgtaccgagcgcggcggttggtgggcattatggaacacggcgcataacgtcggcggcgcactcattcccattgtgatggcagcggctgcgctgcattacggctggcgtgccgggatgatgattgctggttgtatggcgatagtcgtggggatttttctctgctggcggctacgcgatcgcccgcaggcgttaggtttaccggcggtcggtgaatggcgacacgacgcgctggaaattgctcaacaacaagaaggggcagggttgacgcgtaaagagatcctcaccaaatatgtgttgctgaatccgtatatctggctgctttcgttttgctatgtgctggtctatgtggtccgggcggcgatcaacgactggggcaatttgtatatgtccgagacactgggcgtcgatctggtcacggcgaatacggcagtgacgatgtttgaactgggcggatttatcggtgcgctggtagccggttggggctcggacaaattgtttaacggcaaccgagggccgatgaatttgattttcgccgccggaattttgctttcagtcggctccctgtggctgatgccatttgccagctacgtgatgcaggcaacctgcttcttcaccattggtttttttgtctttggcccacagatgttaatcggtatggcggcggcagagtgttcccacaaagaggcggcaggggcggcgacggggtttgtcggcttgtttgcttatctgggggcgtcgcttgctggttggccgctggcgaaagtactcgatacctggcactggagcggattttttgtggttatctctatcgccgccgggatttccgcactgctgttactgccctttttgaacgcccagacaccgcgcgaagcgtga

SEQ ID NO: 55747 - protein, 440 aa, Escherichia coli K12
MMLPFLKAPADAPLMTDKYEIDARYRYWRRHILLTIWLGYALFYFTRKSFNAAVPEILANGVLSRSDIGLLATLFYITYGVSKFVSGIVSDRSNARYFMGIGLIATGIINILFGFSTSLWAFAVLWVLNAFFQGWGSPVCARLLTAWYSRTERGGWWALWNTAHNVGGALIPIVMAAAALHYGWRAGMMIAGCMAIVVGIFLCWRLRDRPQALGLPAVGEWRHDALEIAQQQEGAGLTRKEILTKYVLLNPYIWLLSFCYVLVYVVRAAINDWGNLYMSETLGVDLVTANTAVTMFELGGFIGALVAGWGSDKLFNGNRGPMNLIFAAGILLSVGSLWLMPFASYVMQATCFFTIGFFVFGPQMLIGMAAAECSHKEAAGAATGFVGLFAYLGASLAGWPLAKVLDTWHWSGFFVVISIAAGISALLLLPFLNAQTPREA

SEQ ID NO: 55748 - DNA, 1323 bp, Salmonella typhimurium LT2
  CDS (1)..(1323): transl_table=11
atgagtataaaaacatttattttcagccagcccgataagccgattgtaaaagagaaaaaagagatagaccagacctataaaaaatttcgttttgagattatcgcctcggtctttatctcttatgccgtcttttatcttacccgtaaaaacttctccgccgcgatgccggccatgctgacggaaacgtcgctgaccgcagaagacttcgccattatgtcttctattttttacattctttatggcgcgatgaagtttgtcggcgggatgctggtcgataaaattaacccgaaagccatgaccggcccggtgctgattggcgtggggattgtaaatattctgttcggcttttccgacagcgtggcggcattctacgtgctgtacagtctcaacgcgatattacagggcaccagctttccgccgatggcgaaaattatggcctcgtggttttcgaaaaacgaacggggacgctggtgggctatcgttgaagcggcgcacaatatcggcggcagcctcgcgccgctgctgaccagttttgctatcgcctttagcggtagctggaaaatgggattttatgttcccggcgccatttcgctgctgatggggatagtggcgctatttaccattaaagatcgtcccggtacgttaggtttgcccaacgtggggcagtggcgtaacgacccgacggaactggcccaggtcaaggccagcccggtcaacctgagcttctggcagatttttgtgaaatatatcctgaccaatccactggtatggatcattattatcggtgatatgtcggtttatattgcgcgcactatccttaacgactggccgcagatttactattcgcaggttcacggctggagcctgataaaagcgaactcgattatttcctggtttgaggcgggcggactggcaggtgggttgctggcaggctacttgtctgactttatgttcaaaagtaaccgctggatgaccggattaatcttcgcgttagcgctgtgcatatgcatcgtgctggtgccgctggttcaggatacctcttacaccctcaccgcgattctgttcaccatcatgggcttcgccttatacggaccgcatatgctttttgccgtcggctgtctggatgtgacccataaggatgcggcgggatcgattaccggctttcggggattgttcagctatgtcggcgcggcaatggccggtgtgccggtaattatggtgaaaaatagctgggcgtggtcgggcgtttatatctatgcggtgatcgccattctgctaacgactctgtcgctggcgctgctctccaggctgcatcggttataa

SEQ ID NO: 55749 - protein, 440 aa, Salmonella typhimurium LT2
MSIKTFIFSQPDKPIVKEKKEIDQTYKKFRFEIIASVFISYAVFYLTRKNFSAAMPAMLTETSLTAEDFAIMSSIFYILYGAMKFVGGMLVDKINPKAMTGPVLIGVGIVNILFGFSDSVAAFYVLYSLNAILQGTSFPPMAKIMASWFSKNERGRWWAIVEAAHNIGGSLAPLLTSFAIAFSGSWKMGFYVPGAISLLMGIVALFTIKDRPGTLGLPNVGQWRNDPTELAQVKASPVNLSFWQIFVKYILTNPLVWIIIIGDMSVYIARTILNDWPQIYYSQVHGWSLIKANSIISWFEAGGLAGGLLAGYLSDFMFKSNRWMTGLIFALALCICIVLVPLVQDTSYTLTAILFTIMGFALYGPHMLFAVGCLDVTHKDAAGSITGFRGLFSYVGAAMAGVPVIMVKNSWAWSGVYIYAVIAILLTTLSLALLSRLHRL

SEQ ID NO: 55750 - DNA, 1386 bp, Listeria monocytogenes EGD-e
  CDS (1)..(1386): transl_table=11
atgtcattattcagtttgaaaaaaaagaaccattttgttccactagaaattcaaagacaacaatggttcaaacactttatcgttgcatttatgtctgtatttatttgttatctaacggtctatcttctaaggaataactttaaagcagctcagacattgttaattgagcagaaccatttcagcaccacagaactaggaatgattggtttagctttttcggttatgtacggaattggaaaaacgattttaggatatgtcgtggatggaagaaatgctaaaaaaataatgagttttttattagggatttccgccattatatcaattattattggaatacttttagttgcaaagcaagcaacagtgggtatattgtttatcctttggggagcaaatggatttgtgcaatcaccaggtggaccggcttcctattcaactatcacacggtggacgccaaaattgaaaagaggaagatggttaggtttttggaatgcctcgcataatataggtggtgctttagcgggaattgttgctttttggggtgcgactactttctttaatggcggcgcagggggaatgtttatcgttccaggtatcattgcaatcatcattgcaattatttgcttctcggtggggcatgatgaaccagaagaattaggctggaactctgccgctgaaatttttgaagagcgggaagaacaaggagaatcggagacaaaagacctttctagatttcaaattttgtgtcgatttgttattaataatccttgggtatggactttatgtgtcataaatatattcatctatattgttagaattggtattgataattgggcgcccgtttattgtattcaagcgctaggatggagcacaaaagatgctattatgactatttctttttttgaaattggagcattgctaggttcattatcgtggggctggctctcagatattatgaaaggtcgccgtatgctttgctcgattattgcagttgttattgaatttttcatgttaattagctattcgcaagttacaagtgtttatagcatgtatacggtattatttattttaggattcttagtatttggcccccaacttttaattggagtgtcggtgatagagtttgttcctagaaatgctttagctgtaacaaatggcttaactggaacgtttgcgtacttattcggagattcttttgctaaagtctttctaggatatattgcagacccaacaaaagcgggtatgcaaatatttggctataatttacatggctggggcgcaacttttactattatgtttacagctttaattattgcaggcttaatgatgattccagttgcattaaaacaagagaaaattatacgacaagcaaaagttttacatctataa

SEQ ID NO: 55751 - protein, 461 aa, Listeria monocytogenes EGD-e
MSLFSLKKKNHFVPLEIQRQQWFKHFIVAFMSVFICYLTVYLLRNNFKAAQTLLIEQNHFSTTELGMIGLAFSVMYGIGKTILGYVVDGRNAKKIMSFLLGISAIISIIIGILLVAKQATVGILFILWGANGFVQSPGGPASYSTITRWTPKLKRGRWLGFWNASHNIGGALAGIVAFWGATTFFNGGAGGMFIVPGIIAIIIAIICFSVGHDEPEELGWNSAAEIFEEREEQGESETKDLSRFQILCRFVINNPWVWTLCVINIFIYIVRIGIDNWAPVYCIQALGWSTKDAIMTISFFEIGALLGSLSWGWLSDIMKGRRMLCSIIAVVIEFFMLISYSQVTSVYSMYTVLFILGFLVFGPQLLIGVSVIEFVPRNALAVTNGLTGTFAYLFGDSFAKVFLGYIADPTKAGMQIFGYNLHGWGATFTIMFTALIIAGLMMIPVALKQEKIIRQAKVLHL

SEQ ID NO: 55752 - DNA, 1317 bp, Caenorhabditis elegans
  CDS (1)..(1317)
atgcctcgaatacggccgcgcagtggaaatgaagacttcctaacaagaatcactggggaaacatggaccagaaaccaatatatagtttttattcatacatttttcagctttgccatgatccatgcaacaagaaaaacgcttgccacagtaaaaccttcaattattcacacttggaccagtaactcgacaggaactccatttatggaatccgaagaacatgctaccagattcctaggagttttggatacaagtttcatgataacttatgcaattggtttattcgtaagcggaactcttggagatcattacaatcccagaaaaatgttgagttttggaatggcaatgtctgcgatttcagttttctgttttggttttctaacagaaaaatatcatttttattctgcacccctgtacattttcctatggatttgcaatggattctcacaatctgttggatggccaattgaagttgcaattatgggaaattggtttggaaaagacgcacgaggtactgtaatgggaatatggtccgcgtgtggaagtactggaaatatcattggaacattgatagctagtcatgcattgtccctaggatacgagtacccattccttataatctgttcgttgcttcttggatacagtatgattgtttactggcagttaccttcagctccttgggatatagatcacagcttcccacatgattcggaaaataaagaaaaacaagagcttcttccaaacagacctccggctttaggatttttcaaaacttggctaattccaggagtgatctccttttctctggcatttgcctgcctcaaatttgtaaacgacgggtttttcttctggctgccctactatctacatgacggtctcaactggccagagacatttgcagatgctttatcgacatggtatgatgtaggaggaatccttgcatcagtggtagcaggagctgcatctgacagaatgaaatcaagaacctcattaattttctacatgctcatcgcgtcgtttgtgtcgttgtatatttattcacaatccccagcttcttactcttggaatgctttcctacttcttgtaactggattttgtgttggcgggccacttaacatgatatccagttcagtagtggcagatcttggtaaaagtgacaagttgaaaggaaatgcagaagcacttgcgacagttactggaataattgatggaacaggaagttgtggatctgcgattggacaatttatgattccaaaccttcaacattggtatggatggaactcggtgttttatggatttatggctatggtaggcaattga

SEQ ID NO: 55753 - protein, 438 aa, Caenorhabditis elegans
MPRIRPRSGNEDFLTRITGETWTRNQYIVFIHTFFSFAMIHATRKTLATVKPSIIHTWTSNSTGTPFMESEEHATRFLGVLDTSFMITYAIGLFVSGTLGDHYNPRKMLSFGMAMSAISVFCFGFLTEKYHFYSAPLYIFLWICNGFSQSVGWPIEVAIMGNWFGKDARGTVMGIWSACGSTGNIIGTLIASHALSLGYEYPFLIICSLLLGYSMIVYWQLPSAPWDIDHSFPHDSENKEKQELLPNRPPALGFFKTWLIPGVISFSLAFACLKFVNDGFFFWLPYYLHDGLNWPETFADALSTWYDVGGILASVVAGAASDRMKSRTSLIFYMLIASFVSLYIYSQSPASYSWNAFLLLVTGFCVGGPLNMISSSVVADLGKSDKLKGNAEALATVTGIIDGTGSCGSAIGQFMIPNLQHWYGWNSVFYGFMAMVGN

SEQ ID NO: 55754 - DNA, 1509 bp, Caenorhabditis elegans
  CDS (1)..(1509)
atgctagttacgggtggtcatatgccgagaatcagactcaggaacgatgtaagctccagcagtttttggacgagaataactggtcaaaaatggagcaagcatcatgtttttatatttgtacatacttttatgagttatgcaatgcttcatgccactcggaaaacattgtctactgttaaaccatcacttattcacacatggatctcaaatacttcaacacccgatggtccagtatttccatctcaacaagctgcagctgaattcttaggtgttctggatacaggattcttggttgcatatgcaattggtctgtacatatgtggaatacttggagacaactacaatcctcgtcgccttctaacagctggaatgatgctttcttcaattattgtattctgttttggatatctaactgaaacttttcatttctactctccgatggtctactcgtttttatggattttgaatgggtttattcaatccgtcgggtggcctgttgaagtctctattatgggcaattggtttggacataatgctcgtggagcagttatgggagcttggtcatcgtgtgcaagcgttggaaacataattggaacattgatagctagttacactctttttctgggatatcagtactcattcctgattgcatgctcccttttattcatctacagttttcttgtattctttcaacttccatcagctccatgggaagtgagtagtgatattctaccagaacaaatggaagaggaagagactgatgatgagcctacagaaagaccaccaccaattggattcttgaaagcttggttacttccaggtgttattgcatattcactggcttatgcgtgtctgaagcttgttaattacggtttcttcttctggttgccatactaccttcatgctggcttgcactggcccgaatcctacgccgactcactttccacgtggtatgatgttggaggaatcgtggctgctgtgctcgccggagccttttcggatcacatgagatctcgaaccccagttgtgtttattatgctgttaatggcaactgtttcactttatatttatgcacattcccccgaatcctacaactggaatgcattcctcttactcgtcgccggatttttcatcggaggaccggccaacatgatctcaagctcaattacggcagatctcggaaaatgtgatcaacttcgtggaaacgcggaagctctttccacagtgacgggaattattgatggaactggaagtattggagctgcaattggacaatggtttattccatcggttcagcattggtttgggtgggatgcggtgttttatggatttattgtcatgatactctgcaccgccctttgcttggtcccagttctttggaaagagcacaaagagcgcagaattcatcgttccgaagaggtagattcactgttacagagtgattccgatgaaaatttagcagatgatattcaggaaattagacgaaggcctactaatgcaattgtataa

SEQ ID NO: 55755 - protein, 502 aa, Caenorhabditis elegans
MLVTGGHMPRIRLRNDVSSSSFWTRITGQKWSKHHVFIFVHTFMSYAMLHATRKTLSTVKPSLIHTWISNTSTPDGPVFPSQQAAAEFLGVLDTGFLVAYAIGLYICGILGDNYNPRRLLTAGMMLSSIIVFCFGYLTETFHFYSPMVYSFLWILNGFIQSVGWPVEVSIMGNWFGHNARGAVMGAWSSCASVGNIIGTLIASYTLFLGYQYSFLIACSLLFIYSFLVFFQLPSAPWEVSSDILPEQMEEEETDDEPTERPPPIGFLKAWLLPGVIAYSLAYACLKLVNYGFFFWLPYYLHAGLHWPESYADSLSTWYDVGGIVAAVLAGAFSDHMRSRTPVVFIMLLMATVSLYIYAHSPESYNWNAFLLLVAGFFIGGPANMISSSITADLGKCDQLRGNAEALSTVTGIIDGTGSIGAAIGQWFIPSVQHWFGWDAVFYGFIVMILCTALCLVPVLWKEHKERRIHRSEEVDSLLQSDSDENLADDIQEIRRRPTNAIV

SEQ ID NO: 55756 - DNA, 1371 bp, Caenorhabditis elegans
  CDS (1)..(1371)
atggtacagacgatgtcgtcacggaaggtgatggtgttcgtggtgacgtttgtcagttacggcctgtaccacgcgagtcgcaaagcattatccggagtgaaatcgtcgataaaagcggattggctgagcaactcgtccggccacgcgccactattcaccaatgaagccgacgccaagcactttttgggatcactcgacgcgattttcatggcggcctacgcggcggctctcttcttttggggttggctcggcgatcggctgaatccgaagcttgtcgtcgcagctggaatggttggctctgcggttacgctcactctcttcggcgccatcccaaaatggttcaatttctaccatgcgccctactatatcatgacctacgtggcgtttgggcttgttcaggcctgcggatggcccagtgaaatcgcgattatggccaactggttcggaaaaggaaatcgcggatttgtgatgggtgtctgggccgcgtgtcagcccgtcggcaacattttcggatcgattttcacggcgatggtgcttccactaggttatcagtacacttttgtgttcaattcggtgctcattgctctcggagcaattgtagtcgtcatggctattgattcatcgcctaatgaagagcatgaggatggcgtagaggcaaatagctccgagccccatcacaacttccacggtgagccaatatccctcttcaaggccgttcttctgccaggcgtgctcgcctactgcatctgcaatgcctgcctgaaactcgtcaactacgccttctttttctggcttccactctacttgaccgatgcctatcactgggaagagtcgcaggcggatcagttgagcatttggtacgattttggaggcattattggaagtgtgctcggcggatacattactgacaagatgggaaaacgatctccgctcatcgtcgcgatgctcgtgtgctccattggctcgctgtacttttacgctcacgtcgggccgcacatgttctggaatgcggtcgtcatgaccaccgtcggagttacagtctctgggccgtacaacttgatcgttgggtccatctcaatcgatctaggatcacaacctgctctagctgggaacacacaggcgatgtccacggtgtcgggattgttggatggcactggatcggcaggatccgctgttggacagcttctcattccgatcatccaggacgacctgggatggaaggctgtgttctatgtgttcatgctattgaacggattcgccatcctagccatcctcaagcgctgcatcatcgatctgaaatcgcttcgaaagctccgcagtggagaagaatctccgcttctcaatgacgaagccggtgatcacgaggactga

SEQ ID NO: 55757 - protein, 456 aa, Caenorhabditis elegans
MVQTMSSRKVMVFVVTFVSYGLYHASRKALSGVKSSIKADWLSNSSGHAPLFTNEADAKHFLGSLDAIFMAAYAAALFFWGWLGDRLNPKLVVAAGMVGSAVTLTLFGAIPKWFNFYHAPYYIMTYVAFGLVQACGWPSEIAIMANWFGKGNRGFVMGVWAACQPVGNIFGSIFTAMVLPLGYQYTFVFNSVLIALGAIVVVMAIDSSPNEEHEDGVEANSSEPHHNFHGEPISLFKAVLLPGVLAYCICNACLKLVNYAFFFWLPLYLTDAYHWEESQADQLSIWYDFGGIIGSVLGGYITDKMGKRSPLIVAMLVCSIGSLYFYAHVGPHMFWNAVVMTTVGVTVSGPYNLIVGSISIDLGSQPALAGNTQAMSTVSGLLDGTGSAGSAVGQLLIPIIQDDLGWKAVFYVFMLLNGFAILAILKRCIIDLKSLRKLRSGEESPLLNDEAGDHED

SEQ ID NO: 55758 - DNA, 1164 bp, Caenorhabditis elegans
  CDS (1)..(1164)
atggcggcctacgcggcggctctcttcttttggggttggctcggcgatcggctgaatccgaagcttgtcgtcgcagctggaatggttggctctgcggttacgctcactctcttcggcgccatcccaaaatggttcaatttctaccatgcgccctactatatcatgacctacgtggcgtttgggcttgttcaggcctgcggatggcccagtgaaatcgcgattatggccaactggttcggaaaaggaaatcgcggatttgtgatgggtgtctgggccgcgtgtcagcccgtcggcaacattttcggatcgattttcacggcgatggtgcttccactaggttatcagtacacttttgtgttcaattcggtgctcattgctctcggagcaattgtagtcgtcatggctattgattcatcgcctaatgaagagcatgaggatggcgtagaggcaaatagctccgagccccatcacaacttccacggtgagccaatatccctcttcaaggccgttcttctgccaggcgtgctcgcctactgcatctgcaatgcctgcctgaaactcgtcaactacgccttctttttctggcttccactctacttgaccgatgcctatcactgggaagagtcgcaggcggatcagttgagcatttggtacgattttggaggcattattggaagtgtgctcggcggatacattactgacaagatgggaaaacgatctccgctcatcgtcgcgatgctcgtgtgctccattggctcgctgtacttttacgctcacgtcgggccgcacatgttctggaatgcggtcgtcatgaccaccgtcggagttacagtctctgggccgtacaacttgatcgttgggtccatctcaatcgatctaggatcacaacctgctctagctgggaacacacaggcgatgtccacggtgtcgggattgttggatggcactggatcggcaggatccgctgttggacagcttctcattccgatcatccaggacgacctgggatggaaggctgtgttctatgtgttcatgctattgaacggattcgccatcctagccatcctcaagcgctgcatcatcgatctgaaatcgcttcgaaagctccgcagtggagaagaatctccgcttctcaatgacgaagccggtgatcacgaggactga

SEQ ID NO: 55759 - protein, 387 aa, Caenorhabditis elegans
MAAYAAALFFWGWLGDRLNPKLVVAAGMVGSAVTLTLFGAIPKWFNFYHAPYYIMTYVAFGLVQACGWPSEIAIMANWFGKGNRGFVMGVWAACQPVGNIFGSIFTAMVLPLGYQYTFVFNSVLIALGAIVVVMAIDSSPNEEHEDGVEANSSEPHHNFHGEPISLFKAVLLPGVLAYCICNACLKLVNYAFFFWLPLYLTDAYHWEESQADQLSIWYDFGGIIGSVLGGYITDKMGKRSPLIVAMLVCSIGSLYFYAHVGPHMFWNAVVMTTVGVTVSGPYNLIVGSISIDLGSQPALAGNTQAMSTVSGLLDGTGSAGSAVGQLLIPIIQDDLGWKAVFYVFMLLNGFAILAILKRCIIDLKSLRKLRSGEESPLLNDEAGDHED

SEQ ID NO: 55760 - DNA, 1338 bp, Clostridium perfringens str. 13
  CDS (1)..(1338): transl_table=11
atgtttggattttttagcccagctccagcaatacctagacttccaaaagataaggtatcatcagcatacaaagcatatcgtattcgtatgttccttatgatatttattggatatacaggttactacttagttagaaaaaactttgctgtagcatcaccatatttaattgataactatggattttcaaaaacacaaatcggacttataagtatgggacttgctgtatcttacggtttaagtaagttcattttaggaaatttatcagacaaatcaaatgtaaagaaatttatatgttttggacttattgcatcatcagtattaagtgttctaatgggatttgctcgtacagttccaatattcttaatacttatggtatttaacggattcttccaaggtatgggagctccaccatgttcaatagtattaggtaaatggttctctcaaaaagaaagaggacttaaaatgggaatatggaatacttctcataatataggtggaggtttaatcgcccctatagcaactttatgtttattagtatttggacaaaatcatttccaatcaatattctttgtaccagcaataatatgtacaatagtagctttattctgttatgtaattggagctgacactccagcatctgttggattacctccagttgaagaatatagaaatgattatcctgaagttaaggctgaggttaatccaacaactttatcttcaaaagaaataatggttaaatatgttcttaaaaataaatatgtttggtacttagcactagctaatatctttgtttatttaataagacaaggtgttgttaactggattcctatatacttaaaagaatcaaaaggattctctgctgctaatgcaaactgggcaatgttcttatttgaatatgctgcaataccagcatcaatattacttggatggctttcagacgttgtattcaaaggaaagcgtgctccacttagtatcttatgtatgatcggtgttatatttgctacagtagcttactggcaaacaagcagtacattagtaacaatgatttctgttgcatttataggatgcttcatatacggacctcaattattaataggaatgaacttaatagacgttgtacctaacttcgctgttggttctgctacaggtttctcaggactttgcggataccttcttggtgaattcatggctgacttcgttttaggtatgatagctgatagctttggatggaacggtgcattcatatttatcatagtaggtgcattcattgcattacttcttttagctttaactttaaagataaagaaaaatccacaagttgaagataagatagcttaa

SEQ ID NO: 55761 - protein, 445 aa, Clostridium perfringens str. 13
MFGFFSPAPAIPRLPKDKVSSAYKAYRIRMFLMIFIGYTGYYLVRKNFAVASPYLIDNYGFSKTQIGLISMGLAVSYGLSKFILGNLSDKSNVKKFICFGLIASSVLSVLMGFARTVPIFLILMVFNGFFQGMGAPPCSIVLGKWFSQKERGLKMGIWNTSHNIGGGLIAPIATLCLLVFGQNHFQSIFFVPAIICTIVALFCYVIGADTPASVGLPPVEEYRNDYPEVKAEVNPTTLSSKEIMVKYVLKNKYVWYLALANIFVYLIRQGVVNWIPIYLKESKGFSAANANWAMFLFEYAAIPASILLGWLSDVVFKGKRAPLSILCMIGVIFATVAYWQTSSTLVTMISVAFIGCFIYGPQLLIGMNLIDVVPNFAVGSATGFSGLCGYLLGEFMADFVLGMIADSFGWNGAFIFIIVGAFIALLLLALTLKIKKNPQVEDKIA

SEQ ID NO: 55762 - DNA, 1338 bp, Streptococcus pyogenes MGAS8232
  CDS (1)..(1338): transl_table=11
atggaagaggattataacaaaagagaacctgagaagtttacgcaatttctgcgccgtcaaaaggtcgtcttttttgtcgtattttttggttatgtgtgtgcctacttggtacgcaacaatttcaaactaatgtcaaacactattatggtgcaaaatggttgggacaaggctcaaattgcgaccttgctatcgtgtttgaccgtttcttatggcttagcaaaattctatatgggggccttaggggatcgtgttagcttgagaaagctcttttcgatcagcttgggtgcaagcgctttgatttgtattttaatcggttttttcaatagttcaatggtggtattaggaatactgctagtcttgtgtggtgtcgtacaaggtgccttggcacctgcctcacaagccatgattgccaattattttccaaataaaacacgcggcggagccatcgctggatggaacatttctcaaaacatgggatcagccctcttgccattaaccatcgccttgctcaccagtatgggcttggtggtaccagctaatggcaatattttacttgcctttttaattcctggtgttttagtgttcttgtttgctttgtgttgctggaagcttggcggtgataaccctgagtctgagggacttgactctcttcgaacgatgtatggtgatgcgggcgagtcagctgttgccagtgaagaagaaaagcataacctgtcttattggcaactcatctggaaatacgttttttgtaacccgtcgctcttacttgttgctgctgtcaatgtggccctttatttcgttcgttttgggattgaagactggatgccgatctacttgtcacaagtagccaatatgtcagaggctcatatccattttgcgatttcaatgttagagtgggtcgctattccaggctcgctggtatttgcgtggttagcggttcgttatcctaataaaatggccaagattggggctattgggctttttgtgttagcggctattgtctttgtctatgaacgcttgactgccacaggtgctccaaactatttcttgttgcttgttattgcaggtattttagggtcattgatttatggcccacagttgatcgtgaatattttaacaatcaactttgttcctttaaatgttgcaggaacagcgattggttttgtaggagtaacagcttatctcatcggcaatatgggagcaaactggctgatgccgattttggcagatggttttggctggttttggtcatatattgtcgttgcagccttatctgctttttcagcggttggttatttaattttagccaaacgtgaggaagaaatcatcaaagattag

SEQ ID NO: 55763 - protein, 445 aa, Streptococcus pyogenes MGAS8232
MEEDYNKREPEKFTQFLRRQKVVFFVVFFGYVCAYLVRNNFKLMSNTIMVQNGWDKAQIATLLSCLTVSYGLAKFYMGALGDRVSLRKLFSISLGASALICILIGFFNSSMVVLGILLVLCGVVQGALAPASQAMIANYFPNKTRGGAIAGWNISQNMGSALLPLTIALLTSMGLVVPANGNILLAFLIPGVLVFLFALCCWKLGGDNPESEGLDSLRTMYGDAGESAVASEEEKHNLSYWQLIWKYVFCNPSLLLVAAVNVALYFVRFGIEDWMPIYLSQVANMSEAHIHFAISMLEWVAIPGSLVFAWLAVRYPNKMAKIGAIGLFVLAAIVFVYERLTATGAPNYFLLLVIAGILGSLIYGPQLIVNILTINFVPLNVAGTAIGFVGVTAYLIGNMGANWLMPILADGFGWFWSYIVVAALSAFSAVGYLILAKREEEIIKD

SEQ ID NO: 55764 - DNA, 1374 bp, Streptococcus agalactiae 2603V/R
  CDS (1)..(1374): transl_table=11
atgttgaaaaaactatttgcaccccctcagaaaagagaacgtttatcagctgaggaaattaagcataaatatcctcgttatcgtgtacaagtccttatttctatttttgtaggttatatgggatactattttgttcgtaatacgacttcaattttatctggtatccttaatatgtctgctactgagattggtattattacctgtgctagctacattgcttatggtctctctaaatttatttctggtttgatttcagatgaatcgaattctaaaattttccttccagttggtttgtttcttacaggactagttaatgtgttaatcggtgttattccatctgtaattactagtatctggctctttactatcatgtatcttattaatggttggttacaagggatgggataccctcctggagcgcgtacattagtctattggtatgataataaagaaagaattaaatatgctaccatttggaatttatctcacaattttggtggagcaatagcgccgattttaactggtgtaggtctagctcttgctggtaatgattctcttaatcaagcgcgtgctgcttattggtttccaggggtggtggcttgtcttttggctgttcttgtttactttttacaagaagatactccagaatctatcggacttccgcctatagaagagtatcataaagagcaatatactaatgttgtggattcaagtgacattttagaagagcctgaagttttgggtatgggcgaaattataaaaaaatatattctaccaaatactaaactgatgtgggcatccttgtattcaatatttgtatatattttacgttacggtattgtctcatggactcctaagtttttagcgacgagtgtgcaagatggtggaaaaggtattactgcaacagctggtatgggtggtttttcactttttgaaataggtggtattattgggatgctaacagcaggatatctatctgccaaagtgtttaaaaactctaaacctttaaccaatgtagccttcttagttgtagcaatcttattactagctgcctattggtttattccagcaggacctcaatatatggcattagacttcattattttactaggtttgggggcatcaatctacggtcctgttatgatggttggcctgtatgctatggagttagttccaaaagcagcagctggagcagcttcaggattgactggcacatttagttatgtcggaggagcaacgatcgctactctagctattggtattattattgaccactttggttggggagtagcatttataatatttggtatttctggatttgcggctattgtctgtaccttgctttcaagagataagagtctagagtattggtga

SEQ ID NO: 55765 - protein, 457 aa, Streptococcus agalactiae 2603V/R
MLKKLFAPPQKRERLSAEEIKHKYPRYRVQVLISIFVGYMGYYFVRNTTSILSGILNMSATEIGIITCASYIAYGLSKFISGLISDESNSKIFLPVGLFLTGLVNVLIGVIPSVITSIWLFTIMYLINGWLQGMGYPPGARTLVYWYDNKERIKYATIWNLSHNFGGAIAPILTGVGLALAGNDSLNQARAAYWFPGVVACLLAVLVYFLQEDTPESIGLPPIEEYHKEQYTNVVDSSDILEEPEVLGMGEIIKKYILPNTKLMWASLYSIFVYILRYGIVSWTPKFLATSVQDGGKGITATAGMGGFSLFEIGGIIGMLTAGYLSAKVFKNSKPLTNVAFLVVAILLLAAYWFIPAGPQYMALDFIILLGLGASIYGPVMMVGLYAMELVPKAAAGAASGLTGTFSYVGGATIATLAIGIIIDHFGWGVAFIIFGISGFAAIVCTLLSRDKSLEYW

SEQ ID NO: 55766 - DNA, 1320 bp, Shigella flexneri 2a str. 301
  CDS (1)..(1320): transl_table=11
atgttgccgtttctgaaagcgcctgccgatgcgccattaatgactgataaacatgaaattgatgcccgttatcgctactggcgtcggcatattctgctgaccatctggctgggttacgcgctgttttacttcacgcggaaaagttttaacgccgcggtaccagaaatccttgctaacggcgtgctcagccgtagcgatatcggcctgttagcgaccctgttttacattacttacggcgtgtcgaagtttgtctccggcattgtcagcgatcgctcaaatgcccgttattttatggggatagggcttatcgccacgggcatcatgaacattctgtttggcttctcgacgtcgctatgggcgtttgccgtgctctgggtgctgaacgcctttttccagggctggggttcaccggtgtgtgcgcgtctgttaacggcctggtattcacgtaccgagcgcggcggttggtgggcattatggaacacggcgcataacgtcggcggcgcactcattcccattgtgatggcagcgagcgcgctgcattacggctggcgtgccgggatgatgattgctggttgtatggcgatagtcgtggggatttttctctgctggcggctacgcgatcgcccgcaggcgttaggtttaccggcggtcggtgaatggcggcacgacgcgctggaaattgctcaacaacaagaaggggcagggttgacgcgtaaagagatcctcaccaaatatgtgttgctgaatccgtatatctggctgctttcgttttgctatgtgctggtctatgtggtccgggcggcgatcaacgactggggcaatttgtatatgtccgagacgctgggcgtcgatctggtcacggcgaatacggcagtgacgatgtttgaactgggcggatttatcggtgcgctggtagccggttggggctcggacaaattgtttaacggcaaccgtgggccgatgaatttgattttcgccgccggaattttgctttcagtcggctcgctgtggctgatgccatttgccagctacgtgatgcaggcaacctgcttcttcaccattggtttttttgtctttggcccgcagatgttaattggtatggcggcggcagagtgttcccacaaagaggcggcaggggcggcgacggggtttgtcggcttgtttgcttatctgggggcgtcgcttgctggttggccgctggcgaaagtgctcgatacctggcactggagcggattttttgtggttatctctatcgccgccgggatttccgcactgctgttactgccctttttgaacgcccagacaccgcgtgaagcgtga

SEQ ID NO: 55767 - protein, 439 aa, Shigella flexneri 2a str. 301
MLPFLKAPADAPLMTDKHEIDARYRYWRRHILLTIWLGYALFYFTRKSFNAAVPEILANGVLSRSDIGLLATLFYITYGVSKFVSGIVSDRSNARYFMGIGLIATGIMNILFGFSTSLWAFAVLWVLNAFFQGWGSPVCARLLTAWYSRTERGGWWALWNTAHNVGGALIPIVMAASALHYGWRAGMMIAGCMAIVVGIFLCWRLRDRPQALGLPAVGEWRHDALEIAQQQEGAGLTRKEILTKYVLLNPYIWLLSFCYVLVYVVRAAINDWGNLYMSETLGVDLVTANTAVTMFELGGFIGALVAGWGSDKLFNGNRGPMNLIFAAGILLSVGSLWLMPFASYVMQATCFFTIGFFVFGPQMLIGMAAAECSHKEAAGAATGFVGLFAYLGASLAGWPLAKVLDTWHWSGFFVVISIAAGISALLLLPFLNAQTPREA

SEQ ID NO: 55768 - DNA, 1332 bp, Leptospira interrogans serovar Lai str. 56601
  CDS (1)..(1332): transl_table=11
atgatttcaccgttacgttggctactccctgcaaaagcaaagccattattatcaaaagaattaatagatcgatcttatccgcgttttagatggaggattttagaagcaacctttatcggttatgcgacgttttatctcgtaaggaataattttccagttatttccaaagaaatgggagaagcccttcattatagtcaagaacaaatcacaaacattttagcagtgactgcgatcacatacgggataggaaaatttttaatgggaatcttatccgatcgtagtaatccaaaatacttcatgccattgggtttgattttaaccgcgatttgtaatttgtttttcggagcatcaaatcagtacgaagttcatttttatctttgggcattaaacggattgatgcaagggatgggatggcctccttgtggacgttctcttggtcattggttcggagtttccgaaagaggatctaaatttgcaatttggaacatagcgcataacgtgggaggaggtttggtaggaattatcgcagcttacagcgcatcttggtggggttggaggaatgcgttttatattcccgctttgattgcgattgtgaccgcgatttatcttttatttcgattggtggatacacctcagtcggttggtcttcctccaatcgaagaatatcaaaaagatccggaaaaggaggtaagactttctatacaagaacaagaaaaggaactttcttttcgagaaatcattttaggttctgtattaaaaaatcattatgtttggacttttgcatttgctaattttttcgtttatgtggttcgatatggtttgacggatataggtcctacttatttaaaactttctaaaggagcttctttagagaaaggtgggatcagcacgttgatctacgaatttgctggaattgcttctacccttcttgtaggatggggttccgataagctggggggtaaaagaggaatggtaagtcttttatgtatgcttcctattttgtttgctttaatttcattattatttactcctttaggatttctatggttggatcttgtattgttcggaatcatcggtttttttatctatccacctgttatgttgttaggtgttgctgggcttgattttacttctaaaaaagcggttggagctgcagccggttttataggtttattcggttatttgggaaggacgattctttcaaaatcggtaggatggttgagtaaacaaactggatttcattgggaacaacctatgtatttaatgatcggtgcgactttaatttcaatcgcgttactcgccattacttggaattggaaacctaaggcatag

SEQ ID NO: 55769 - protein, 443 aa, Leptospira interrogans serovar Lai str. 56601
MISPLRWLLPAKAKPLLSKELIDRSYPRFRWRILEATFIGYATFYLVRNNFPVISKEMGEALHYSQEQITNILAVTAITYGIGKFLMGILSDRSNPKYFMPLGLILTAICNLFFGASNQYEVHFYLWALNGLMQGMGWPPCGRSLGHWFGVSERGSKFAIWNIAHNVGGGLVGIIAAYSASWWGWRNAFYIPALIAIVTAIYLLFRLVDTPQSVGLPPIEEYQKDPEKEVRLSIQEQEKELSFREIILGSVLKNHYVWTFAFANFFVYVVRYGLTDIGPTYLKLSKGASLEKGGISTLIYEFAGIASTLLVGWGSDKLGGKRGMVSLLCMLPILFALISLLFTPLGFLWLDLVLFGIIGFFIYPPVMLLGVAGLDFTSKKAVGAAAGFIGLFGYLGRTILSKSVGWLSKQTGFHWEQPMYLMIGATLISIALLAITWNWKPKA

SEQ ID NO: 55770 - DNA, 1317 bp, Pseudomonas putida KT2440
  CDS (1)..(1317): transl_table=11
atgaatcaatccctagccgcgttcaaacgctggcgcattcagattttcgccatcacctggctggcttacgccgccttctacttcacccgcaaagccttctcggtggccaaactgggcatcgccgaagacccaggcttcatgctcgacaaggccgccatggccaacctggatgccatctacctggccgcctatgccgtgggccaattcacctggggcatgcttgccgaccgcttcggcccgcgcgtggtggtgctgggcgggttgctgatttctgcggcggcggcagtcgtgatgggcagttacgcaaccttcccgatcttcgccacctgcatgctggtacagggcctggcgcaatccaccggctgggccggcttgtgcaagaacatcggcagcttcttcccggcttcgcagcgcgggcgggtgctgggcctgtggagttcctgctatgccttcggcggcctggtggcctcgccgttcgcgggctggtgggcctacaccctggtgggcacctggcacgcggcgttcttctccagcgcggtcgtggtggcgctggtggcggtgctgttcttcttcctgcagcgcaacaaacccgaggacgtcggcttgccggcggttgagcccgagccgcaaagcatggccccggccgacaacctgtgcagcgtgtgggcacccctgagggagatcctgcgcaaccgcacggtgttgaccctgggccttgcgtacttcctgctgaagccggcgcgctacgccatcttgctgtggggccctgtgatcgtcttcgagcagatgccctcggtgggcaaagtgggcgcggcaatcatcccgactgctttcgaactggccgggctgcttggcccgatcatgatcggcctggcctcggacaaactgtttggcgcccggcgcatgccagcctgcgtgatcagcctggtgctgctgaccgtgacattggcggcgttcatggcggccatgaacaccggcagcgtgctgctggtggtggccttgctgttcgtcatgggcctgaccctgtacgggccggactcgatgatcagcggcgctgcagccatcgacttcggcaccgccaaggccggcgccaccgcagcaggttttgtcaacggctgtggctcggtgggcgcggtgctgggtgggctgctgccgggttacttcgacggcgtcacggtattcatcgtgttcgcgggctgtgcgctgttctcggcgctggtgttgctgccgcactggaacagccgcccggccagcagcgcgcaaggcaccgacgtggcaccgaacaccagcatggcaatcaagccactgcgtacttaa

SEQ ID NO: 55771 - protein, 438 aa, Pseudomonas putida KT2440
MNQSLAAFKRWRIQIFAITWLAYAAFYFTRKAFSVAKLGIAEDPGFMLDKAAMANLDAIYLAAYAVGQFTWGMLADRFGPRVVVLGGLLISAAAAVVMGSYATFPIFATCMLVQGLAQSTGWAGLCKNIGSFFPASQRGRVLGLWSSCYAFGGLVASPFAGWWAYTLVGTWHAAFFSSAVVVALVAVLFFFLQRNKPEDVGLPAVEPEPQSMAPADNLCSVWAPLREILRNRTVLTLGLAYFLLKPARYAILLWGPVIVFEQMPSVGKVGAAIIPTAFELAGLLGPIMIGLASDKLFGARRMPACVISLVLLTVTLAAFMAAMNTGSVLLVVALLFVMGLTLYGPDSMISGAAAIDFGTAKAGATAAGFVNGCGSVGAVLGGLLPGYFDGVTVFIVFAGCALFSALVLLPHWNSRPASSAQGTDVAPNTSMAIKPLRT

SEQ ID NO: 55772 - DNA, 1392 bp, Escherichia coli CFT073
  CDS (1)..(1392): transl_table=11
atgctggctttcttaaaccaggttcgcaagccgaccctggaccttccgctcgaagtgcggcgcaaaatgtggttcaaaccgttcatgcaatcctacctggtggtctttatcggctaccttacgatgtacctgattcgcaagaactttaacatcgcgcagaacgacatgatctcgacctacgggttgagcatgacgcagctggggatgatcggcctgggcttctccatcacttatggcgtgggtaaaacgctggtttcttactacgccgacggcaaaaacaccaaacaattcctgccgttcatgctgatcctgtctgccatttgtatgctgggcttcagtgccagtatgggcagcggctcggttagcctgttcctgatgattgccttctacgccttaagcggctttttccagagtaccggcggttcgtgcagttactccaccatcaccaaatggacgccgcgtcgtaaacgcgggacattcctcggtttctggaacatttctcacaaccttggtggtgcaggcgcagcaggtgtggcgctgttcggcgcaaattacctgttcgatggtcatgtcatcggcatgtttattttcccgtcgattatcgcgctgattgttggttttatcggtctgcgttacggcagcgactccccggaatcttatggcctcggcaaagctgaagagctgtttggcgaggagatcagtgaagaggataaagagacagaatctaccgatatgaccaagtggcagatctttgttgagtatgtgctgaaaaacaaagtgatctggctgctgtgctttgccaacattttcctctatgtggtgcgtattggtatcgaccagtggtcaaccgtgtatgcgttccaggaactgaaactctctaaagcgttggcaattcagggctttacgctgtttgaagctggtgcgctggtcggtacgctgctgtggggctggctctctgacctggcgaacggtcgccgtggcctggtggcctgtatcgcgctggcgctgattatcgccacgctcggtgtgtatcaacacgccagcaacgaatatatctacctggcttctctctttgcgttgggtttcctggtctttggcccgcaattgttgattggtgtggctgctgttggctttgtacctaaaaaagcgattggcgctgccgatggtattaaaggcaccttcgcttacctgattggtgacagctttgccaagttaggtctgggaatgattgccgatgggacgccggtatttggccttaccggctgggcaggcaccttcgccgcgctggatatcgccgcgattggttgtatctgcctgatggcgatagtggcggtgatggaagaacgcaaaatccgccgcgagaaaaaaattcagcagttgacagtggcataa

SEQ ID NO: 55773 - protein, 463 aa, Escherichia coli CFT073
MLAFLNQVRKPTLDLPLEVRRKMWFKPFMQSYLVVFIGYLTMYLIRKNFNIAQNDMISTYGLSMTQLGMIGLGFSITYGVGKTLVSYYADGKNTKQFLPFMLILSAICMLGFSASMGSGSVSLFLMIAFYALSGFFQSTGGSCSYSTITKWTPRRKRGTFLGFWNISHNLGGAGAAGVALFGANYLFDGHVIGMFIFPSIIALIVGFIGLRYGSDSPESYGLGKAEELFGEEISEEDKETESTDMTKWQIFVEYVLKNKVIWLLCFANIFLYVVRIGIDQWSTVYAFQELKLSKALAIQGFTLFEAGALVGTLLWGWLSDLANGRRGLVACIALALIIATLGVYQHASNEYIYLASLFALGFLVFGPQLLIGVAAVGFVPKKAIGAADGIKGTFAYLIGDSFAKLGLGMIADGTPVFGLTGWAGTFAALDIAAIGCICLMAIVAVMEERKIRREKKIQQLTVA

SEQ ID NO: 55774 - DNA, 1323 bp, Escherichia coli CFT073
  CDS (1)..(1323): transl_table=11
atgatgttgccgtttctgaaagcgcctgccgatgcgccattaatgactgataaacatgaaattgatgcccgctatcgctactggcgtcggcatattctgctgaccatctggctgggttacgcgctgttttacttcacgcgtaaaagttttaacgccgccgtaccagaaatccttgctaacggcgtgctcagccgtagcgatattggcctgttagcgaccctgttttacattacctacggcgtgtcgaagtttgtctccggcattgtcagcgatcgctcaaatgcccgttattttatggggatagggcttattgccacgggcattatcaacattctgtttggcttctcgacgtcgctatgggcgtttgccgtgctttgggtgttgaacgcctttttccagggctggggttcaccggtgtgtgcgcgtctgttaaccgcttggtattctcgtaccgagcgcggcggttggtgggcattatggaacacggcgcataacgtcggcggcgcactcattcccattgtgatggcagcgagcgcgctgcattacggctggcgtgccgggatgatgattgcgggttgtatggcgatcgtcgtggggatttttctctgctggcggctgcgcgatcgtccgcaggcgttaggtttaccggcggttggtgaatggcggcacgacgcactggagattgctcaacaacaagaaggggcagggctgacgcgtaaagagatcctcaccaaatatgtgttgctgaatccgtatatctggctgctttcgttttgctatgtgctggtctatgtggttcgggcggcgatcaacgactggggcaatttgtatatgtccgagacgctgggcgtcgatctggtcacggcgaatacggcagtgacaatgtttgaactgggcggatttatcggtgcgctggtagcgggttggggttcggacaaactgtttaacggcaaccgcgggccgatgaatttgattttcgccgccggaattttgctttcagtcggctcgctgtggctgatgccatttgccagctacgtgatgcaggcaacctgcttcttcaccattggtttttttgtctttggcccgcagatgttaatcggcatggcggcggcagagtgttcccacaaagaggcggcaggggcggcgacgggatttgtcggcttgtttgcttatcttggtgcgtcgcttgctggttggccgctggcgaaagtactcgatacctggcactggagcggattttttgtggttatcgccatcgccgccgggatttccgcactgctattactgccctttttgaacgcccagacaccgcgagaagcgtga

SEQ ID NO: 55775 - protein, 440 aa, Escherichia coli CFT073
MMLPFLKAPADAPLMTDKHEIDARYRYWRRHILLTIWLGYALFYFTRKSFNAAVPEILANGVLSRSDIGLLATLFYITYGVSKFVSGIVSDRSNARYFMGIGLIATGIINILFGFSTSLWAFAVLWVLNAFFQGWGSPVCARLLTAWYSRTERGGWWALWNTAHNVGGALIPIVMAASALHYGWRAGMMIAGCMAIVVGIFLCWRLRDRPQALGLPAVGEWRHDALEIAQQQEGAGLTRKEILTKYVLLNPYIWLLSFCYVLVYVVRAAINDWGNLYMSETLGVDLVTANTAVTMFELGGFIGALVAGWGSDKLFNGNRGPMNLIFAAGILLSVGSLWLMPFASYVMQATCFFTIGFFVFGPQMLIGMAAAECSHKEAAGAATGFVGLFAYLGASLAGWPLAKVLDTWHWSGFFVVIAIAAGISALLLLPFLNAQTPREA

SEQ ID NO: 55776 - DNA, 1365 bp, Escherichia coli CFT073
  CDS (1)..(1365): transl_table=11
atgttatcaatatttaaaacggggcaagcggcggatagtgttccggcggagaaaattcaggtgacatatcgtcgctatcgtatgcaggcgttacttagcgtatttctggggtatcttgcatactatatcgtgcgtaataatttcaccttatcaacgccttatcttaaagagcaattagatctcagcgccacacaaattggcgtactgagtagctgtatgcttatcgcctatggtatcagcaaaggagtgatgagtagccttgccgataaagccagtccgaaagtctttatggcgtgtgggctggtgttatgtgccatcgttaacgttggcctgggattcagcaccgcattctggatttttgcggcattggttattctgaatggtcttttccagggaatgggcgttggtccttctttcatcactattgctaactggttccctcgccgggagcgtggtcgggttggtgctttctggaatatctctcataacatcggtggtggtattgttgcaccgattgttggtgccgcttttgccctactcggcagcgagcactggcaaagtgcgagttatatcgttccggcctgcgtggccatcgtttttgcggtaattgtgctgattctcggtaaaggttccccacatcaggaaggtctaccctctctggaagagatgatgccggaagaaaaagtcgtcctgaatacccgacagacggtaaaagcaccagaaaacatgagcgcctttcagattttctgcacttatgtattacgcaataaaaatgcctggtatgtctcactggttgacgtatttgtatacatggtgcgcttcgggatgattagctggttgcctatttatctgctgacggtgaaacatttttcaaaagaacaaatgagcgtcgcatttttattttttgaatgggccgcgatcccttccacgctacttgccggttggttgtcagacaaactgtttaaagggcgtcgtatgccattggcgatgatttgtatggcgctgattttcatttgcctgattggctactggaaaagtgaatcgttgtttatggtgacaatttttgctgccattgttggttgtctgatttacgttccacaatttctggcttccgttcagactatggagatcgtgcccagctttgctgttggctccgcggtaggtttacgtggttttatgagctatatcttcggtgcatctctgggcaccagcctgtttggtattatggtcgatcatattggctggcatggcggattttatcttcttggctgcggtattatttgttgcatcattttttgctggttatcacatcgtggtgcaattgaacttgaacgtcacagagccgcatatataaaagagcactaa

SEQ ID NO: 55777 - protein, 454 aa, Escherichia coli CFT073
MLSIFKTGQAADSVPAEKIQVTYRRYRMQALLSVFLGYLAYYIVRNNFTLSTPYLKEQLDLSATQIGVLSSCMLIAYGISKGVMSSLADKASPKVFMACGLVLCAIVNVGLGFSTAFWIFAALVILNGLFQGMGVGPSFITIANWFPRRERGRVGAFWNISHNIGGGIVAPIVGAAFALLGSEHWQSASYIVPACVAIVFAVIVLILGKGSPHQEGLPSLEEMMPEEKVVLNTRQTVKAPENMSAFQIFCTYVLRNKNAWYVSLVDVFVYMVRFGMISWLPIYLLTVKHFSKEQMSVAFLFFEWAAIPSTLLAGWLSDKLFKGRRMPLAMICMALIFICLIGYWKSESLFMVTIFAAIVGCLIYVPQFLASVQTMEIVPSFAVGSAVGLRGFMSYIFGASLGTSLFGIMVDHIGWHGGFYLLGCGIICCIIFCWLSHRGAIELERHRAAYIKEH

SEQ ID NO: 55778 - DNA, 1380 bp, Vibrio vulnificus CMCP6
  CDS (1)..(1380): transl_table=11
atgcttaatttctttaaaactcgtccggatgcgccgttatcagacagctccaacgagggaatgctaaagcgctacaagaactaccaatggcaggtattcttaggccttatttttggttacgccgtcttttacgtagtacgtatgagtttgggtgttgtgaaaaagcccatgctcgatgcgggcatcgtgaccatcgaagaactcggtatcatgggttcggcgttcttcttcacttacgccttcggtaagttcttaaacggcttcctatctgactacgccaacattggccgctttatgtcgtgttccctactggtatcgggtgtactctcggttgtgatggggatgaacaccgttggcttcttcttcgttctgctttggggcttaaacggttggttccaatcagtgggttccgcaccttcgtgtgtatcgctttaccaatggttttcgccaaaacagcgtggtagccgttactccatttggggtggttcacgtaacatcggtgaaggtatcacttggatcctaacggcgacactagtgagctacttcggctggcgtgcaggtttcattggcgcgggtatcgctgccgtagttgctgcactgatcatgctgaaagtactgaaagatcgtccacaaacttacggcttaccagatccaggtactgcatttggcgaaggtaccgaaatcaagaaagcgaacgacccaaaagaaacacgtcgtgcgcagatgtttatcctaaaacaacctgtggtatggcttattgccctatcttgtgcggcaatgtacatctctcgctacgcaatgtcttcttgggcggtattgttcctacaagaaacaaaaggttactcactgattgacgcaggttttgccatgtcaatgtacccaacagccggtctagcgggtgcgattctgtcaggtatcctttcagacaaagtgttcaaaggtaaccgtaacatccctaacctactgtacggattggcaaacattgccggtatgtgtttgatgttctttggcccagataaccgtgttatcgacgcagtggcactgagcatgatcggcttctctatcggtggtctagtggtattcctcgcgggtctgattgcttgtgacctgatgccgaaaaacgcggttggtgcggtaaaaggtttgatcggtctgtgttcttacattgcagcgtcagctcaagagcttatctctgcatctctgatcaccatcactgaagtcgatggcgtaaaacactacgactttggtaacgctcagtacttctggcttgccgctggtgtggtatcggttctactcgcactgacggtatggaatgcgaagaaagtggtcgatatcgacgaagaacaagacaaaaagctacaaacacgcacagcttcttaa

SEQ ID NO: 55779 - protein, 459 aa, Vibrio vulnificus CMCP6
MLNFFKTRPDAPLSDSSNEGMLKRYKNYQWQVFLGLIFGYAVFYVVRMSLGVVKKPMLDAGIVTIEELGIMGSAFFFTYAFGKFLNGFLSDYANIGRFMSCSLLVSGVLSVVMGMNTVGFFFVLLWGLNGWFQSVGSAPSCVSLYQWFSPKQRGSRYSIWGGSRNIGEGITWILTATLVSYFGWRAGFIGAGIAAVVAALIMLKVLKDRPQTYGLPDPGTAFGEGTEIKKANDPKETRRAQMFILKQPVVWLIALSCAAMYISRYAMSSWAVLFLQETKGYSLIDAGFAMSMYPTAGLAGAILSGILSDKVFKGNRNIPNLLYGLANIAGMCLMFFGPDNRVIDAVALSMIGFSIGGLVVFLAGLIACDLMPKNAVGAVKGLIGLCSYIAASAQELISASLITITEVDGVKHYDFGNAQYFWLAAGVVSVLLALTVWNAKKVVDIDEEQDKKLQTRTAS

SEQ ID NO: 55780 - DNA, 1341 bp, Vibrio vulnificus CMCP6
  CDS (1)..(1341): transl_table=11
atgtttggactgtttcaatctccgagctacacacaagctcccttggacaaaagccaagttgatgaacgttatcgttactggcgactgcatatcatgatcggcatgtacattgggtacgcgggcttttatttcactcgcaaaaccttcaactacgccgcgcctgccatgattgttgatttgggcttagacaaaggcgatctcggtttaatcggcacacttttctacatcacctatggcctatcgaagtttatctccgggaccatttctgaccgctctaatccacgttattttatgggtgtgggcctgatcgcctcagggattatcaatatcgtgtttggtttttccagctcgctgattgcgctttccatcttgtgggtgctcaacgcttggttccaaggttggggatggccttcttgttccaaactcctcaccacctggtattcgcgctcagaacgcggcttcttgtgggcaatttggaacacagcccacaacgtgggtggcgcactgatcccattattggtcggctacctcacttttcatttcagttggcgtgaaggctttattgttcctggcattatcggcgtgttacttggccttattgtttgctggcgattaagagataaacccaccactcaggggctgccaaccgtcggtcagtggcgtcatgatgcgctcgaactggctcaagagaaacatggccaaggactcagctatcacgaaattctcacgcactatgttttcaacaacaaatacatttggttgctcgcttttagctatgtactggtttacatcgtgcgcaccgcaatcaatgactggggcaatctctaccttaccgagcaacaccattactctctgatcaacgccaacgctgcattgtcgatgttcgagatcggtggctttgttggttctctcgtagcaggttggggctcggataaactgttcggtggtaaccgcggtccgatgaatctgctatttgccgccggtattttcttgtctgttgctgcgctgtggttaatgccgttaaccaactttgcctttcaagcggcgggtttattctctattggcttcttcgtgtttggcccacaaatgcttatcggcatggcagccgctgagtgttctcacaaagattcagctggcgcagccacgggttttgttggtctgtttgcctacatgggcgcggcgttgtctggctacccgcttgcactgattttggaagaatacagctggaccggtttcttcgtcaccatctctatctgtgcggcggtgatcggcttactgttgctgccctttcttcaagctcaaccgtctcgtaaaccactggcccccaaacttcgcttatag

SEQ ID NO: 55781 - protein, 446 aa, Vibrio vulnificus CMCP6
MFGLFQSPSYTQAPLDKSQVDERYRYWRLHIMIGMYIGYAGFYFTRKTFNYAAPAMIVDLGLDKGDLGLIGTLFYITYGLSKFISGTISDRSNPRYFMGVGLIASGIINIVFGFSSSLIALSILWVLNAWFQGWGWPSCSKLLTTWYSRSERGFLWAIWNTAHNVGGALIPLLVGYLTFHFSWREGFIVPGIIGVLLGLIVCWRLRDKPTTQGLPTVGQWRHDALELAQEKHGQGLSYHEILTHYVFNNKYIWLLAFSYVLVYIVRTAINDWGNLYLTEQHHYSLINANAALSMFEIGGFVGSLVAGWGSDKLFGGNRGPMNLLFAAGIFLSVAALWLMPLTNFAFQAAGLFSIGFFVFGPQMLIGMAAAECSHKDSAGAATGFVGLFAYMGAALSGYPLALILEEYSWTGFFVTISICAAVIGLLLLPFLQAQPSRKPLAPKLRL

SEQ ID NO: 55782 - DNA, 1380 bp, Staphylococcus epidermidis ATCC 12228
  CDS (1)..(1380): transl_table=11
atgaacttttttgatattcataaaataccaaacaaagggataccattagctgtacaacgcaaattatggcttagaaactttatgcaagcgttttttgtcgtattctttgtttacatggcgatgtatttaattcgaaacaattttaaagcggcacaaccgttattaaaagaagaaatcggattatcaacattagaactgggttatataggattagcgtttagtattacttacggtttaggaaaaacattactcggttattttgtcgatggtcgtaatacgaagcgtattatttccttcttattaatattatctgcgattacagtacttattatgggatttgtattaagttacttcggctctgtgatgggactattaattgtactgtgggggcttaacggtatatttcaatctgtgggtgggcctgcaagttattcaacgatttcaaggtgggcacctcgaacaaagcgtggacgttatttaggattttggaatacatcacataacattggtggtgcaattgctggcggtgtcgcactctggggtgcgaatacatttttccacggtaatgtcgttgggatgtttatttttccttctattatcgctttaatcattggaatcgtgacattatttattgggaaagatgatccagaagaattaggttggaatcgtgctgaagaaatttgggaagagcctatcgatcaagaaaatattgattctcaaggtatgactaaatgggatatctttaaaaaatatatcctgggaaatccagtgatttggattttgtgtatctcaaatgttttcgtatatatcgtgcgtattggtattgataattgggcgccgctatacgtatcagagcatttacactttaataagggtgacgcggttaatactattttctactttgaaataggagcattagtagccagtttattatggggttatatctcagaccttttaaaaggacgtcgtgcgattgtagcgattggatgtatgtttatgattacctttgttgtgctgttttatacgaacgcaacaagtgtgacaatggtcaatatttctctatttgcattaggcgctttaatcttcggtccacagttactcattggtgtatctctgactggctttgttcctaaaaatgcaattagtgtcgctaacggtatgacaggttcattcgcatatctattcggggattcaatggctaaagtgggtctggctgcaatcgctgatccaacacgtaatggtctaaatatttttgggtatacgttgagtggttggacagatgtctttattgtattctatgtagctttattcttaggaatgatactattagccattgttgcttattacgaagaaaagaaaattagaaaattaaaaatttaa

SEQ ID NO: 55783 - protein, 459 aa, Staphylococcus epidermidis ATCC 12228
MNFFDIHKIPNKGIPLAVQRKLWLRNFMQAFFVVFFVYMAMYLIRNNFKAAQPLLKEEIGLSTLELGYIGLAFSITYGLGKTLLGYFVDGRNTKRIISFLLILSAITVLIMGFVLSYFGSVMGLLIVLWGLNGIFQSVGGPASYSTISRWAPRTKRGRYLGFWNTSHNIGGAIAGGVALWGANTFFHGNVVGMFIFPSIIALIIGIVTLFIGKDDPEELGWNRAEEIWEEPIDQENIDSQGMTKWDIFKKYILGNPVIWILCISNVFVYIVRIGIDNWAPLYVSEHLHFNKGDAVNTIFYFEIGALVASLLWGYISDLLKGRRAIVAIGCMFMITFVVLFYTNATSVTMVNISLFALGALIFGPQLLIGVSLTGFVPKNAISVANGMTGSFAYLFGDSMAKVGLAAIADPTRNGLNIFGYTLSGWTDVFIVFYVALFLGMILLAIVAYYEEKKIRKLKI

SEQ ID NO: 55784 - DNA, 1350 bp, Pseudomonas syringae pv. tomato str. DC3000
  CDS (1)..(1350): transl_table=11
atgttcgggtttttccgccccgccaggcaccaggcacccctccccgaagaaaaagtcgatagcacctatcgacgcctgcgctggcagattttcgcaggcatctttatcggttacgccggctactatttgctgcgcaagaatttctcgctggcgatgccgtatctgatcgacgaaggctacacgcgtggccaactgggcgtggcgatgtctgccattgcgattgcctacggcttgtcaaaattcctcatggggatcatttccgaccgatccaacccgcgttactttctgccgttcggcctgctggtgtctgccgggatcatgttcatcttcggcttcgcgccgtgggcgacgtccagtgtcacgatcatgttcgtgctgctgttcatcaatggctgggcacagggcatgggttggccgccgagcgggcggacgatggtgcattggtggtcgcagaaagagcgcggcggtgttgtgtcggtgtggaacgtggcgcacaacgtcggcggcggcctgatcggtccgctgtttctgctgggtatgggctggacaaacgactggcatgcagcgttctatgtgccggcggcagttgcgctgctggtggcggtattcgccttcgccacgatgcgtgacactccgcaatcggtgggtttgccgcccatcgagcactacaagaacgattacccggaaggctacgatgagagccacgaggaagaattcagcgctcgggaaatcttcgtcaagtacgtgctgcgcaacaaattcctgtggtacatcgccatggccaacgtgttcgtttacctgctgcgctacggcgttctggactgggccccgacctacctgaaagaagccaagcacttcacggtcgacaagacctcatgggcttactttctgtacgagtgggcaggtattccgggcacgctgctgtgcggctggatgtcggacaagatcttcaagggcaatcgcggcctgaccggcatggtgttcatgtttctggtgaccatcgccacgctggtgtactggctgaaccctgaaggcaacccgaccgtcgacatgatcgcgctggtgtccatcggcttcctgatctacggcccggtgatgctgatcggcttgcaggcactggaactggcccccaagaaggcggcgggcacggcagcgggctttaccgggctgtttggctatctgggcggctctgtcgcggcgagcgctgcgatgggctacacggttgaccacttcggctgggatggcggcttcgtgctgctgatcggcgcgtgcatcctggcgatggtgtttcttgcgccaacgctgcggcacaaacaggtcgccagtacgtcccgcgacatcaaacgctga

SEQ ID NO: 55785 - protein, 449 aa, Pseudomonas syringae pv. tomato str. DC3000
MFGFFRPARHQAPLPEEKVDSTYRRLRWQIFAGIFIGYAGYYLLRKNFSLAMPYLIDEGYTRGQLGVAMSAIAIAYGLSKFLMGIISDRSNPRYFLPFGLLVSAGIMFIFGFAPWATSSVTIMFVLLFINGWAQGMGWPPSGRTMVHWWSQKERGGVVSVWNVAHNVGGGLIGPLFLLGMGWTNDWHAAFYVPAAVALLVAVFAFATMRDTPQSVGLPPIEHYKNDYPEGYDESHEEEFSAREIFVKYVLRNKFLWYIAMANVFVYLLRYGVLDWAPTYLKEAKHFTVDKTSWAYFLYEWAGIPGTLLCGWMSDKIFKGNRGLTGMVFMFLVTIATLVYWLNPEGNPTVDMIALVSIGFLIYGPVMLIGLQALELAPKKAAGTAAGFTGLFGYLGGSVAASAAMGYTVDHFGWDGGFVLLIGACILAMVFLAPTLRHKQVASTSRDIKR

SEQ ID NO: 55786 - DNA, 1437 bp, Vibrio parahaemolyticus RIMD 2210633
  CDS (1)..(1437): transl_table=11
atgttaattttgtttcgttcgctccttttgggttctttaccatcgcatatacataatgaggttcctatgtttggaatattcaaacctaaggcgcacattgatcgtctatccccagatagcattgatagcacctattctcgcctccgttggcaactgttcatcggtatttttgttggctacgccggctactatttggttcgtaaaaacttcagtttagcgatgccgtacctcatcgaggagggttacagccgtggtgaccttggtgttgctttggccgctgtttcaatcgcttatggcctttcaaaatttttaatgggcagcgtgtctgaccgttctaacccgcgctatttcctcagtggcggtttgttgatgtctgctctggttatgttctgctttggctttatgccatgggcaacaggcagcatcacggcaatgtttattcttctatttttgaacggttggttccaaggtatggggtggccggcctgtgggcgaaccatggtgcactggtggtcacgtaaagagcgtggtgagatcgtttcggtttggaacgtagcgcacaacgtgggtggcggtttgattggtccactattcattttgggtctgtgggcatttaacgatgattggcgcaccgcattttatgtacctgcatttttcgccactttggttgcagtgttcatttggatgacggttcgagatacgcctcagtcttgtggtctaccgccgattgaagagtacaaagatgactacccagatgactacgacaagtcgcatgaacaagaaatgacggcgaaggaaattttcttcaagtacgtattcaacaataaactgttgtggtcgattgcgattgcaaacgcgtttgtttacttgatccgttacggtgtgttggactgggcacccgtttatctaaaagaagcgaaggacttctcggtagataaatcgtcttgggcttacttcctatacgagtgggcgggtattcctggcacgttattgtgtggttggatttcggacaagctgttcaaaggccgtcgtgcacctgcaggcatcttgttcatggtattggtaacgttggcggtattggtttactggttcaaccctgcgggcaacccaacaatcgatatgatggctcttatcgcgattggcttcttgatttacggccctgtcatgctgattggtttgtatgcacttgaattggcgccgaaaaaagcagcgggtactgctgctggtctaactggcttgtttggttacttaggcggtgcggtggctgcgaacgcggttcttggttacaccgtggaccatttcggttgggatggcggtttcatcattctaattggttcatgtattacttctatcgtgtgtttgacgtatgcgcttctaggcgaacgcgcacaccacgagcaaaaagagcgcgaaaaggaacaagaagcgctagcgtaa

SEQ ID NO: 55787 - protein, 478 aa, Vibrio parahaemolyticus RIMD 2210633
MLILFRSLLLGSLPSHIHNEVPMFGIFKPKAHIDRLSPDSIDSTYSRLRWQLFIGIFVGYAGYYLVRKNFSLAMPYLIEEGYSRGDLGVALAAVSIAYGLSKFLMGSVSDRSNPRYFLSGGLLMSALVMFCFGFMPWATGSITAMFILLFLNGWFQGMGWPACGRTMVHWWSRKERGEIVSVWNVAHNVGGGLIGPLFILGLWAFNDDWRTAFYVPAFFATLVAVFIWMTVRDTPQSCGLPPIEEYKDDYPDDYDKSHEQEMTAKEIFFKYVFNNKLLWSIAIANAFVYLIRYGVLDWAPVYLKEAKDFSVDKSSWAYFLYEWAGIPGTLLCGWISDKLFKGRRAPAGILFMVLVTLAVLVYWFNPAGNPTIDMMALIAIGFLIYGPVMLIGLYALELAPKKAAGTAAGLTGLFGYLGGAVAANAVLGYTVDHFGWDGGFIILIGSCITSIVCLTYALLGERAHHEQKEREKEQEALA

SEQ ID NO: 55788 - DNA, 1395 bp, Vibrio parahaemolyticus RIMD 2210633
  CDS (1)..(1395): transl_table=11
atgttaaaattcctcgaacaggtgcggaagccgaccctcgatcttcctgtcgaagttagaagaaagatgtggtttaaaccgttcatccaatcttacttggtcgtattcatcggctacctaaccatgtacttgattcgtaagaacttcaatgtcgcgcaaaacgacatgatctcaacttacggtttgagcatgacagacctaggtcttattggccttggcttctccatcacatacggcatcggtaaaaccgttgtgtcttactacgctgacggtaagaacaccaagcaattcctcccttttatgctgatcctttctggtcttgcaatgcttggtttcagcttcagcatgggcggcggtagtgcaagcctgttcttgatggtggctttctacgctctgagtggtttcttccaaagtactggtggcccttctagttactcaaccattacaaaatggacacctcgtaacaaacgcggctcttacctaggcttgtggaacatgtcgcacaacgttggtggtgcgggcgcagcgggtgttgctcttttcggtgctaactacctattcgacggccacgtaatcggcatgtttgtgttcccttctatcatcgcgatcatcgttggctttatcggtatgcgctttggtagcgactcaccagaagcttatggtctaggtaaagtagaagaacttttcgatgaagcagtgagtgaagaagacaccgctgctgaagaaaaccagatgaccaaaaaagaaatctttgttgaatacgttcttaaaaacaaagttatctggctactttgctttgccaacatcttcctttacatcgtgcgtatcggtatcgaccaatggtcaacggtatacgcgtaccaagagcttggtctgtcaaaagaaacggcaatctctggctttactctgttcgaagtcggtgcgcttgtgggtactttgatgtggggttacttatctgacctagcaaacggtcgccgcgcattggttgcttgtgtgtctcttggtttgatcatcgtatcgcttgagttctaccaacacgcaacaaatgaattcatgtacttgtcatctctattcgtacttggtttcttggtgtttggtccgcaacttcttatcggtgttgcagcggttggttttgttcctaaaaaagcaatcagtgtagctgacggtgtgaaaggtacattcgcttacctaatcggtgacagcttcgcgaaacttggtctcggtatgattgcagacggtacaccaatcttcggtctaacaggctggaaaggtaccttcgcagccctagatacctccgccatgatttgtattgttttgcttgctttcgtcgctatcgcggaagagaagaagattcgacacgcgaagaagcttcaacttgcacaaaaccaagcctaa

SEQ ID NO: 55789 - protein, 464 aa, Vibrio parahaemolyticus RIMD 2210633
MLKFLEQVRKPTLDLPVEVRRKMWFKPFIQSYLVVFIGYLTMYLIRKNFNVAQNDMISTYGLSMTDLGLIGLGFSITYGIGKTVVSYYADGKNTKQFLPFMLILSGLAMLGFSFSMGGGSASLFLMVAFYALSGFFQSTGGPSSYSTITKWTPRNKRGSYLGLWNMSHNVGGAGAAGVALFGANYLFDGHVIGMFVFPSIIAIIVGFIGMRFGSDSPEAYGLGKVEELFDEAVSEEDTAAEENQMTKKEIFVEYVLKNKVIWLLCFANIFLYIVRIGIDQWSTVYAYQELGLSKETAISGFTLFEVGALVGTLMWGYLSDLANGRRALVACVSLGLIIVSLEFYQHATNEFMYLSSLFVLGFLVFGPQLLIGVAAVGFVPKKAISVADGVKGTFAYLIGDSFAKLGLGMIADGTPIFGLTGWKGTFAALDTSAMICIVLLAFVAIAEEKKIRHAKKLQLAQNQA

SEQ ID NO: 55790 - DNA, 1341 bp, Vibrio parahaemolyticus RIMD 2210633
  CDS (1)..(1341): transl_table=11
atgtttggatttttacgttcacctaaatttactcaaccgagtctgagcaacgagcaaatcgaccagcgttaccgccattggcgtttgcacattatgttggggatgtacatcggctacgcaggtttctactttactcgtaagacctttaactacgccgcaccagcgatgattaccgatcttggcttagataaaggcgatttgggccttatcggtacgcttttctacattacttacggctgctcgaagtttatttccggtacgatttcagatcgctctaaccctcgttatttcatgggattaggattgattgcgacaggtctggtcaatatcgcgttcggtttttctagctcactcgcggctttcattactctgtggatcttaaacgcgtggttccaaggctggggctggccttcatgctccaagctgttaaccacttggtattcacgctccgagcgtggcttcttatgggcgatttggaacaccgcacacaacgttggtggcgctctgatccctattttggtgggctatttaacgttgcactacagctggcgtgaaggctttattctacccggcatcatcggggtattactcggtctattcgtttgttggcgattgcgcgacaaacccacaacaatgggcttaccaagtgtcggacaatggcgcaacgacgcactagaacttgcgcaagaaaattacggacgtggcctcacctaccgcgaaattctgaaatcgtacgtatttaacaacaaatacatctggctgctcgcgttcagttatgtgttggtttacatcgtccgaaccgcaatcaatgactggggaaacctgtacttgaccgagcagcatcactatagcctgattaacgccaacgctgctctgtcgatgtttgaaatcggtggttttgttggttcattggttgcgggttggggctcagacaaactctttggcggtaaccgtgggccaatgaacttgctgttcgcgattgggattttcttgtctgtctctgcgctttggctgatgcctctgaccaactttgcattccaagcggcgggattgttctccatcggcttctttgtctttgggccacaaatgctgatcggtatggcggcggcggagtgctctcacaaagattctgccggcgcggcaacaggattcgtgggcttgttcgcctacatgggcgcagcattgtctggctatccactggcgttaattcttgaagaatatcattggacgggtttcttcatcaccatttcagtttgtgcagccgtcattggccttttgttgttgccatttttgcaagcgcaaccatcacgaaaaccactcgaaccaaaacctcggttgtaa

SEQ ID NO: 55791 - protein, 446 aa, Vibrio parahaemolyticus RIMD 2210633
MFGFLRSPKFTQPSLSNEQIDQRYRHWRLHIMLGMYIGYAGFYFTRKTFNYAAPAMITDLGLDKGDLGLIGTLFYITYGCSKFISGTISDRSNPRYFMGLGLIATGLVNIAFGFSSSLAAFITLWILNAWFQGWGWPSCSKLLTTWYSRSERGFLWAIWNTAHNVGGALIPILVGYLTLHYSWREGFILPGIIGVLLGLFVCWRLRDKPTTMGLPSVGQWRNDALELAQENYGRGLTYREILKSYVFNNKYIWLLAFSYVLVYIVRTAINDWGNLYLTEQHHYSLINANAALSMFEIGGFVGSLVAGWGSDKLFGGNRGPMNLLFAIGIFLSVSALWLMPLTNFAFQAAGLFSIGFFVFGPQMLIGMAAAECSHKDSAGAATGFVGLFAYMGAALSGYPLALILEEYHWTGFFITISVCAAVIGLLLLPFLQAQPSRKPLEPKPRL

SEQ ID NO: 55792 - DNA, 1338 bp, Streptococcus pyogenes SSI-1
  CDS (1)..(1338): transl_table=11
atggaagaggattataacaaaagagaacctgagaagtttacgcaatttctgcgccgtcaaaaggttgtcttttttgtcgcattttttggttatgtgtgcgcttacttggtacgcaacaatttcaaactaatgtcaaacactattatggtacaaaatggttgggacaaggctcaaattgcgaccttgctatcgtgtttgaccgtttcttatggtttagcaaaattctatatgggagccttaggggatcgtgttagcttgagaaagctcttttcaatcagcttgggtgcaagcgctttgatttgtattttaattggttttttcaatagttcaatggtggtgttagggatactgctagtcttgtgtggtgtcgtacaaggtgccttggcacctgcctcacaagccatgattgccaattattttccaaataaaacacgcggcggagccatcgctggatggaacatttctcaaaacatgggatcagccctcttgccattaaccatcgccttgctcaccagtatgggcttggtggtaccagctaatggcaatattttacttgcatttttaattcctggtgttttagtgttcttgtttgctttgtgttgctggaagcttggcggtgataaccctgagtctgagggacttgactctcttcgaacgatgtatggtgatgcgggcgaatcagctgttgccagtgaagaagaaaagcataacctgtcttattggcaactcatctggaaatacgttttttgtaacccgtcgctcttacttgttgctgctgtcaatgtggccctttattttgttcgttttgggattgaagactggatgccgatctacttgtcacaagtagccaatatgtcagaggcccatattcattttgcgatttcaatgttagagtgggtagctattccaggctcgctggtatttgcgtggttagcggttcgttatcctaataaaatggccaagattggggctattgggctttttgtgttagcggctattgtgtttgtctatgaacgcttgactgccacaggtgctccaaactatttcttgttgcttgttattgcaggtattttagggtcattgatttatggcccacagttgatcgtgaatattttaacaatcaactttgttcctttaaatgttgcaggaacagcgattggttttgtaggagtaacagcttatctcatcggcaatatgggagcaaactggctgatgccgattttggcagatggttttggctggttttggtcatatattgtcgttgcagccttatctgctttttcagcggttggttatttgattttagccaaacgtgaggaagaaatcatcaaagattag

SEQ ID NO: 55793 - protein, 445 aa, Streptococcus pyogenes SSI-1
MEEDYNKREPEKFTQFLRRQKVVFFVAFFGYVCAYLVRNNFKLMSNTIMVQNGWDKAQIATLLSCLTVSYGLAKFYMGALGDRVSLRKLFSISLGASALICILIGFFNSSMVVLGILLVLCGVVQGALAPASQAMIANYFPNKTRGGAIAGWNISQNMGSALLPLTIALLTSMGLVVPANGNILLAFLIPGVLVFLFALCCWKLGGDNPESEGLDSLRTMYGDAGESAVASEEEKHNLSYWQLIWKYVFCNPSLLLVAAVNVALYFVRFGIEDWMPIYLSQVANMSEAHIHFAISMLEWVAIPGSLVFAWLAVRYPNKMAKIGAIGLFVLAAIVFVYERLTATGAPNYFLLLVIAGILGSLIYGPQLIVNILTINFVPLNVAGTAIGFVGVTAYLIGNMGANWLMPILADGFGWFWSYIVVAALSAFSAVGYLILAKREEEIIKD

SEQ ID NO: 55794 - DNA, 1392 bp, Salmonella enterica subsp. enterica serovar Typhi Ty2
  CDS (1)..(1392): transl_table=11
atgttaacaatattaaaaacagggcgatcggcgcataaagtcccaccggaaaaagtccaggctacgtatggtcgatatcgtatacaggcattgttaagcgtatttctgggatatctcgcttactatatagtcagaaacaacttcacattatcgacgccttatttaaaagagcaattggatctcagcgctacgcaaatcggcctgctgagtagctgtatgcttattgcttacggaatcagtaaaggcgtaatgagcagtctggcggataaagccagcccaaaagtcttcatggcgtgcggtctggtactctgcgtgattgttaacgttgggctgggattcagtagcgcattctggatatttgccgctctggtggtcttcaatggcctttttcagggcatgggcgtcggcccctcgtttattactattgcaaactggttccctcgtcgggaacgcggacgcgtaggcgccttctggaatatctcgcataacgttggcggcgggatcgtcgcgcctatcgtcggtgcggcttttgcgatattgggcagcgaacactggcaaagcgccagttatatcgttccggcctgcgtcgccgtcatttttgccttaattgttctggtcttgggaaaaggttcgccgcgcgaagaaggtcttccctccctggaacagatgatgccggaagaaaaagtcatactgaaaacgaagaatacggcaaaagcgccggaaaatatgagcgcatggcaaatcttctgtacttatgtgctgcgcaataaaaatgcctggtatatttcgctggtcgatgtcttcgtctatatggtgcggtttggcatgattagctggttgcctatctatctgttgacagtaaaacacttttcaaaagaacagatgagcgtcgcgtttctctttttcgagtgggcggcaattccctctacgctactggcaggctggctgtcagataaactgtttaagggccgcagaatgccgttagccatgatttgcatggcgctgatttttgtctgtctgatcggatactggaaaagtgaatctttgctgatggtaacgattttcgccgccattgtaggttgtctgatttacgtcccgcaattcctcgcgtccgtacagacaatggagatagtccccagctttgccgtaggttccgccgtcggtttacgtgggttcatgagctatattttcggcgcctcgttgggcaccagcctgtttggcgtcatggtggataaactgggctggtacggcggattttatcttctgatgggcggcatcgtgtgctgcattctattctgttacctctcccatcgcggcgcgctggaactggaacgccagcgccagaatgcgttacataatcaggactcactgcagcttgcggacgcgcaataa

SEQ ID NO: 55795 - protein, 463 aa, Salmonella enterica subsp. enterica serovar Typhi Ty2
MLTILKTGRSAHKVPPEKVQATYGRYRIQALLSVFLGYLAYYIVRNNFTLSTPYLKEQLDLSATQIGLLSSCMLIAYGISKGVMSSLADKASPKVFMACGLVLCVIVNVGLGFSSAFWIFAALVVFNGLFQGMGVGPSFITIANWFPRRERGRVGAFWNISHNVGGGIVAPIVGAAFAILGSEHWQSASYIVPACVAVIFALIVLVLGKGSPREEGLPSLEQMMPEEKVILKTKNTAKAPENMSAWQIFCTYVLRNKNAWYISLVDVFVYMVRFGMISWLPIYLLTVKHFSKEQMSVAFLFFEWAAIPSTLLAGWLSDKLFKGRRMPLAMICMALIFVCLIGYWKSESLLMVTIFAAIVGCLIYVPQFLASVQTMEIVPSFAVGSAVGLRGFMSYIFGASLGTSLFGVMVDKLGWYGGFYLLMGGIVCCILFCYLSHRGALELERQRQNALHNQDSLQLADAQ

SEQ ID NO: 55796 - DNA, 1359 bp, Salmonella enterica subsp. enterica serovar Typhi Ty2
  CDS (1)..(1359): transl_table=11
atgttgagtatttttaaaccagcgcttcataaagcgcgcttgccagcggcggagattgatccgacctatcgccgattacgctggcagattttcctggggatattctttggctatgccgcgtattatctggtgcgcaagaactttgccctcgcgatgccctacctggtagaacagggtttttcacgcggcgatctgggctttgcgctgtccgggatttctatcgcttatggtttttcgaaatttataatgggttcggtgtccgatcgctcgaatccgcgcgtttttctgccggcagggttgattctggccgcagcagtcatgttgtttatgggctttgtgccgtgggcgacatccagcatcgccgtgatgtttgtgctgttgttcctttgcggctggttccaggggatggggtggccgtcgtgcggacgtacgatggttcactggtggtcgcagaaagagcgcggcggcattgtgtcggtctggaactgtgcgcataacgtcggcggcgggatcccgccactgctgttcctgctggggatggcgtggtttaacgactggaaagcggcgctctatatgccagcctttggcgcgattgtggtggcactgttcgctttcgcaatgatgcgcgatacgccgcaatcctgcggtctgccgcctatcgaagagtataaaaacgactatccggatgactacaacgaaaaagcggaagaagagctgactgcgaagcagatcttcatgcagtacgtactgccgaacaaattactgtggtatatcgctatcgccaacgtgttcgtctacctgctgcgctacggtatcctcgactggtcaccgacctacctgaaagaagtgaagcatttcgcactcgataaatcctcctgggcctacttcctctatgaatacgcgggtattccaggcacgctgctgtgtggctggatgtcggataaagtcttccgcggcaaccgtggcgcgtcgggcgtattctttatgaccctggtcactatcgcgaccatcgtttactggatgaacccggcaggcaacccgaacgttgatatggcttgtatgattatcatcggcttcctgatctacggcccggtaatgttgatcggtctgcacgcgctggagctggcgccgaaaaaagcggcgggtacggcggcgggctttaccggtctgtttggttacctgggcggttctgtcgctgcaagcgccattgtgggttataccgttgacttcttcggttgggatggcggctttatggtgatgattggcggtagcattctggcggtaatcctgctggtggtcgtgatgattggcgaaaaacgccatcatgatgagctgcagttaaaacgcaacggaggctaa

SEQ ID NO: 55797 - protein, 452 aa, Salmonella enterica subsp. enterica serovar Typhi Ty2
MLSIFKPALHKARLPAAEIDPTYRRLRWQIFLGIFFGYAAYYLVRKNFALAMPYLVEQGFSRGDLGFALSGISIAYGFSKFIMGSVSDRSNPRVFLPAGLILAAAVMLFMGFVPWATSSIAVMFVLLFLCGWFQGMGWPSCGRTMVHWWSQKERGGIVSVWNCAHNVGGGIPPLLFLLGMAWFNDWKAALYMPAFGAIVVALFAFAMMRDTPQSCGLPPIEEYKNDYPDDYNEKAEEELTAKQIFMQYVLPNKLLWYIAIANVFVYLLRYGILDWSPTYLKEVKHFALDKSSWAYFLYEYAGIPGTLLCGWMSDKVFRGNRGASGVFFMTLVTIATIVYWMNPAGNPNVDMACMIIIGFLIYGPVMLIGLHALELAPKKAAGTAAGFTGLFGYLGGSVAASAIVGYTVDFFGWDGGFMVMIGGSILAVILLVVVMIGEKRHHDELQLKRNGG

SEQ ID NO: 55798 - DNA, 1329 bp, Salmonella enterica subsp. enterica serovar Typhi Ty2
  CDS (1)..(1329): transl_table=11
atgctttcgtttttaaaagccccggccaacgcgccgctcatcaccgataagcacgaggttgacgcccgctatcgctactggcggcggtatatcctgatcaccatttggttgggttacgcgctgttctatttcacccgtaaaagctttaacgccgccgcgccggaaatccttgccagcggtattctgacccgcagcgatatcggcctgctggcgacgctgttttacatcacctacggggtgtcgaaatttgtctccggcatcgttagcgatcgctctaacgctcgctattttatgggcatcgggctgattgcgaccggcgtagtgaatattctgttcggcttctcgacctcgctgtgggcctttgcgctgctatgggcgctgaacgcctttttccaggggtttggatcgccggtttgcgcccgtttgctgactgcctggtactcgcgtaccgagcgcggcggctggtgggcgttatggaacaccgcgcataatgtcggcggggcgctgatccctctcgttatggccgctgtcgccctgcattatggctggcgcgtcgggatgatggtggccggattgcttgccatcggggtgggcatggtcctctgctggcggctgcgcgaccgtccgcaggcgattggtttaccgccggtaggcgactggcggcacgatgcgctggaggtcgcccaacagcaagagggcgcgggactaagccgcaaagaaatcctcgctaaatatgtgctgtcgaatccctatatctggctgctttcgttgtgttatgtcttagtgtacgtggtgcgcgcggcgatcaacgactggggcaacctgtatatgtccgagacgctgggcgtggatttggtcacggccaacacggcagtatcgatgtttgagttgggtggatttatcggcgcgctggtggcgggttggggctcggacaaactcttcaacggcaaccgcggaccgatgaatttaatcttcgctgccgggattttgctctctgtgggttcgctgtggctgatgccgttcgccagctacgtcatgcaggcggcctgtttcttcaccaccggtttctttgtcttcggcccgcagatgctcattggcatggcggcggcggagtgctcgcataaagaggcggcgggcgcagccaccggctttgtcggcctgttcgcctatctcggcgcgtcgctttccggctggccgttagcgaaagtgctggagatctggcactggaccggtttttttgcggtcatcgccatcgcggcggggatctccgcgctattgctgctgccatttctgaacgcccaggccccacgcgagacccacgaagcgtga

SEQ ID NO: 55799 - protein, 442 aa, Salmonella enterica subsp. enterica serovar Typhi Ty2
MLSFLKAPANAPLITDKHEVDARYRYWRRYILITIWLGYALFYFTRKSFNAAAPEILASGILTRSDIGLLATLFYITYGVSKFVSGIVSDRSNARYFMGIGLIATGVVNILFGFSTSLWAFALLWALNAFFQGFGSPVCARLLTAWYSRTERGGWWALWNTAHNVGGALIPLVMAAVALHYGWRVGMMVAGLLAIGVGMVLCWRLRDRPQAIGLPPVGDWRHDALEVAQQQEGAGLSRKEILAKYVLSNPYIWLLSLCYVLVYVVRAAINDWGNLYMSETLGVDLVTANTAVSMFELGGFIGALVAGWGSDKLFNGNRGPMNLIFAAGILLSVGSLWLMPFASYVMQAACFFTTGFFVFGPQMLIGMAAAECSHKEAAGAATGFVGLFAYLGASLSGWPLAKVLEIWHWTGFFAVIAIAAGISALLLLPFLNAQAPRETHEA

SEQ ID NO: 55800 - DNA, 1392 bp, Salmonella enterica subsp. enterica serovar Typhi Ty2
  CDS (1)..(1392): transl_table=11
atgctggccttcttaaaccaggtgcgcaagccgaccctggatctgccgctcaatgtgcggcgtaaaatgtggttcaagtcgttcatgcagtcctatctggtggtttttatcggctacctgaccatgtacctgatccgcaaaaactttaacatcgcgcagaacgacatgatctctacctacaggttgagcatgaccgagctggggatgattggcctgggcttctcgatcacctacggcgtggggaaaacgctggtttcctactacgctgacggtaaaaataccaagcagtttctaccgtttatgttgatcctctccgctatctgtatgctcggcttcagcgccagcatgggcgcggggtcaaccagtctgtttctgatgatcgctttctatgccctgagcggtttcttccagagtaccggcggatcgtgcagctactcgaccatcaccaaatggactccgcgtcgtaaacgcggcacctttctcggcttctggaatatctcccacaacctcggcggcgcgggcgcggcaggcgtggcgctgttcggcgccaactacctgttcgacggtcacgtcatcggcatgtttatcttcccgtcgattatcgcgctgattgttggctttatcggtctgcgtttcggcagcgactccccggaatcttacggtctgggtaaagctgaagaactgttcggcgaagagatcagcgaagaggataaagagactgaagaaaacgaaatgaccaagtggcagatctttgttgaatatgtgttgaaaaacaaagtgatctggctgctgtgtttctccaatatcttcctgtatgtggtgcgtattggtatcgaccagtggtcaaccgtctacgccttccaggaactgaaactttctaaagaggtggcgattcagggctttaccttgtttgaagtgggcgcgctggtcggcacgttgctgtggggctggctctctgacctggcgaacggtcgtcgcgcgctggtagcctgtgtggcgctggcgttgatcatcgctaccctcggcgtctaccagcacgccagcaaccagtatgtctatctggcctcgctgttcgcgctcggtttcctggtgtttgggccgcagctattaattggtgtggcggctgtcggtttcgtaccgaaaaaagccatcggcgctgcggacggtatcaagggcaccttcgattatcttatcggcgatagctttgctaagctgggtctgggcatgattgccgacggcacccccgtttttggtctgaccggttgggcgggtaccttcgccgcgctggacgctgccgcgatcggctgtatctgcctgatggcgatggtcgccgtgatggaagagcgcaaaatccgccgtgagaaaaaaattcagcaagtcaatatcgcttaa

SEQ ID NO: 55801 - protein, 463 aa, Salmonella enterica subsp. enterica serovar Typhi Ty2
MLAFLNQVRKPTLDLPLNVRRKMWFKSFMQSYLVVFIGYLTMYLIRKNFNIAQNDMISTYRLSMTELGMIGLGFSITYGVGKTLVSYYADGKNTKQFLPFMLILSAICMLGFSASMGAGSTSLFLMIAFYALSGFFQSTGGSCSYSTITKWTPRRKRGTFLGFWNISHNLGGAGAAGVALFGANYLFDGHVIGMFIFPSIIALIVGFIGLRFGSDSPESYGLGKAEELFGEEISEEDKETEENEMTKWQIFVEYVLKNKVIWLLCFSNIFLYVVRIGIDQWSTVYAFQELKLSKEVAIQGFTLFEVGALVGTLLWGWLSDLANGRRALVACVALALIIATLGVYQHASNQYVYLASLFALGFLVFGPQLLIGVAAVGFVPKKAIGAADGIKGTFDYLIGDSFAKLGLGMIADGTPVFGLTGWAGTFAALDAAAIGCICLMAMVAVMEERKIRREKKIQQVNIA

SEQ ID NO: 55802 - DNA, 1347 bp, Bacteroides thetaiotaomicron VPI-5482
  CDS (1)..(1347): transl_table=11
atgctgaaacatcttataaatttttacaaggtctcttcaccggggccttgtaacggagacgttatgtcttcatccggcaagcgtcggttgaaatatctgcaatggtctacctttctttcggcaactttcggatacggtatgtattatgtctgccggttgagcttgaatgtagtaaagaaaccgattgtagacgagggaatcttttctgaaacggaactcggaataatcggttcggtgctgttctttacgtatgcggtgggtaaatttacgaatggatttctggcagatcgaagtaatataaatcgttttatgactaccggcctgcttgttaccgcattgattaatctttgtctcggtttctcccattcatttattttgtttgctgttctttggggagtcagcggctggtttcagtctatgggggctgcttcgtgtgtagtcggactttcccgttggttcacggataaagaacgtggctcttattatggcttttggtccgccagtcataatattggtgaagcactgacatttataattgtagcatctattgttagtgtttgcggctggcgttatggtttctttggggcgggtatggtaggattgctgggggcattaattgtatggcgtttttttcatgacagtcccgaaagcaagggctttcctccggtcaatgttccgaaagaaaagaaaacgatgagtgcttccgaaacgacagattttaataaagctcaacggcaggttctgacaatgcctgctatctggatccttgctttatcaagtgcatttatgtatatcagccgatatgcggtaaacagttggggagttttttatttggaagcacagaaaggatattccactttggatgccagtttcattatttccattagttctgtttgtggtattatcggcactatgttttccggtgtaatttctgataaactgtttggtggccggcgtaatgttccggctttgattttcggactgacgaatgttttagcattatgtttgttcttattagtgccaggggtacacttttggctcgatgctgtggcaatgatcctctttggactgggcatcggagtactgatttgtttcttaggtgggctgatggctgttgatattgctcctcgcaatgcttcgggagctgctttgggagttgttggaattgccagttatatcggagctgggctgcaagatgtcatgagcggagttttgattgaaggacataaaacgatccggagtggggtagaggtttacgactttacttatatcaattggttttggatcggatcggctatattgtcggtatttttcgctttatgggtgtggaatgcgaagcaaaaataa

SEQ ID NO: 55803 - protein, 448 aa, Bacteroides thetaiotaomicron VPI-5482
MLKHLINFYKVSSPGPCNGDVMSSSGKRRLKYLQWSTFLSATFGYGMYYVCRLSLNVVKKPIVDEGIFSETELGIIGSVLFFTYAVGKFTNGFLADRSNINRFMTTGLLVTALINLCLGFSHSFILFAVLWGVSGWFQSMGAASCVVGLSRWFTDKERGSYYGFWSASHNIGEALTFIIVASIVSVCGWRYGFFGAGMVGLLGALIVWRFFHDSPESKGFPPVNVPKEKKTMSASETTDFNKAQRQVLTMPAIWILALSSAFMYISRYAVNSWGVFYLEAQKGYSTLDASFIISISSVCGIIGTMFSGVISDKLFGGRRNVPALIFGLTNVLALCLFLLVPGVHFWLDAVAMILFGLGIGVLICFLGGLMAVDIAPRNASGAALGVVGIASYIGAGLQDVMSGVLIEGHKTIRSGVEVYDFTYINWFWIGSAILSVFFALWVWNAKQK

SEQ ID NO: 55804 - DNA, 1368 bp, Chlamydophila caviae GPIC
  CDS (1)..(1368): transl_table=11
atgaatatttggaccagattctttcagcctcccaagcacattaaagaacttgatgatccagaattagtcaaaaaacagtacaagtattggagaattcgcatcttctacagcatgtttatagggtatgtcttctattatttcacaaggaagagttttacctttgccatgcctacgctgatgacagaccttggttttgataaagcacaactagggatcattggtagtactttgtacatcagttatggcatcagtaagtttgttagcggcgttatatctgatcagtccaaccctcgttacttcatggcgttgggtttaattatcacagggctcactaacatctttttcggaatgtcctcctctattcttttattcgctttatggtggggacttaatggttggtttcaaggatggggatggcctccttgcgctcgtttattaactcactggtactcaaaatccgaaagagggacttggtggagtgtatggagcacatcacataatattggtggtgctttaattcctattcttacagggtttgctattgattgctgtggttggcgtggggcgatgtttattccaggtgccctatgtattatgatgggatttgttttaatcaaccgtcttcgtgatacgccacaatctttaggccttccagctattgaaaaatatagaaaagcacaaaaggctaaaaaacacgaaaagacaacagcagatatcctagaagaagaagctgaaaaagaattatccactagagaaatcctcttcacctatgtcttgaagaacaaatggatctggttattatcttttgcttcatttttcatttatgttgtccgtatggctgtaaatgattggagcgcgttattcttaatcgaaacaaaacgttatgttgctgtaaaggccaacttctgcgtttctctatttgagatcggcgggcttttcggtatgttaattgctggatggttatctgataagatttccaagggcaagcgcggtccgatgaatgttgtattttctttaggactcttatttgcaattttaggcatgtggtatggccgagatcaagatatgtggtggttagacggcaccctgctctttgttatcggtttcttcttatttggtccccaaatgatgattggtttagcagctgctgaattatcccataaaaaagctgcgggtaccgctagcggtttcgcaggttggtttgcttatttcggagcagcatttgcaggttatccattaggaaaaatagctcaggattggggatggaaaggatttttcattgctcttctaagctgtgctttaattgctttggttttattcctacctacatggaatgcctccgagagaagtttacagactaaaaaataa

SEQ ID NO: 55805 - protein, 455 aa, Chlamydophila caviae GPIC
MNIWTRFFQPPKHIKELDDPELVKKQYKYWRIRIFYSMFIGYVFYYFTRKSFTFAMPTLMTDLGFDKAQLGIIGSTLYISYGISKFVSGVISDQSNPRYFMALGLIITGLTNIFFGMSSSILLFALWWGLNGWFQGWGWPPCARLLTHWYSKSERGTWWSVWSTSHNIGGALIPILTGFAIDCCGWRGAMFIPGALCIMMGFVLINRLRDTPQSLGLPAIEKYRKAQKAKKHEKTTADILEEEAEKELSTREILFTYVLKNKWIWLLSFASFFIYVVRMAVNDWSALFLIETKRYVAVKANFCVSLFEIGGLFGMLIAGWLSDKISKGKRGPMNVVFSLGLLFAILGMWYGRDQDMWWLDGTLLFVIGFFLFGPQMMIGLAAAELSHKKAAGTASGFAGWFAYFGAAFAGYPLGKIAQDWGWKGFFIALLSCALIALVLFLPTWNASERSLQTKK

SEQ ID NO: 55806 - DNA, 1350 bp, Bacillus cereus ATCC 14579
  CDS (1)..(1350): transl_table=11
atgttttttacacaattatttaaacctgcgccccacgcggaacgcttaccagctgatcgcgttgatagcgaataccgtaaattacgtttacaagtattcttaggtatcttcatcggttatgcaggctactactttgttcgaaaaaacttttcactagcaatgccatacttaatcgagcaaggctttagtaaaggggaacttggggttatcctttcagcagtttctattgcttacggattaagtaaatttcttatgggtatcgtatccgatcgttgtaatcctcgctactttttagcagctgggctatttttatcaggtatcattaatattattttcggctcattttctttcattacaacgagcattatacttatgtttgtacttcagtttttaaatggatgggtacaaggtatgggatggcctccttgtggtcgtacgatggttcactggttctctattagcgaacgtggtacaaaaatgtctatttggaacgtcgctcataatgttggcggagcgcttatgccttcccttgtaacattaggcttatacttcttcgcagatgactggaaaagtattttttacttcccaggtattctttcaattttagttggtatttatgtattaattacgatgaaagatacacctcaatcttgtggactaccttctattgaagaacatactggggaatatccaccagatgaaaaagtaaaagatcgcgaacgcgaactttcagtaaaggaaattttatttaaatacgtattaaacaataagtttttatggtacatcgctattgcgaacgttttcgtatatttcgtacgttacggcgttgtagactgggctcctacttatttagtagaagaaaaaagctttactcatagtagctcacgtactgcttacgctctatatgaatgggctggtattccaggtacacttctttgcggatggatgagtgataaactatttaaaggacgtcgtgcacctgctggtattctatttatggttggtgtatttatcgcagttcttgtttactggttaaaccctcctggtaatccaatggttgatagtatcgcacttgtcgcaattggatttttaatttacggaccggttatgttaattggtctacacgctctagatttagcaccaaagaaagctgctggaactgcagcaggcttaactggattcttcggttacttaggcggagcagctttcgctagtgcagctatgggctttatcgtagatgcattcggatgggatggcggattcatcttattacttgcatcttgcgtacttgcaatgttcttccttgctcttactttaaatacagggtcagtaaaatcaaaacaagcttaa

SEQ ID NO: 55807 - protein, 449 aa, Bacillus cereus ATCC 14579
MFFTQLFKPAPHAERLPADRVDSEYRKLRLQVFLGIFIGYAGYYFVRKNFSLAMPYLIEQGFSKGELGVILSAVSIAYGLSKFLMGIVSDRCNPRYFLAAGLFLSGIINIIFGSFSFITTSIILMFVLQFLNGWVQGMGWPPCGRTMVHWFSISERGTKMSIWNVAHNVGGALMPSLVTLGLYFFADDWKSIFYFPGILSILVGIYVLITMKDTPQSCGLPSIEEHTGEYPPDEKVKDRERELSVKEILFKYVLNNKFLWYIAIANVFVYFVRYGVVDWAPTYLVEEKSFTHSSSRTAYALYEWAGIPGTLLCGWMSDKLFKGRRAPAGILFMVGVFIAVLVYWLNPPGNPMVDSIALVAIGFLIYGPVMLIGLHALDLAPKKAAGTAAGLTGFFGYLGGAAFASAAMGFIVDAFGWDGGFILLLASCVLAMFFLALTLNTGSVKSKQA

SEQ ID NO: 55808 - DNA, 1335 bp, Bacillus cereus ATCC 14579
  CDS (1)..(1335): transl_table=11
atgtttaaatggctcaagccagcacctgcaattgaaagattgccagcggatatgatcgatcatgtatatcgattactacgtattcgtgtgttaatcgggatttcagttggatatgctgcttattatttagttcgtagtaactttacgttatcaagtacgtatttagtacaagaatatggttttagtacagctgaaattggtctactaggctcagtaatggcaattgtttatggatttagtaagttctttatggggaatttatcagataaagctttcgcccagcgctttatcgcagtcggtttattcttatcagggcttgtaaatatttgtttcggctttgcatcatcatttgggatgattgttacattacttgttgttaacggtattgtacaaggtatgggagcaccaccttgtagtattgttatgacgaaatggttctcgaagaaagaacgtggtacgaaaacaggtctttggaatatttcacataacgttggtggaatgcttgtgccaccacttgtcggaattggtgtaggtattttcggtgaaaatcattggcaaggcggcgtgtttattttccctgcgattatcgcaatggtaattgcagtacttgtttggatcaatgcgaaggatacaccagaatctgaaggtcttcctccaattgatgagtatcgtaatgactatgaaaatcttgaaaaggcagataatgctaacaagatgtcaccaaaagaaattttaatgaagtatgtagtgaaaaataaatttgtatggttcttatgtattgcgaatgcttttgtttatttaattcgtttcggtgttattaactgggttccactttatttaacgacagttaaaggattttcaaaagcagaagcgcatgcggcatatgcaatctttgaaggtatggcaattccaagttcattaatcgttggttttttaagtgataaattatttaaaggaaaacgtatgccattatgtattattagtatggttggagttgttattggtacgtttatatattggcaagcaactagcgtacttgttgtaagtattgcagtttctattatcggttgtttaatttatgtaccacagttcttaatcggtttaagtgcgatggaattagtaccgaaatttgcagtaggtacgacagttggtatgtgtggtctattcggttatgtaggcggaagtcttgtagctaacgcagcaattggtgttattgttgatagttctggctgggatggttgtttcatcttactattaacaggagcaattttatcaacagtcttcttatttattgttcaacgtggacatgagagaaaagatcctaaagtagcataa

SEQ ID NO: 55809 - protein, 444 aa, Bacillus cereus ATCC 14579
MFKWLKPAPAIERLPADMIDHVYRLLRIRVLIGISVGYAAYYLVRSNFTLSSTYLVQEYGFSTAEIGLLGSVMAIVYGFSKFFMGNLSDKAFAQRFIAVGLFLSGLVNICFGFASSFGMIVTLLVVNGIVQGMGAPPCSIVMTKWFSKKERGTKTGLWNISHNVGGMLVPPLVGIGVGIFGENHWQGGVFIFPAIIAMVIAVLVWINAKDTPESEGLPPIDEYRNDYENLEKADNANKMSPKEILMKYVVKNKFVWFLCIANAFVYLIRFGVINWVPLYLTTVKGFSKAEAHAAYAIFEGMAIPSSLIVGFLSDKLFKGKRMPLCIISMVGVVIGTFIYWQATSVLVVSIAVSIIGCLIYVPQFLIGLSAMELVPKFAVGTTVGMCGLFGYVGGSLVANAAIGVIVDSSGWDGCFILLLTGAILSTVFLFIVQRGHERKDPKVA

SEQ ID NO: 55810 - DNA, 1404 bp, Shigella flexneri 2a str. 301
  CDS (1)..(1404): transl_table=11
ttgcgacaattggttatcagtattacagaaggattaaatatgtcattattcacagaacctaaggaaattgaaagattaccctctgaagagattgaacgattatatcccgtcctgcgatacagggtctttatcagcattttcctcggatatatggggtattattttgtccgaaacaccaccagtgtgttatccggtgtgctgcacatgtctgcaaccgagatcggcattatctcctgtgccggttttttatcctatggtatatcaaagtttgtttccggacttatttctgacagaagtaattcaaaagtatttttgtctcttggtttattcctgtccggactggtaaattttctgataggatatattcccgggatcatcacatccgttacgttattttcaacaatgtatttacttaacggctggatccaaggtatgggatatcctcctggtgccaaaacactggtgttctggtatgaacatcgggaaaggatcacctgggccacactgtggaatttatcgcacaatgtcgggggagctctggcccccgttctgattggtttcagttttggttttttcggcgacagtgctctggatcatgcccgggccgcatttatcttcccaggagtactgtgtatggcaatgagtgtgctgatttactttattcaggtggacagacctgtatcagtggggcttcctcccattgaagaatggaaaggtaacgtcgtttcacacccggctaaaggccgtgaacaaggtccgagactctccattcctgatatcatcagaaaacatatcatccgaaataataaactcatttactgctgtatctatggttcgtttgtttatattctgagatacggtattgtttcctgggctcctaagtttttaagtgacagtctggatgtcggtggtaaggatatgggaaaactggcatcaatgggggggggttctgtttttgaaatcggtggtgtggctggtatgcttcttgccggatacctgtctgtcagactgttcagaaactcaaaaccattaacaaatactttatttctggcacttaccattattttattaatcgcgtactggtacgtgccatcaggcaatgaatatctctggctaaactatacaatccttattctgttggggctggcagtgtatggtccggtgatgtttattggtctttattcaatggagcttgttcctaaagaagctgccggagccgcatcagggctgtcaggcacattttcctatatcttcggctcaattgttgcgacactgggaatgggacttgttgtcgattatctgggatggggggccacatttatcgtactgatactgtctgctgtttttgccatcattttcacactgatgagtcgtgaacgctcactggagttcgaaaaagagtaa

SEQ ID NO: 55811 - protein, 467 aa, Shigella flexneri 2a str. 301
MRQLVISITEGLNMSLFTEPKEIERLPSEEIERLYPVLRYRVFISIFLGYMGYYFVRNTTSVLSGVLHMSATEIGIISCAGFLSYGISKFVSGLISDRSNSKVFLSLGLFLSGLVNFLIGYIPGIITSVTLFSTMYLLNGWIQGMGYPPGAKTLVFWYEHRERITWATLWNLSHNVGGALAPVLIGFSFGFFGDSALDHARAAFIFPGVLCMAMSVLIYFIQVDRPVSVGLPPIEEWKGNVVSHPAKGREQGPRLSIPDIIRKHIIRNNKLIYCCIYGSFVYILRYGIVSWAPKFLSDSLDVGGKDMGKLASMGGGSVFEIGGVAGMLLAGYLSVRLFRNSKPLTNTLFLALTIILLIAYWYVPSGNEYLWLNYTILILLGLAVYGPVMFIGLYSMELVPKEAAGAASGLSGTFSYIFGSIVATLGMGLVVDYLGWGATFIVLILSAVFAIIFTLMSRERSLEFEKE

SEQ ID NO: 55812 - DNA, 1437 bp, Haemophilus ducreyi 35000HP
  CDS (1)..(1437): transl_table=11
atgtttggtccatttaaaccatctcctcatattacggagttaccctcaaataaaatagatgcaagatataaattcttacgttggcaagtttttgcgggtatcttctttggctatgctgcttattattttgtacgtgctaatttcgatttagcacaaaaagggctaattgaagcaggcctttataataaagctgaactaggtattatcggaaccagtgccggtttagcatatggtttatcaaaatttgtgatggctggtatatcagatcgctctaatccaaaagtatttttgccgtttggtttgttgctttctgacttatgtatgaccatgatggggttaatgccttgggtaacttcgggcattgcggtaatatttattatgattttcttaaatggttggttccaaggtatgggttgcggtagaactatggtgcattggtggtctaaatctgaacgcggtactattgtgtctatttggaattgtgcacataatgtcggtggtatggtgccgggtgcgatggtgctattagcaagtgcaatttattttagtaatactggtgagcatgcaacggcgaaagatgtatggcaacaagcgctctattatccgggtattgctgcaatgattgccgctattcctgtatatttggtgatgaaagatacgccacaatcttgtggcttgccgccaatcgaaaaatggaaaaacgattacccagatgattatgatgaaaaaaccgctgagcaagatttaaccactaaagagatttttgttaattacgtattaaaaaataaattattgtggtatatcgctattgctaatgtgtttgtctatttaattcgttacggtattttgaaatggtctcctgtttatttaggtgaagtgaaacatttcaatataaaagggaccgcttgggcttatacaatttatgaattagccgctattcctggtactttattatgcggttggatatctgataaagtgttcaaaggtaaacgtggtttgactggttttattttcatgatcttaacgactatcgcggtaattgcattgtggaaaaatccggctacacctgaagcagaattagcacaatatgcaggtcgtcctttctatgataatccatatcaattaatggactttactttaatgactaccgttggtttcttaatctatggtcctgtaatgttaatcggtttacacgcccttgaattagcacctaaaaaagcagccggtacttcagcgggcttcacggggttatttggttatttaggcggtacggtttctgcatcagcggttgttggttgggctgcggaatactatggctgggatggcggtttctatgtaatgattacaggcggtatcttagctgtgttattgatgtttattgtgatggttgaagaaggcaaacataaagccaaattagaagaccattatggtaaataa

SEQ ID NO: 55813 - protein, 478 aa, Haemophilus ducreyi 35000HP
MFGPFKPSPHITELPSNKIDARYKFLRWQVFAGIFFGYAAYYFVRANFDLAQKGLIEAGLYNKAELGIIGTSAGLAYGLSKFVMAGISDRSNPKVFLPFGLLLSDLCMTMMGLMPWVTSGIAVIFIMIFLNGWFQGMGCGRTMVHWWSKSERGTIVSIWNCAHNVGGMVPGAMVLLASAIYFSNTGEHATAKDVWQQALYYPGIAAMIAAIPVYLVMKDTPQSCGLPPIEKWKNDYPDDYDEKTAEQDLTTKEIFVNYVLKNKLLWYIAIANVFVYLIRYGILKWSPVYLGEVKHFNIKGTAWAYTIYELAAIPGTLLCGWISDKVFKGKRGLTGFIFMILTTIAVIALWKNPATPEAELAQYAGRPFYDNPYQLMDFTLMTTVGFLIYGPVMLIGLHALELAPKKAAGTSAGFTGLFGYLGGTVSASAVVGWAAEYYGWDGGFYVMITGGILAVLLMFIVMVEEGKHKAKLEDHYGK

SEQ ID NO: 55814 - DNA, 1344 bp, Chromobacterium violaceum ATCC 12472
  CDS (1)..(1344): transl_table=11
atgatcagcctgttcaaacccgcgccacaccttcccccgctgcccgacgcgcagcagcacggcctgtaccgccggctgcgctggcagatcttcctcggcattttcatcggctacgccggctactacctggtccgcaagaatttctcgctggccatgccttatctggtagagcagggcttttcgcgcggcgacctcggcttcgcgatgtccggcgtcgccatcgcctacggcctgtccaagttcctgatgggcgcggtgtccgaccgctccaacccgcgcgtgttcctgtccgccggcttggtgctgtccgccgccgtgttcctgctgatgggcttcgcgccgtgggccacttccagcgtcggcgtcatgttcgtgctgctgttcctcaacggctggtttcagggcatgggctggccggcctgcggccgcaccatggtgcactggtggtcgcagaaggagcgcggcggtgtggtgtcgatctggaactgcgcgcacaacgtcggcggcggcctgatcggcccgctgttcatcctgggcatgggctggttcaacgactggcgcgccgccttctacgtgccggccgccgccgcgatcggcgtcgccgtcttcgcctggctgaccatgcgcgacacgccgcagtcttgcggcctgccgccggtggaggcttaccggaacgactacccggaagactacagcgacaagcatgagcaggagctgaccgcgcgcgaaatcttccgcaaatacatcctgcccaacaagctgctgtggtacatcgcgctggccaacgtcttcatctacctgctgcgctacggcgtgctggactgggcgccgacctatctgaaggaggtcaagcacttctcggtcgacaagtcgtcgtgggcctacttcctgtacgagtgggccggcattcccggcacgctgctatgcggctggatgtcggacaagctgttccgcggcaaccgcggcgccaccggcgtgttcttcatggcgctggtgaccctggccaccgtggtctactggctgaacccggccggcaaccccaccgtggacatgctggcgctgatcgccatcggcttcctgatctacggcccggtgatgctggtgggcctgcacgcgctggagctggcgcccaagaaggccgccggcaccgccgccggcttcaccggcctgttcggctacctgggcggctcggtggccgccaacgcggtggtgggctacaccgtcgaccatttcggctgggacggcggcttcgcgttgctgatcggctcctgcgtcgccgccatcgtgctgctggcgctgaccacctggcatggccatcaacagggcaagctggcttcggcttga

SEQ ID NO: 55815 - protein, 447 aa, Chromobacterium violaceum ATCC 12472
MISLFKPAPHLPPLPDAQQHGLYRRLRWQIFLGIFIGYAGYYLVRKNFSLAMPYLVEQGFSRGDLGFAMSGVAIAYGLSKFLMGAVSDRSNPRVFLSAGLVLSAAVFLLMGFAPWATSSVGVMFVLLFLNGWFQGMGWPACGRTMVHWWSQKERGGVVSIWNCAHNVGGGLIGPLFILGMGWFNDWRAAFYVPAAAAIGVAVFAWLTMRDTPQSCGLPPVEAYRNDYPEDYSDKHEQELTAREIFRKYILPNKLLWYIALANVFIYLLRYGVLDWAPTYLKEVKHFSVDKSSWAYFLYEWAGIPGTLLCGWMSDKLFRGNRGATGVFFMALVTLATVVYWLNPAGNPTVDMLALIAIGFLIYGPVMLVGLHALELAPKKAAGTAAGFTGLFGYLGGSVAANAVVGYTVDHFGWDGGFALLIGSCVAAIVLLALTTWHGHQQGKLASA

SEQ ID NO: 55816 - DNA, 1326 bp, Photorhabdus luminescens subsp. laumondii TTO1
  CDS (1)..(1326): transl_table=11
atgcaagccaccagtcaggaacagatttcacaacactatcgccgctggcgcagccgtttgctgatttccatgatcattggctatgccgcattttatctgacgcgaaaaagcttcaactttgtcatgccggttatgcagttggaactgggactggataaaggacacattggctggataaccactctgttctatctggcttacggcagctcaaaatttatttccggtgtatttcatgatcgcaccggctatcgctggtttatgggtgccggattagtgatgacaggtgtgttaaacattatcttcgctttctgttcatcattttctgccctgctgatcatttggacactgaacggcttctttcagggctggggatggcccccctgcgccagattgctgacacactggtactcccgcaatgagcgcggcttctggtggggatactggaatatctccatcaatattgttggcattactgtcccaatgctgtccgcttttctggcgacaacttatagctggcaaacagcgctgatgatgccgggaattatcggcattttattaggcatctggctttgctatcagttatgtggcaccccacaacagcacggtttgcccagtgtaggacagtggcgacaggattcactggagcttcgacatgaacagctatcgcaccccatgccgatgatgcagatactgcgggataccatcttaactaacagaactatctggttgctaggatgctcctacattctggtttatctcatcagaatggcgattaacgattggggaaacctgtggttgtcagaaacacatggtgccaatctgctcagcgctaatgcgacgctctcactgtttgaactcggtggtttaaccggtgcgctattttccggttggggatctgatttactgttccgcggccaacgcgccccaatgattctgctgtttgctcttgggctatttatggctgtcaccgcattgtggctcactcccattcatcactacacgctgttggcagtctgttttttcagtatcggtttttttgtatttggcccgcaaatgctgattgggctggctgcaacagaatattgccataaacaagccgccggcaccgtcacgggttatctaggattgtacgcctatttgggcgcagcaatcgcaggctggccgctaagtcaggtggttgcccactacggctggtccgggatgtttgccctactcaccgccgcagccgccatgatgggtttgctgttgatgccaatgttaatggcagacgtgagtaaaagggaacatggagtagcatcgcgactttccaataataagcagttttga

SEQ ID NO: 55817 - protein, 441 aa, Photorhabdus luminescens subsp. laumondii TTO1
MQATSQEQISQHYRRWRSRLLISMIIGYAAFYLTRKSFNFVMPVMQLELGLDKGHIGWITTLFYLAYGSSKFISGVFHDRTGYRWFMGAGLVMTGVLNIIFAFCSSFSALLIIWTLNGFFQGWGWPPCARLLTHWYSRNERGFWWGYWNISINIVGITVPMLSAFLATTYSWQTALMMPGIIGILLGIWLCYQLCGTPQQHGLPSVGQWRQDSLELRHEQLSHPMPMMQILRDTILTNRTIWLLGCSYILVYLIRMAINDWGNLWLSETHGANLLSANATLSLFELGGLTGALFSGWGSDLLFRGQRAPMILLFALGLFMAVTALWLTPIHHYTLLAVCFFSIGFFVFGPQMLIGLAATEYCHKQAAGTVTGYLGLYAYLGAAIAGWPLSQVVAHYGWSGMFALLTAAAAMMGLLLMPMLMADVSKREHGVASRLSNNKQF

SEQ ID NO: 55818 - DNA, 1353 bp, Photorhabdus luminescens subsp. laumondii TTO1
  CDS (1)..(1353): transl_table=11
atgttaagtattttcaagccggcacctcataggtcccggctgtcaacagaacaggtagatccagtctatcgtcgcttacgttggcaaatttttatggggatcttctttggttatgcagcttactatctggtaagaaaaaactttgcacttgcaatgccttatctggttgagcaaggtttttccaaaggtgagctcggtttcgcactatcagggatctctatcgcatacggcttctccaaattcatcatgggctccgtatccgaccgttctaacccacgagtcttcttacctgcgggtctgatcctcgcggctcttgttatgctgtttatgggtttcgtaccctgggcaacgtccagtatcactatcatgtttgttctgctgttcttatgtggttggttccaggggatgggttggcctccttgtggtcgtaccatggtgcactggtggtcacagaaagaacgcggcggtatcgtttctatctggaactgctcacataatgtgggtggtggtttaccaccattgctatttctgttgggcatggcgtggttcaatgactggaaagccgcactttacatgccggctttcgccgccattctcgttgcattgattgtctttgccctgatacgtgacacaccgcaatcctgtggcttgccaccaatcgaagagtataaaaatgactatccttctgattatacagagaaagatgaaaatgagttaaccgctaaacagattttcatgcaatacgtgttaccgaacaaactgctgtggatggttgctatggctaacgtattcatttatctgttacgttacggtattcttgactggtcaccaacctatctgcgtgaagccaagcatttcgcactagataaatcttcatgggcttatttcctgtacgaatatgccggtatcccaggcacgctactatgtggttggatgtcagacaaaatatttaaaggtaaccgtggtgcaaccggtgtgttctttatgacgctggttactatcgcaactatcgtattctggttgaacccaccaggtaaccctactgtagatatggcttgtatgttgattattggcttccttatctacggcccagtgatgctgactggtttacatgcccttgagctagctccaaagaaagccgcgggtacagccgccggctttaccggcttatttggttacttaggtggctctgttgctgcaagtgctatcatcggctacaccgttgactttttcggttgggacagcggctttatggtaatgattggtggtagtatcttgtccgttattctattgctaatcgttatgattaccgaaaaaaaacataaacaggaaatagcccaccaatatggctaa

SEQ ID NO: 55819 - protein, 450 aa, Photorhabdus luminescens subsp. laumondii TTO1
MLSIFKPAPHRSRLSTEQVDPVYRRLRWQIFMGIFFGYAAYYLVRKNFALAMPYLVEQGFSKGELGFALSGISIAYGFSKFIMGSVSDRSNPRVFLPAGLILAALVMLFMGFVPWATSSITIMFVLLFLCGWFQGMGWPPCGRTMVHWWSQKERGGIVSIWNCSHNVGGGLPPLLFLLGMAWFNDWKAALYMPAFAAILVALIVFALIRDTPQSCGLPPIEEYKNDYPSDYTEKDENELTAKQIFMQYVLPNKLLWMVAMANVFIYLLRYGILDWSPTYLREAKHFALDKSSWAYFLYEYAGIPGTLLCGWMSDKIFKGNRGATGVFFMTLVTIATIVFWLNPPGNPTVDMACMLIIGFLIYGPVMLTGLHALELAPKKAAGTAAGFTGLFGYLGGSVAASAIIGYTVDFFGWDSGFMVMIGGSILSVILLLIVMITEKKHKQEIAHQYG

SEQ ID NO: 55820 - DNA, 1380 bp, Vibrio vulnificus YJ016
  CDS (1)..(1380): transl_table=11
atgcttaatttctttaaaactcgtccggatgtgccgttatcagacagctccaacgagggaatgctaaagcgctacaagagctaccaatggcaggtattcttaggccttatttttggttacgccgtcttttacgtagtacgtatgagtttgggtgttgtgaaaaagcccatgctcgatgcgggcatcgtgaccatcgaagaactcggtatcatgggttcggcgttcttcttcacttacgccttcggtaagttcttaaacggcttcctatctgactacgccaacattggccgctttatgtcgtgttccctactggtatcgggtgtactctcggtcgtgatggggatgaacaccgttggcttcttcttcgttctgctttggggcttaaacggttggttccaatcagtgggttcagcaccttcatgtgtatcgctttaccaatggttctcaccaaaacagcgtggtagccgttactccatttggggcggttcacgtaacatcggtgaaggtatcacttggatcctgacggcgacactagtgagctacttcggctggcgtgcaggtttcattggcgcgggtatcgctgcagtagttgctgcactgatcatgctgaaagtactgaaagaccgtccacaaacttacggcttgccagatccaggcacagcgtttggcgaaggtaccgaaatcaagaaagcgaacgacccaaaagaaacacgtcgtgcgcagatgtttatcctaaaacaacctgtggtatggcttattgccctgtcttgtgcggcaatgtacatctctcgctacgcaatgtcttcttgggcggtattgttcctacaagaaacaaaaggttactcactgattgacgcaggttttgccatgtcaatgtacccaacagccggtctagcgggtgcgattctgtcaggtatcctttcagacaaagtgttcaaaggtaaccgtaacatccctaacctactgtacggattggcaaacattgccggtatgtgtttgatgttctttggcccagataaccgtgttatcgacgcagtggcactgagcatgatcggcttctctatcggtggtctagtggtattcctcgcgggtctgattgcttgtgacctgatgccgaaaaacgcggttggtgcggtaaaaggtttgatcggtctgtgttcttacattgcagcgtcagctcaagagcttatctctgcatctctgatcaccatcactgaagtcgatggcgtaaaacactacgactttggtaacgctcagtacttctggcttgccgctggtgtggtatcagtactactcgcactgacggtatggaacgcgaagaaagtggtcgatatcgacgaagaacaagacaaaaagctacaaacacgcacagcttcttaa

SEQ ID NO: 55821 - protein, 459 aa, Vibrio vulnificus YJ016
MLNFFKTRPDVPLSDSSNEGMLKRYKSYQWQVFLGLIFGYAVFYVVRMSLGVVKKPMLDAGIVTIEELGIMGSAFFFTYAFGKFLNGFLSDYANIGRFMSCSLLVSGVLSVVMGMNTVGFFFVLLWGLNGWFQSVGSAPSCVSLYQWFSPKQRGSRYSIWGGSRNIGEGITWILTATLVSYFGWRAGFIGAGIAAVVAALIMLKVLKDRPQTYGLPDPGTAFGEGTEIKKANDPKETRRAQMFILKQPVVWLIALSCAAMYISRYAMSSWAVLFLQETKGYSLIDAGFAMSMYPTAGLAGAILSGILSDKVFKGNRNIPNLLYGLANIAGMCLMFFGPDNRVIDAVALSMIGFSIGGLVVFLAGLIACDLMPKNAVGAVKGLIGLCSYIAASAQELISASLITITEVDGVKHYDFGNAQYFWLAAGVVSVLLALTVWNAKKVVDIDEEQDKKLQTRTAS

SEQ ID NO: 55822 - DNA, 1377 bp, Vibrio vulnificus YJ016
  CDS (1)..(1377): transl_table=11
atgtttggtatattcaaacctaaggcgcatatcgatcgcgtttccagcgactcgctcgacagcacctactcacgtctacgctggcaattgttcatcggtattttcgtcggctacgctggctactaccttgtccgtaagaactttagtttggcgatgccctacctgattgagcaaggctttagccgtggcgatcttggtgtggctttggccgccgtctccattgcttatggtctgtctaagtttctaatgggcagcgtctctgaccgttctgatcctcgctatttcttaagtgcgggtttggtgatgtcttccttggtcatgttctgcttcggctttatgccatgggcaactggcagcatcacggcaatgtttatcttgctgttcctcaacggatggttccaaggtatgggttggcctgcgtgtgggcgcaccatggtgcactggtggtcacgtaaagagcgtggtgagatcgtttcagtgtggaacgtggcacacaacgtcggtggtggcttgattggtcctatcttcctatttggtttgtggatgtttaatgatgactggcgcactgcgttttatgtgccggcatttttcgccatgatcgtcgcagtattcatctggctcaccgtgcgtgatactccacaatcctgtggcctaccgccaattgaagagtacaaaaacgactacccagatgattacaacacgtctcatgaaacagagatgaccgcaaaagaaattttctttaagtatgtattttcaaacaaacttttgtggtcgatagctattgctaatgctttcgtttatttgattcgttacggtgtattggactgggcgccagtgtacttaaaagaagcgaaagagttcacggtagataaatcatcttgggcttacttcctatacgaatgggcgggtattccaggcacgctattgtgtggttggatttcagataaactgttcaaaggccgccgcgcaccagctggcatcctatttatgttccttgtcactctggcggttcttgtttactggtttaacccagcgggcaacccaggtattgatatggcggcgctggtagcaatcggcttcctgatctacggtcctgtcatgcttatcggcctttatgcgcttgagcttgctccgaagaaagcggcaggtacagcagcaggtttgactggtctatttggttacctagggggcgccgtggcagccaacgcagtattaggttacaccgtagaccatttcggctgggatggcggcttcattattctggttggttcttgtatcacttctatcgtttgtttgacttacgcattgctgggtgaaaaagcccatcatgatgccaaacagaaagagaaggaaaaagaacaagaagccatcgcgtaa

SEQ ID NO: 55823 - protein, 458 aa, Vibrio vulnificus YJ016
MFGIFKPKAHIDRVSSDSLDSTYSRLRWQLFIGIFVGYAGYYLVRKNFSLAMPYLIEQGFSRGDLGVALAAVSIAYGLSKFLMGSVSDRSDPRYFLSAGLVMSSLVMFCFGFMPWATGSITAMFILLFLNGWFQGMGWPACGRTMVHWWSRKERGEIVSVWNVAHNVGGGLIGPIFLFGLWMFNDDWRTAFYVPAFFAMIVAVFIWLTVRDTPQSCGLPPIEEYKNDYPDDYNTSHETEMTAKEIFFKYVFSNKLLWSIAIANAFVYLIRYGVLDWAPVYLKEAKEFTVDKSSWAYFLYEWAGIPGTLLCGWISDKLFKGRRAPAGILFMFLVTLAVLVYWFNPAGNPGIDMAALVAIGFLIYGPVMLIGLYALELAPKKAAGTAAGLTGLFGYLGGAVAANAVLGYTVDHFGWDGGFIILVGSCITSIVCLTYALLGEKAHHDAKQKEKEKEQEAIA

SEQ ID NO: 55824 - DNA, 1428 bp, Vibrio vulnificus YJ016
  CDS (1)..(1428): transl_table=11
gtgtacgacacaatgacaagagagttcacaatgttaaaattccttgaacaagtgcggaagccgaccctcgaccttccagtcgaagtaagacgcaaaatgtggtttaagccgtttatccaatcttaccttgtggtatttattggttacttgaccatgtacttgatccgtaaaaacttcaacgtcgcgcaaaacgatatgatctccacttacggtttaagcatgaccgatttgggtctgattggtcttggtttttcgattacttacggtatcggtaaaaccgtcgtttcctactacgctgacggcaaaaacactaagcagtttctccctttcatgctgatcctttctggtcttgccatgcttggtttcagcttcagcatgggcggtggcagcgccagcttgttcttgatggtggcgttctacgcactcagtggtttcttccaaagtacgggtggcccttctagttactcaaccatcacgaagtggacaccacgcaacaaacgtggttcttacctaggtctttggaacatgtcgcacaacgtgggtggtgccggtgcggctggtgttgccctgttcggtgctaactacctattcgatggccacgttattggtatgtttgtcttcccttctatcatcgccatcatcgttggtttcatcggcatgcgctttggtagtgactcacctgaggcttatggcctaggtaaagttgaagaactttttgatgaagccgtcagcgaagaagatactgcagctgaagaaaatcaaatgaccaagaaagagatctttgttgagtatgtactgaaaaacaaagtgatctggctactttgctttgccaacatcttcctttacatcgtgcgtatcggtatcgaccaatggtcaacggtttacgcgtaccaagaacttggtctatcaaaagaagcggcaatctccggttttaccctattcgaagtgggcgcactcgtcggtacgctaatgtggggttacctttctgacttggcgaacggtcgtcgtgctttagtggcgtgtgtgtctcttgctttgatcatcgtatcccttgagttctaccaacacgcaacaagcgaattcatgtacttagcatcgctatttgttcttggtttcctcgtgtttggtcctcaattgcttatcggtgttgctgcagttggctttgttccgaagaaagccatcagtgtggcggatggtgtaaaaggcactttcgcttacctaatcggtgacagctttgccaaacttggtcttggtatgattgcagacggtacaccaatctttggtttgaccggttggaaaggcaccttcgcggcactggatacctcagcgatgatttgtattgtccttcttgccttcgttgctatcgcagaagagaaaaagattcgacataacaagaagaaacttgaactcgcggccagccagtcttaa

SEQ ID NO: 55825 - protein, 475 aa, Vibrio vulnificus YJ016
MYDTMTREFTMLKFLEQVRKPTLDLPVEVRRKMWFKPFIQSYLVVFIGYLTMYLIRKNFNVAQNDMISTYGLSMTDLGLIGLGFSITYGIGKTVVSYYADGKNTKQFLPFMLILSGLAMLGFSFSMGGGSASLFLMVAFYALSGFFQSTGGPSSYSTITKWTPRNKRGSYLGLWNMSHNVGGAGAAGVALFGANYLFDGHVIGMFVFPSIIAIIVGFIGMRFGSDSPEAYGLGKVEELFDEAVSEEDTAAEENQMTKKEIFVEYVLKNKVIWLLCFANIFLYIVRIGIDQWSTVYAYQELGLSKEAAISGFTLFEVGALVGTLMWGYLSDLANGRRALVACVSLALIIVSLEFYQHATSEFMYLASLFVLGFLVFGPQLLIGVAAVGFVPKKAISVADGVKGTFAYLIGDSFAKLGLGMIADGTPIFGLTGWKGTFAALDTSAMICIVLLAFVAIAEEKKIRHNKKKLELAASQS

SEQ ID NO: 55826 - DNA, 1341 bp, Vibrio vulnificus YJ016
  CDS (1)..(1341): transl_table=11
atgtttggactgtttcaatctccgagctacacacaagctcccttggacaaaagccaagttgatgaacgttatcgttactggcgactgcatatcatgatcggcatgtacattgggtacgcgggcttttatttcactcgcaaaaccttcaactacgccgcgcctgccatgattgttgatttgggtttagacaaaggcgatctcggtttaatcggcacgcttttctacatcacctatggcctatcgaagtttatctccgggacgatttctgaccgctctaatccacgttattttatgggtgtgggcctcatcgcctcagggattatcaatatcgtgtttggtttttccagctcactgattgcgctttccatcttgtgggtgctcaacgcttggttccaaggttggggatggccttcttgttccaaactcctcaccacctggtattcgcgttcagaacgcggctttttgtgggcaatttggaacaccgcccacaacgtgggtggcgcactgatcccattattggtcggctacctcacttttcatttcagttggcgtgaaggctttattgttcccggcattatcggcgtgttgcttggccttattgtttgctggcgattaagagacaaacccaccactcaggggctgcccaccgtcggtcagtggcgccatgacccgctcgaactggctcaagagaaacatggccaaggactaagctatcgcgaaattctcacgcactatgttttcaacaacaaatacatttggttactcgcttttagctatgtactggtttacatcgtgcgcaccgcaatcaatgactggggcaatctctaccttaccgagcaacaccattactctctgatcaacgccaacgcagcgctgtcgatgttcgagatcggtggctttgttggttctctcgtagcaggttggggctcggataaactgttcggtggtaaccgtggtccgatgaatctgctatttgccgctggtattttcttgtctgttgctgcgctgtggttaatgccgttaaccaactttgcctttcaagcggcggggttattctctattggcttcttcgtgtttggcccacaaatgcttatcggcatggcagccgctgagtgttctcacaaagattcagctggcgcagccacggggtttgttggtctgtttgcctacatgggcgcggcgttgtctggctacccacttgcactgattttggaagaatacagctggaccggtttcttcgtcaccatctctatctgtgcggcggtgatcggcttactgttgctgccctttcttcaagctcaaccgtctcgtaaaccactggcccccaaacttcgcttatag

SEQ ID NO: 55827 - protein, 446 aa, Vibrio vulnificus YJ016
MFGLFQSPSYTQAPLDKSQVDERYRYWRLHIMIGMYIGYAGFYFTRKTFNYAAPAMIVDLGLDKGDLGLIGTLFYITYGLSKFISGTISDRSNPRYFMGVGLIASGIINIVFGFSSSLIALSILWVLNAWFQGWGWPSCSKLLTTWYSRSERGFLWAIWNTAHNVGGALIPLLVGYLTFHFSWREGFIVPGIIGVLLGLIVCWRLRDKPTTQGLPTVGQWRHDPLELAQEKHGQGLSYREILTHYVFNNKYIWLLAFSYVLVYIVRTAINDWGNLYLTEQHHYSLINANAALSMFEIGGFVGSLVAGWGSDKLFGGNRGPMNLLFAAGIFLSVAALWLMPLTNFAFQAAGLFSIGFFVFGPQMLIGMAAAECSHKDSAGAATGFVGLFAYMGAALSGYPLALILEEYSWTGFFVTISICAAVIGLLLLPFLQAQPSRKPLAPKLRL

SEQ ID NO: 55828 - DNA, 1371 bp, Corynebacterium diphtheriae NCTC 13129
  CDS (1)..(1371): transl_table=11
atgtttgcttggttgcaagcccccggccctgctgccccgctgtcggcggagcaggtggatcgcacctacccacggatgcgtctgcaggtgttcatgggtattttcttgggctatgcgggtttttatttgatccgtaataatatttcggcgattgccccgttgcttattgatgaaagtggtgcgattgataagccggcgatcggcattattggtaatgctgtgttggtcagctatggcctgtctaagttctttagtgccatggtgtcggatcgttctaatgctcgctatttcttgccgctgggcttggcactgtcggcgctgatgaacttggtagttgcgtttgtgccgtgggtttcggccagcgtgggcgtgttcgctacggtgatgttccttaatggttggttccaaggcatgggttaccctccttgtggccgtattgtggtgcagtggttctctactagtgagcgcggttggaagggttcgttgtggaacacttctcacaacttgggtgcttttggtttgccagtgttggtcggtattggtttgagcatgacgggcgagaattggcgtgctgcttactggcttcctgcgttggttgctttggttgtcgcgttggttgcgttcttgcttattcgtgataatcctcagtctgttggtttgccgcctatcgacgactaccgcaacgatcctgcgaaggttgcggaggatacgggcgagaagatttcgacgaaggatttggtgttcaagcatattttgcacagccgcatcattatgctgttggccattgcgaatgtgtttgtttatgccttgcgttatggtgttttgcactggattaccacgtacttgtctgagcagcaccacatgagcattggtagcggtctgattggttttgctgctttcgagttggctggctttattggcacggttttgtgcggttggttgtcggacaatgtgtttaagggcaatcgttctgctgctatttcgttgttcaccttgggcgctggtttgtctatcgctgcatactggttggctcctgtgggtacgccgttctggttgatggttattttcgttgcctttattggtggttttatctacggtcctgttggcttgatcggtttgcaggcattggatctttcacctcgtaacgtggctggtaccgctgctggcttcacgggcttgttcggttacctgctgggtgcaaccttggcttcgactggtgtgggcttcttggttaagttcgctggttggaatgtcacgttcattgtgttcttggtctttacggttttgattctggttattttccaggtgatctggcgcgaggagaagaagttgatgcaggagcgtgctttgaagctcgagcagggtgtttag

SEQ ID NO: 55829 - protein, 456 aa, Corynebacterium diphtheriae NCTC 13129
MFAWLQAPGPAAPLSAEQVDRTYPRMRLQVFMGIFLGYAGFYLIRNNISAIAPLLIDESGAIDKPAIGIIGNAVLVSYGLSKFFSAMVSDRSNARYFLPLGLALSALMNLVVAFVPWVSASVGVFATVMFLNGWFQGMGYPPCGRIVVQWFSTSERGWKGSLWNTSHNLGAFGLPVLVGIGLSMTGENWRAAYWLPALVALVVALVAFLLIRDNPQSVGLPPIDDYRNDPAKVAEDTGEKISTKDLVFKHILHSRIIMLLAIANVFVYALRYGVLHWITTYLSEQHHMSIGSGLIGFAAFELAGFIGTVLCGWLSDNVFKGNRSAAISLFTLGAGLSIAAYWLAPVGTPFWLMVIFVAFIGGFIYGPVGLIGLQALDLSPRNVAGTAAGFTGLFGYLLGATLASTGVGFLVKFAGWNVTFIVFLVFTVLILVIFQVIWREEKKLMQERALKLEQGV

SEQ ID NO: 55830 - DNA, 1410 bp, Corynebacterium diphtheriae NCTC 13129
  CDS (1)..(1410): transl_table=11
atgttcagtgtgttcgatctcaagaaaatccctaacaaaggaataccactcgagcaacaacgcaagatgtggctgggacagttcctcaaggcgttcttcgtcgtgttcttcgtgtacatgtcgatgtacttcatcaggaacaacttcaaagccgcacagccgatgctcaaagaagacttcggcctcaccaccctccaactgggctacatcggcctcgccttctccatcacctacggcattggcaaaaccttggtcggctacttcgtagacggccacaactccaagcgcatcatctccactctgctgatctgcgcctccaccatggttctcctcatgggcctgctcctgagttacttcggctcagtcatcggcatcttcatcgtcttgtggggccttaacggtctattccaatccgctggcggccccgcctcctattcgacgatttctcgctgggcaccccgaaccaaacgcggcaaatacctaggcctatggaacgcctcccacaacgtcggtggcgcactcgccggtggcctagctctctggggcgctaacgtattcttcggcggcaacgtcgtcggcatgttcatcttcccagcactgatcggcctcaccatcggtatcatcggcctcttcgtcggcaaagacgaccccgaagaactgggctggaaccgcagcgaggaaatcttcggcgaagctgtggaagcagaaaactcccaggcagaaaccatgccccagcgcgaaatcttccttaactacgtgctgaaaaacccctggctgtggacactctgtatcgccaacgtcttcgtctacatcgtccgcattggtatcgacaactgggcaccgctctacgtcaccgaggaactccactttgacaagggcgacgccgtaaacaccatcttctacttcgagatcggcgcactggtggccagcctgctatggggctacgtctccgacctgctcaaaggccgccgcgccatcgtggcaatcggctgcctgttcatgatctacttcgccgtcatgctctaccgcaacgccagcagcgtcaccatggtgaacctctcgctgttcatcttgggcgcactgatcttcggcccccagctactcatcggtgtctcgctcgtcggcttcgtgcctaagcgcgcaatcagcgtggctaacggcatgaccggtactttcggctacctctttggcgactccatggccaaagtcggcctcgccgccatcgcagaccccgagcaaaaaggcctcaccgtcttcggacacctcctccacggatggggtgctgtctttaccgtcttctacttcgcactgaccatcggcatcgtattgctcatgatcgtcgccgtgggtgaagaacgccgcatccgcaagctccaagcagcagaggcggtaggcaaggcactcgcctag

SEQ ID NO: 55831 - protein, 469 aa, Corynebacterium diphtheriae NCTC 13129
MFSVFDLKKIPNKGIPLEQQRKMWLGQFLKAFFVVFFVYMSMYFIRNNFKAAQPMLKEDFGLTTLQLGYIGLAFSITYGIGKTLVGYFVDGHNSKRIISTLLICASTMVLLMGLLLSYFGSVIGIFIVLWGLNGLFQSAGGPASYSTISRWAPRTKRGKYLGLWNASHNVGGALAGGLALWGANVFFGGNVVGMFIFPALIGLTIGIIGLFVGKDDPEELGWNRSEEIFGEAVEAENSQAETMPQREIFLNYVLKNPWLWTLCIANVFVYIVRIGIDNWAPLYVTEELHFDKGDAVNTIFYFEIGALVASLLWGYVSDLLKGRRAIVAIGCLFMIYFAVMLYRNASSVTMVNLSLFILGALIFGPQLLIGVSLVGFVPKRAISVANGMTGTFGYLFGDSMAKVGLAAIADPEQKGLTVFGHLLHGWGAVFTVFYFALTIGIVLLMIVAVGEERRIRKLQAAEAVGKALA

SEQ ID NO: 55832 - DNA, 1362 bp, Danio rerio
  CDS (1)..(1362)
atgggagcagcaggttacggatattatcgcaccgttatattcatctccatgtttgcgggatacatgctttactacttcaaccggaagactttttcctttctgatgccatccgtgatggaggagattgagctggataaagaagagcttggactgatcaccagcagtcagactctggcctacgctatcagtaagttcatcagcggagtgctttcagaccggatcagcgctcgctggctcttctccatcggcctcttcattgttggtaccataaacatcgccttctcctgctcctccacggtcatgctgttcaccgtgctttggttcgtgaatggattcggtcagggctacggctggccaccgtgtggaaaggtgctccggaagtggtttgaaccgtcccagtttgggacgtggtgggccatcctatgctgcagtatgaatctggcaggtagtctgggccccatcatcactacagtgctggtccagtattatgactggagggtcatcatgtccgtgtctgggctgatctgcatggccgtcgctgttgtttgccttctgatggtcaaaaacgagcccagtgacgtcgggctgcccagcattcagcctggagctaaaaagggcaaggggaagaagggaggccctaatgatgaaagcagtctgaaggatttcctgctgtctccttacctgtgggttctgtctgccggatacctggttgtgtttggggtaaagatcgcctgcactgactggggtcagctgttcctcatgcaggagaaaggccagtctgccatgatgggcagctcgtacatgagtgcgctggaagttggtgggttttttggcagcattggagctggttatctgtctgacagggctgttgctaggcaagggctgggtgtttatggcaatcctcgtcatgggctgctcctgatgatgatggcagggatggctgtgtccatgtacctcttccgggttaccatcacaccagaaaccccagaggaagcaccgctgtgggttctggctctacatccagtttcagtcctcactggtgtctcggagaaagagctatggattctgattcttggtgctgcatttggattttcctcatacggaccaatcgccttgttcggagtgattgcgagtgaaagcgccccatccaacttctgcgggacgtcccacgccattgtagctctgatggcaaatgttggtgcattcattgccggcctgccattcagtaccattgccaaacgctacagctgggacacagcattctgggtagcagaggtctcctgcgccataaccacagtttgtttcttcttcgtccgtaacgtgcgcacaaaaatgggccatgtgcctaaaaagatggactaa

SEQ ID NO: 55833 - protein, 453 aa, Danio rerio
MGAAGYGYYRTVIFISMFAGYMLYYFNRKTFSFLMPSVMEEIELDKEELGLITSSQTLAYAISKFISGVLSDRISARWLFSIGLFIVGTINIAFSCSSTVMLFTVLWFVNGFGQGYGWPPCGKVLRKWFEPSQFGTWWAILCCSMNLAGSLGPIITTVLVQYYDWRVIMSVSGLICMAVAVVCLLMVKNEPSDVGLPSIQPGAKKGKGKKGGPNDESSLKDFLLSPYLWVLSAGYLVVFGVKIACTDWGQLFLMQEKGQSAMMGSSYMSALEVGGFFGSIGAGYLSDRAVARQGLGVYGNPRHGLLLMMMAGMAVSMYLFRVTITPETPEEAPLWVLALHPVSVLTGVSEKELWILILGAAFGFSSYGPIALFGVIASESAPSNFCGTSHAIVALMANVGAFIAGLPFSTIAKRYSWDTAFWVAEVSCAITTVCFFFVRNVRTKMGHVPKKMD

SEQ ID NO: 55834 - DNA, 1191 bp, Wolbachia endosymbiont of Drosophila melanogaster
  CDS (1)..(1191): transl_table=11
gtgaactttgtcttctttcaatatttactattcttctgtggatatatgctgctttatttatcaagacaaagtataccaattgctctaccactgttaatagatactgaccatgtaaaattaagctatttttttgcctgcttttcttttttttatggagtatcaaaatttgttaatggaataatcatggactccaaaaataatccattatttatgtttgggctatgcaatattgcaactggattattaaccattggtataactttatcatataataatctaactttattactgttaacattaatattattagcttggacacaagggttaggttggccagctattaccaagtttatggttacaaactctagcatctcttcaattgcatcatcatggggagttatgagcgcatctcagcaacttggttcttgtattactttaattgtattaccaagtataattaaaatatataatgcaaaaagtgcatttttgtactctggtttcttatgcttactttttggaatttatataatattaaaggcatattacaaagaaagtgccaactttactacctattataaggtgcagaaatctcaaataggtatcaaggtaacaagttccatatggtttctatgttgtgctactttttgtgcttatattataaaaatgggaatcttcttttggtttcctataattttaaagaataaattacaaatttctcttgtacaatcctcactaataacaggcgtatatgatttaggtggaatccttggaactttaataacaggaagaattagtgatatgtacttctttcaaaatagaagcttgctggcatcactttatatgttgggtatagcactcacttttattgcaatgaactttggtcaaaacataattcttatgaacctttgtgcaatcttatcaggattctttatatttggagtgcaagtactgacaggtgttatagctgtagaaattgctccacaaaataatgtatgtgcaattgtaagcttaacaggattatttgggtatattgcaagttcaatattttcatgcgtgctcttaggagtacttgttaagcactgtggtaacagtattatgttttcatttttttccatttgctctgttgttgcactcgtttgcttttccatactatcaagcaaagatctaaaaaaactaagtaaagcggtgtaa

SEQ ID NO: 55835 - protein, 396 aa, Wolbachia endosymbiont of Drosophila melanogaster
MNFVFFQYLLFFCGYMLLYLSRQSIPIALPLLIDTDHVKLSYFFACFSFFYGVSKFVNGIIMDSKNNPLFMFGLCNIATGLLTIGITLSYNNLTLLLLTLILLAWTQGLGWPAITKFMVTNSSISSIASSWGVMSASQQLGSCITLIVLPSIIKIYNAKSAFLYSGFLCLLFGIYIILKAYYKESANFTTYYKVQKSQIGIKVTSSIWFLCCATFCAYIIKMGIFFWFPIILKNKLQISLVQSSLITGVYDLGGILGTLITGRISDMYFFQNRSLLASLYMLGIALTFIAMNFGQNIILMNLCAILSGFFIFGVQVLTGVIAVEIAPQNNVCAIVSLTGLFGYIASSIFSCVLLGVLVKHCGNSIMFSFFSICSVVALVCFSILSSKDLKKLSKAV

SEQ ID NO: 55836 - DNA, 1350 bp, Bacillus cereus ATCC 10987
  CDS (1)..(1350): transl_table=11
atgtttttcacacaattctttaaacctgcgccccacgtggaacgcttaccagctgatcgcgttgatagtgaataccgtaaattacgtttacaagtatttttaggtatcttcatcggctatgcaggttattactttgttcgaaaaaacttttcactagcaatgccatacttaattgaacaaggctttagtaaaggggagcttggggttatcctttcagcagtttctatcgcttacggattaagtaaatttcttatgggtatcgtatccgatcgttgtaatcctcgctactttttagcagctgggctatttttatcaggtatcattaatattgttttcggctcattttctttcattacaacgagcattatacttatgtttgtacttcagtttttaaatggatgggtacaagggatgggatggcctccttgtggtcgtacaatggttcactggttctctattagtgaacgtggtacaaaaatgtctatttggaacgtcgctcataatgtcggtggcgcacttatgccttcccttgtaacattagggttatatttctttgcaaatgattggaaaagtattttttacttcccaggtattctttcaattttagttggtatttatgtattaattacgatgagagatacacctcaatcttgtggattaccttctattgaagaacatactggagaatatccaccagatgaaaaagtacaagatcgcgaacgcgaactttcggtaaaagaaattttatttacatacgtactaaacaataaatttttatggtacatcgcgattgcgaacgttttcgtatatttcgtacgttacggtgttgtagactgggctcctacttatttagtagaagaaaaaagctttactcatagtagttcacgtacagcttacgctctatatgaatgggctggtattccaggtacacttctttgcggctggatgagtgataaactattcaaaggacgccgcgcacctgctggtattttatttatggttggtgtatttatcgccgttcttgtttactggctaaaccctcctggtaatccaatggttgatagtatcgcacttgtcgcaattggatttttaatttacggaccggttatgttaattggtctacacgctcttgacttagcaccaaagaaagctgctggaactgcagcgggcttaactggcttcttcggttacttaggcggagcagctttcgctagtgctgctatgggctttatcgtcgatgcatttggatgggatggcggattcatcttgttacttgcatcttgtgtacttgcaatgttcttccttgctcttactttaaagacaggatctccaaaacaaaagcaagcttaa

SEQ ID NO: 55837 - protein, 449 aa, Bacillus cereus ATCC 10987
MFFTQFFKPAPHVERLPADRVDSEYRKLRLQVFLGIFIGYAGYYFVRKNFSLAMPYLIEQGFSKGELGVILSAVSIAYGLSKFLMGIVSDRCNPRYFLAAGLFLSGIINIVFGSFSFITTSIILMFVLQFLNGWVQGMGWPPCGRTMVHWFSISERGTKMSIWNVAHNVGGALMPSLVTLGLYFFANDWKSIFYFPGILSILVGIYVLITMRDTPQSCGLPSIEEHTGEYPPDEKVQDRERELSVKEILFTYVLNNKFLWYIAIANVFVYFVRYGVVDWAPTYLVEEKSFTHSSSRTAYALYEWAGIPGTLLCGWMSDKLFKGRRAPAGILFMVGVFIAVLVYWLNPPGNPMVDSIALVAIGFLIYGPVMLIGLHALDLAPKKAAGTAAGLTGFFGYLGGAAFASAAMGFIVDAFGWDGGFILLLASCVLAMFFLALTLKTGSPKQKQA

SEQ ID NO: 55838 - DNA, 1335 bp, Bacillus cereus ATCC 10987
  CDS (1)..(1335): transl_table=11
atgtttaaatggctcaagccagcacctgcaattgaaagattgcctgcggatatgatcgaccgtgtatatcgattactacgtattcgtgtgttaatcggaatttcagttggatatgctgcttattatttagttcgtagtaactttacgttatcaagtacgtatttagtacaagaatatggttttagtacagctcaaattggtctactaggttcagtaatggcaattgtttatggatttagtaagttctttatggggaatttatcagataaagctttcgcccagcgctttatcgcggtcggtttatttttatcagggcttgtaaatatttgcttcggttttgcatcttcatttgggatgattgttacattacttgttgtgaacggtattgtacaaggtatgggtgcacctccttgtagtatcgttatgacgaaatggttttcaaagaaagaacgtggtacgaaaacaggtctttggaatatttcacataacgttggtggaatgcttgtaccaccacttgtcggaattggtgtaggtatttttggtgaaaatcattggcaaggcggtgtgtttattttcccagcgattatcgcaatggtaattgcagttcttgtttggattaatgcgaaggatacaccggaatcagaaggtcttcctccaattgatgagtatcgtaatgactatgaaaatcttgaaaaagcagatcatgctaacaagatgtcaccaaaagaaattttaatgaagtatgtagtgaaaaataaatttgtatggttcttatgtattgcaaatgcattcgtttatttaattcgtttcggcgttattaactgggttccactttatttaacgacagttaaaggtttctcaaaaaatgaagcacatgcggcgtacgcaatctttgaaggtatggcaattccaagttcattaatcgttggtcttttaagtgataaattatttaaaggaaaacgtatgccattatgtatcattagtatggtcggagttgttattggtacgtttgtatattggcaagcaactagcatacttgttgtaagtattgcagtttctattatcggttgtttaatttatgtaccacagttcttaatcggtttaagtgcgatggaattagtaccgaaatttgcagtaggtacgacagttggtatgtgtggtctgttcggttacgtaggcggaagtcttgtagcaaacgcagcaatcggtgttattgttgatcgttctggctgggatggttgcttcatcttactattaacaggtgctattttatcaacgatcttcttgttcatcgttcaacgtggacatgaaagcaaagcgcctaaagcggcgtaa

SEQ ID NO: 55839 - protein, 444 aa, Bacillus cereus ATCC 10987
MFKWLKPAPAIERLPADMIDRVYRLLRIRVLIGISVGYAAYYLVRSNFTLSSTYLVQEYGFSTAQIGLLGSVMAIVYGFSKFFMGNLSDKAFAQRFIAVGLFLSGLVNICFGFASSFGMIVTLLVVNGIVQGMGAPPCSIVMTKWFSKKERGTKTGLWNISHNVGGMLVPPLVGIGVGIFGENHWQGGVFIFPAIIAMVIAVLVWINAKDTPESEGLPPIDEYRNDYENLEKADHANKMSPKEILMKYVVKNKFVWFLCIANAFVYLIRFGVINWVPLYLTTVKGFSKNEAHAAYAIFEGMAIPSSLIVGLLSDKLFKGKRMPLCIISMVGVVIGTFVYWQATSILVVSIAVSIIGCLIYVPQFLIGLSAMELVPKFAVGTTVGMCGLFGYVGGSLVANAAIGVIVDRSGWDGCFILLLTGAILSTIFLFIVQRGHESKAPKAA

SEQ ID NO: 55840 - DNA, 1290 bp, Danio rerio
  CDS (1)..(1290)
atggcgaagactggatatggctactaccgggcgactatattcctggccatgtttgtgggctacacgctgtattacttcaacaggaagacgttctccttcgtgatgccgtctgtaatgcaggagatcacgctggataaggatgatctgggtctcatcaccagcagtcaatctctggcttacgccatcagcaagttcataagcggtgtgctgtctgatcagatgagcgcacgatggctcttctctattgggctgtttacagtcggcggcattaatgtcattttctctcagtcgtcttccgtggctgtcttctcaggcctgtggtttcttaatggactaggtcaaggtctaggatggccaccttgtgcaaaagtgctacgtaagtggttcgaaccatctcagtttggcacctggtgggcagtgctgtcctgcagtatgaatctggctggatgtctcggacccataattgcaactctgatggctcaaagctacagctggaggtccacgctgtccatctctggcttgacctgcgtggtcacatcaatcttctgtctgatcattatccgaaatgagcccagtgaagttggcctgccaaatattgaagctggagccaagaaaggcaaaggaggctccagcaaaaatgaaagcaccttcaaagagttcatcttttctccatatctatggctgatgtcgctggggtacctggtggtgtttggggtgaagactgcctacacagactggggacaactttttctcatccaggataaggggcagtcggctctaatgggcagttccttcatgagtgcccttgaaatcggaggactgctgggtagtttagctgctggattcctgtcagacagagccgtggcaaagcatggtttgcgattgtatggtaaccctcggcatgggctcttgctctccatgatggctgggatgtgtgtgtccatgtacctcttccgcacaactgtcacggcacacagctcaaacgtctggattctcttgttgggtgctgcttttggcttttcctcctatggaccgattgccttgtttggagttcttgcgaatgaaagtgctccatcaaactactgcgggacttctcacgccattgtcgcactgatggcaaatgttggtggttttctgtcaggcttgccattcggaactgttgctaaacaccacggctggaacacagcattctgggtagcagaaatagcctgcatggtcacaacagttggatacttcctgctccgaaatatacgcactaagatgggaagcattcccaagaaggcagactag

SEQ ID NO: 55841 - protein, 429 aa, Danio rerio
MAKTGYGYYRATIFLAMFVGYTLYYFNRKTFSFVMPSVMQEITLDKDDLGLITSSQSLAYAISKFISGVLSDQMSARWLFSIGLFTVGGINVIFSQSSSVAVFSGLWFLNGLGQGLGWPPCAKVLRKWFEPSQFGTWWAVLSCSMNLAGCLGPIIATLMAQSYSWRSTLSISGLTCVVTSIFCLIIIRNEPSEVGLPNIEAGAKKGKGGSSKNESTFKEFIFSPYLWLMSLGYLVVFGVKTAYTDWGQLFLIQDKGQSALMGSSFMSALEIGGLLGSLAAGFLSDRAVAKHGLRLYGNPRHGLLLSMMAGMCVSMYLFRTTVTAHSSNVWILLLGAAFGFSSYGPIALFGVLANESAPSNYCGTSHAIVALMANVGGFLSGLPFGTVAKHHGWNTAFWVAEIACMVTTVGYFLLRNIRTKMGSIPKKAD

SEQ ID NO: 55842 - DNA, 1332 bp, Leptospira interrogans serovar Copenhageni str. Fiocruz L1-130
  CDS (1)..(1332): transl_table=11
atgatttcaccgttacgttggctactccctgcaaaagcaaagccattattatcaaaagaattaatagatcgatcttatccgcgttttagatggaggattttagaagcaacctttatcggttatgcgacgttttatctcgtaaggaataattttccagttatttccaaagaaatgggagaagcccttcattatagtcaagaacaaatcacaaacattttagcagtgactgcgatcacatacgggataggaaaatttttaatgggaatcttatccgatcgtagtaatccaaaatacttcatgccattgggtttgattttaaccgcgatttgtaatttgtttttcggagcatcaaatcagtacgaaattcatttttatctttgggcattaaacggattgatgcaagggatgggatggcctccttgtggacgttctcttggtcattggttcggagtttccgaaagaggatctaaatttgcaatttggaacatagcgcataacgtgggaggaggtttggtaggaattatcgcagcttacagcgcatcttggtggggttggaggaatgcgttttatattcccgctttgattgcgattgtgaccgcgatttatcttttatttcgattggtggatacacctcagtcggttggtcttcctccaatcgaagaatatcaaaaagatccggaaaaggaggtaagactttctatacaagaacaagaaaaggaactttcttttcgagaaatcattttaggttctgtattaaaaaatcattatgtttggacttttgcatttgctaattttttcgtttatgtggttcgatatggtttgacggatataggtcctacttatttaaaactttctaaaggagcttctttagaaaaaggtgggatcagcacgttgatctacgaatttgccggaattgcttctacccttcttgtaggatggggttccgataagctggggggtaaaagaggaatggtaagtcttttatgtatgcttcctattttgtttgctttaatttcattattatttactcctttaggatttctatggttggatcttgtattgttcggaatcatcggtttttttatctatccacctgttatgttgttaggtgttgctgggcttgattttacttctaaaaaagcggttggagctgcagccggttttataggtttattcggttatttgggaaggacgattctttcaaaatcggtaggatggttgagtaaacaaactggatttcattgggaacaacctatgtatttaatgatcggtgcgactttaatttcaattgcgttactcgccattacttggaattggaaacctaaggcatag

SEQ ID NO: 55843 - protein, 443 aa, Leptospira interrogans serovar Copenhageni str. Fiocruz L1-130
MISPLRWLLPAKAKPLLSKELIDRSYPRFRWRILEATFIGYATFYLVRNNFPVISKEMGEALHYSQEQITNILAVTAITYGIGKFLMGILSDRSNPKYFMPLGLILTAICNLFFGASNQYEIHFYLWALNGLMQGMGWPPCGRSLGHWFGVSERGSKFAIWNIAHNVGGGLVGIIAAYSASWWGWRNAFYIPALIAIVTAIYLLFRLVDTPQSVGLPPIEEYQKDPEKEVRLSIQEQEKELSFREIILGSVLKNHYVWTFAFANFFVYVVRYGLTDIGPTYLKLSKGASLEKGGISTLIYEFAGIASTLLVGWGSDKLGGKRGMVSLLCMLPILFALISLLFTPLGFLWLDLVLFGIIGFFIYPPVMLLGVAGLDFTSKKAVGAAAGFIGLFGYLGRTILSKSVGWLSKQTGFHWEQPMYLMIGATLISIALLAITWNWKPKA

SEQ ID NO: 55844 - DNA, 1383 bp, Parachlamydia sp. UWE25
  CDS (1)..(1383): transl_table=11
gtgaataaattgctcaatttgctgcaaccagctccccatattcctgaattaaaagaccaagagcttgtcaaagatcaatataaatattggcgtattcgcattctttattcgatgttcataggatatgctttctattattttactcgaaaaagttttacttttgcgatgcctggtcttattcaagatttgggctttgataaaagccagttaggaattttaggaagtattctttcaattacgtatggagtgagtaaatttgcaagtgggatcattggagatcgtactaactctcgttatatgatggccattgggttaatgttaacgggcatttgtaatatttgttttgggctttcttcttctattttcttttttgccctattttggggtcttaatggatggtttcagggatttggttggcctccttgtgcgcgctttttaactcaatggtattcacattcagagagaggttcgtggtggtccacatggaatgtttcacataatgtaggcggttttttaatcccctggatagcaggaattactcttcaatattttggctggcgttatgccatgtatattcctggaattttatgcatcctcatcagttttttcttaatcaatcgtttaagagatactccgcagtctcttggattacctcctattgaaaaataccgtaatgattatgtggataaagctgaggcagacaaagaggctgaacaattaacaacaaaacaactattagtcaattttgttcttaaaaattcctatatttggatattagcgctcgcctatttttttgtttatgccgtgcgaacaggaatcaatgattggacagctttatttttagttgaatccaaaggatatagtagcattggagcaaatggatgtgtttctttatttgaagttggcggattttttggaagtctagctgctggttggtcatcagataaacttttcggcgcaaaaagaggacctattaatgttctatttacactaggaatgtttgcttttattgccattttttggatgataccctctggctatttgttatttgattctgtcctcatgttttgtataggtttttctatttttggcccacaaatgatgattggtttagcggctgcagaactgtctcataaaaaagcggtggcaacttcaactggatttgttggtttttttgcttatatcggagctgcttttgcaggctatcccttgggatatatcactcagcaatggggatggcaaggtttttattgggctttaatgggatgttgtattattgcactatttctacttattccactttggtcagtttctgccaccactttaaagcctaaaaataaatcgagttctcctgttagttcgcctgcgttagcttctaaataa

SEQ ID NO: 55845 - protein, 460 aa, Parachlamydia sp. UWE25
MNKLLNLLQPAPHIPELKDQELVKDQYKYWRIRILYSMFIGYAFYYFTRKSFTFAMPGLIQDLGFDKSQLGILGSILSITYGVSKFASGIIGDRTNSRYMMAIGLMLTGICNICFGLSSSIFFFALFWGLNGWFQGFGWPPCARFLTQWYSHSERGSWWSTWNVSHNVGGFLIPWIAGITLQYFGWRYAMYIPGILCILISFFLINRLRDTPQSLGLPPIEKYRNDYVDKAEADKEAEQLTTKQLLVNFVLKNSYIWILALAYFFVYAVRTGINDWTALFLVESKGYSSIGANGCVSLFEVGGFFGSLAAGWSSDKLFGAKRGPINVLFTLGMFAFIAIFWMIPSGYLLFDSVLMFCIGFSIFGPQMMIGLAAAELSHKKAVATSTGFVGFFAYIGAAFAGYPLGYITQQWGWQGFYWALMGCCIIALFLLIPLWSVSATTLKPKNKSSSPVSSPALASK

SEQ ID NO: 55846 - DNA, 1386 bp, Listeria monocytogenes str. 4b F2365
  CDS (1)..(1386): transl_table=11
atgtcattattcagtttaaaaagaaagaactattttgttccactagaaattcaaaggcaacaatggttcaaacactttatcgttgcatttatgtctgtatttatttgttatctaacggtctatcttctaaggaataactttaaagcggctcagacattgttaattgagcagaaccatttcagcaccacagaactaggaatgattggtttagctttttctgttatgtacggaattggaaaaacgattttagggtatgccgtggatggaagaaatgctaaaaaaataatgagttttttattagggatttccgccattatatcaattattattggaatacttttagttacaaagcaagcaacagtgggtatattgtttatcctttggggagcaaatggatttgtgcaatcaccaggtggaccggcttcctattcaactatcacacgatggacgccaaaattgaaaagaggaagatggttaggcttttggaatgcctcgcataatataggtggtgctttagcgggaattgttgctttttggggtgcgactactttctttaatggcggggcagggggaatgtttatcgttccgggtatcattgcgatcatcattgcaattatttgcttctccgtggggcatgatgaaccagaagaattaggatggaactctgccgctgaaatttttgaagagcgggaagaacaaggagaatcggagacaaaagacctttctagatttcaaattttgtgtcgatttgttattaataatccatgggtatggactttatgtgtcataaatatattcatctatattgttagaattggtattgataattgggcgcccgtttattgtattcaagcgctaggatggagtacaaaagatgcaattatgactatttctttttttgaaattggagcattgctaggttcattatcgtggggctggctctcagatattatgaaaggccgccgtatgctttgctctattattgcagttgtcattgaatttttcatgttaattagttattcgcaagttacaagtgtttatagcatgtatacggtattatttattttaggattcttagtatttggcccccaacttttaattggtgtgtcggtgatcgagtttgttcctagaaatgctttagctgtaacaaatggcttaactggaacgtttgcatacttattcggagattcttttgctaaagtctttctaggatatatcgcagacccaacaaaagcgggtatacaaatatttggctatactttacacggctggggcgcaacttttaccattatgtttacagctttaattattgcaggcttaatgatgattccagttgcattaaaacaagagaaaatcatccgacaagcaaaagttttacatctataa

SEQ ID NO: 55847 - protein, 461 aa, Listeria monocytogenes str. 4b F2365
MSLFSLKRKNYFVPLEIQRQQWFKHFIVAFMSVFICYLTVYLLRNNFKAAQTLLIEQNHFSTTELGMIGLAFSVMYGIGKTILGYAVDGRNAKKIMSFLLGISAIISIIIGILLVTKQATVGILFILWGANGFVQSPGGPASYSTITRWTPKLKRGRWLGFWNASHNIGGALAGIVAFWGATTFFNGGAGGMFIVPGIIAIIIAIICFSVGHDEPEELGWNSAAEIFEEREEQGESETKDLSRFQILCRFVINNPWVWTLCVINIFIYIVRIGIDNWAPVYCIQALGWSTKDAIMTISFFEIGALLGSLSWGWLSDIMKGRRMLCSIIAVVIEFFMLISYSQVTSVYSMYTVLFILGFLVFGPQLLIGVSVIEFVPRNALAVTNGLTGTFAYLFGDSFAKVFLGYIADPTKAGIQIFGYTLHGWGATFTIMFTALIIAGLMMIPVALKQEKIIRQAKVLHL

SEQ ID NO: 55848 - DNA, 1350 bp, Bacillus anthracis str. Sterne
  CDS (1)..(1350): transl_table=11
atgttttttacacaattctttaaacctgcgccccacgcggaacgcttaccagctgaccgcgttgacagtgaataccgtaaactacgtttacaagtattcttaggtatcttcatcggctatgcaggttattactttgttcgaaaaaacttttcactagcaatgccatacttaattgaacaaggctttagtaaaggggaacttggggttatcctttcagcagtttctatcgcttacggattaagtaaatttcttatgggtatcgtatccgatcgttgtaatcctcgctactttttagcagctgggctatttttatcaggtatcattaatattattttcggctcattttctttcattacaacgagtattatacttatgtttgtacttcagtttttaaatggatgggtacaaggtatgggatggcctccttgtggtcgtacaatggttcactggttctctattagtgaacgtggtacaaaaatgtctatttggaacgtcgctcataacgtcggcggagcgcttatgccttctcttgtaacattaggcttatacttctttgcgaatgactggaagagtattttttacttcccaggtattctttcaattttagttggtgtttatgtattaattacgatgaaagatacacctcaatcttgtggattaccttctattgaagaacatactggagaatatccaccagatgagaagataaaagatcgtgaacgtgaactttcagcaaaggaaattttatttaaatacgtactaaacaataaatttttatggtacatcgcgattgcgaacgttttcgtatatttcgtacgttacggtgttgtagactgggctcctacttatttagtagaagaaaaaagctttactcatagtagttcacgtacagcttatgctctatatgaatgggctggtattccaggtacacttctttgcggctggatgagtgataaactatttaaaggacgccgcgcacctgctggtattttatttatggttggtgtatttatcgccgttcttgtgtactggctaaaccctcctggtaatccaatggttgatagtatcgcacttgttgcaattggatttttaatttacggacctgttatgttaattggtctacacgctcttgacttagcaccaaagaaagcggctggaactgcagctggattaactggcttcttcggttacttaggcggagcagctttcgctagtgccgctatgggctttatcgtcgatgcattcggatgggatggcggattcatcttattacttgcatcttgtgtacttgcaatgttcttccttgctcttactttaaagacagggtcagtaaaacaaaagcaagcttaa

SEQ ID NO: 55849 - protein, 449 aa, Bacillus anthracis str. Sterne
MFFTQFFKPAPHAERLPADRVDSEYRKLRLQVFLGIFIGYAGYYFVRKNFSLAMPYLIEQGFSKGELGVILSAVSIAYGLSKFLMGIVSDRCNPRYFLAAGLFLSGIINIIFGSFSFITTSIILMFVLQFLNGWVQGMGWPPCGRTMVHWFSISERGTKMSIWNVAHNVGGALMPSLVTLGLYFFANDWKSIFYFPGILSILVGVYVLITMKDTPQSCGLPSIEEHTGEYPPDEKIKDRERELSAKEILFKYVLNNKFLWYIAIANVFVYFVRYGVVDWAPTYLVEEKSFTHSSSRTAYALYEWAGIPGTLLCGWMSDKLFKGRRAPAGILFMVGVFIAVLVYWLNPPGNPMVDSIALVAIGFLIYGPVMLIGLHALDLAPKKAAGTAAGLTGFFGYLGGAAFASAAMGFIVDAFGWDGGFILLLASCVLAMFFLALTLKTGSVKQKQA

SEQ ID NO: 55850 - DNA, 1335 bp, Bacillus anthracis str. Sterne
  CDS (1)..(1335): transl_table=11
atgtttaaatggctcaagccagcacctgcaattgaacgtttaccagcggatatgatcgaccgtgtgtatcgattactacgtattcgcgtgttaatcggaatttcagttggatatgctgcttattatttagttcgtagtaactttacgttatcaagtacgtacttagtacaagaatatggttttagtacagctgaaattggtctactaggttcagtaatggcaattgtttatggatttagtaagttctttatggggaatttatcagataaagctttcgcccagcgctttatcgcagtcggtttatttttatcagggcttgtaaatatttgcttcggttttgcatcttcatttgggatgattgttacattacttgtcgttaacggtattgtacaaggtatgggagcaccaccttgtagtattgttatgacgaaatggttctcgaagaaagagcgcggtacgaaaacaggtatttggaatatttcacataacgttggtggaatgcttgtaccaccacttgtcggaattggtgtaggtatttttggtgaaaatcattggcaaggcggcgtgtttattttcccagcgattatcgcgatggtaattgcagttcttgtttggattaatgcgaaggatacaccagaatcagaaggtcttcctccaattgatgagtatcgtaatgactatgaaaatcttgaaaaagcagacaacgctaacaagatgtcaccaaaagaaattttaatgaagtatgtagtaaaaaataaatttgtatggttcttatgtattgcaaatgcatttgtttatttaattcgcttcggtgttattaactgggttccactttatttaacgacagttaaaggcttctcaaaaaatgaagcacatgcagcatacgcaatctttgaaggtatggcaattccaagttcattaatcgttggtcttttaagtgataaattatttaaaggaaaacgtatgccactatgtattattagtatggtcggagttgttattggtacgtttgtatattggcaagcaactagcatacttgttgtaagtattgcagtttctattatcggttgtttaatttatgtaccacagttcttaatcggtttaagtgcgatggaattagtaccgaaatttgcagtaggtacgacagttggtatgtgtggtctattcggttatgtaggcggaagtcttgtagcaaacgcagcaatcggtgttattgttgatcgttctggctgggatggttgtttcatcttactattaacaggtgccattttatcaacaatcttcttgttcatcgttcaacgtggacatgagagcaaagctcctaaagcggcgtaa

SEQ ID NO: 55851 - protein, 444 aa, Bacillus anthracis str. Sterne
MFKWLKPAPAIERLPADMIDRVYRLLRIRVLIGISVGYAAYYLVRSNFTLSSTYLVQEYGFSTAEIGLLGSVMAIVYGFSKFFMGNLSDKAFAQRFIAVGLFLSGLVNICFGFASSFGMIVTLLVVNGIVQGMGAPPCSIVMTKWFSKKERGTKTGIWNISHNVGGMLVPPLVGIGVGIFGENHWQGGVFIFPAIIAMVIAVLVWINAKDTPESEGLPPIDEYRNDYENLEKADNANKMSPKEILMKYVVKNKFVWFLCIANAFVYLIRFGVINWVPLYLTTVKGFSKNEAHAAYAIFEGMAIPSSLIVGLLSDKLFKGKRMPLCIISMVGVVIGTFVYWQATSILVVSIAVSIIGCLIYVPQFLIGLSAMELVPKFAVGTTVGMCGLFGYVGGSLVANAAIGVIVDRSGWDGCFILLLTGAILSTIFLFIVQRGHESKAPKAA

SEQ ID NO: 55852 - DNA, 1350 bp, Bacillus thuringiensis serovar konkukian str. 97-27
  CDS (1)..(1350): transl_table=11
atgttttttacacaattctttaaacctgcgccccacgcggaacgcttaccagctgaccgcgttgacagtgaataccgtaagctacgtttacaagtattcttaggtatcttcatcggctatgcaggttattactttgttcgaaaaaacttttcactagcaatgccatacttaattgaacaaggctttagtaaaggggaacttggggttatcctttcagcagtttctatcgcttacggattaagtaaatttcttatgggtatcgtatccgatcgttgtaatcctcgctactttttagcagctgggctatttttatcaggtatcattaatattattttcggctcattttctttcattacaacgagtattatacttatgtttgtacttcagtttttaaatggatgggtacaaggtatgggatggcctccttgtggtcgtacaatggttcactggttctctattagtgaacgtggtacaaaaatgtctatttggaacgtcgctcataacgtcggcggagcgcttatgccttctcttgtaacattaggcttatacttctttgcgaatgactggaagagtattttttacttcccaggtattctttcaattttagttggtatttatgtattaattacgatgaaagatacacctcaatcttgtggattaccttctattgaagaacatactggagaatatccaccagatgagaagataaaagatcgtgaacgtgaactttcagcaaaggaaattttatttaaatacgtactaaacaataaatttttatggtacatcgcgattgcgaacgttttcgtatatttcgtacgttacggtgttgtagactgggctcctacttatttagtagaagaaaaaagctttactcatagtagttcacgtacagcttatgctctatatgaatgggctggtattccaggtacacttctttgcggctggatgagtgataaactatttaaaggacgccgcgcacctgctggtattttatttatggttggtgtatttatcgccgttcttgtgtactggctaaaccctcctggtaatccaatggttgatagtatcgcacttgttgcaattggatttttaatttacggacctgttatgttaattggtctacacgctcttgacttagcaccaaagaaagcggctggaactgcagctggattaactggcttcttcggttacttaggcggagcagctttcgctagtgccgctatgggctttatcgtcgatgcattcggatgggatggtggattcatcttattacttgcatcttgtgtacttgcaatgttcttccttgctcttactttaaagacagggtcagtaaaacaaaagcaagcttaa

SEQ ID NO: 55853 - protein, 449 aa, Bacillus thuringiensis serovar konkukian str. 97-27
MFFTQFFKPAPHAERLPADRVDSEYRKLRLQVFLGIFIGYAGYYFVRKNFSLAMPYLIEQGFSKGELGVILSAVSIAYGLSKFLMGIVSDRCNPRYFLAAGLFLSGIINIIFGSFSFITTSIILMFVLQFLNGWVQGMGWPPCGRTMVHWFSISERGTKMSIWNVAHNVGGALMPSLVTLGLYFFANDWKSIFYFPGILSILVGIYVLITMKDTPQSCGLPSIEEHTGEYPPDEKIKDRERELSAKEILFKYVLNNKFLWYIAIANVFVYFVRYGVVDWAPTYLVEEKSFTHSSSRTAYALYEWAGIPGTLLCGWMSDKLFKGRRAPAGILFMVGVFIAVLVYWLNPPGNPMVDSIALVAIGFLIYGPVMLIGLHALDLAPKKAAGTAAGLTGFFGYLGGAAFASAAMGFIVDAFGWDGGFILLLASCVLAMFFLALTLKTGSVKQKQA

SEQ ID NO: 55854 - DNA, 1335 bp, Bacillus thuringiensis serovar konkukian str. 97-27
  CDS (1)..(1335): transl_table=11
atgtttaaatggctcaagccagcacctgcaattgaacgtttaccagcggatatgatcgaccgtgtatatcgattactacgtattcgcgtgttaatcggaatttcagttggatatgctgcttattatttagttcgtagtaactttacgctatcaagtacgtacttagtacaagaatatggttttagtacagctgaaattggtctactaggttcagtaatggcaattgtttatggttttagtaagttctttatggggaatttatcagataaagctttcgcccagcgctttatcgcagtcggtttatttttatcagggcttgtaaatatttgcttcggttttgcatcttcatttgggatgattgttacattacttgtcgttaacggtattgtacaaggtatgggagcacccccttgtagtattgttatgacgaaatggttctcgaagaaagaacgcggtacgaaaacaggtatttggaatatttcacataacgttggtggaatgcttgtaccaccacttgtcggaattggtgtaggtatttttggtgaaaatcattggcaaggcggcgtgtttattttcccagcgattatcgcaatggtaattgcagttcttgtttggattaatgcgaaggatacaccggaatcagaaggtcttcctccaattgatgagtatcgtaatgactatgaaaatcttgaaaaagcagacaatgctaacaagatgtcaccaaaagaaattttaatgaagtatgtagtgaaaaataaatttgtatggttcttatgtattgcaaatgcatttgtatatttaattcgtttcggtgttattaactgggttccactttatttaacgacagttaaaggtttctcaaaaaatgaagcacacgcagcgtacacaatctttgaaggtatggcaattccaagttcattaatcgttggtcttttaagtgataaattatttaaaggaaaacgtatgccattatgtatctttagtatggtcggagttgttattggtacgtttgtatattggcaagcaactagcatacttgttataagtattgcagtttctattattggttgtttaatttatgtaccacagttcttaatcggtttaagtgcaatggaattagtaccgaaatttgcagtaggtacgacagttggtatgtgtggtctgttcggttatgtgggcggaagtcttgtagcaaacgcagcaattggtgttattgttgatcgttctggctgggatggttgttttatcttactattaacaggtgccattttatcaacaatcttcttgttcatcgttcaacgtggacatgagagcaaagcttctaaagtagcataa

SEQ ID NO: 55855 - protein, 444 aa, Bacillus thuringiensis serovar konkukian str. 97-27
MFKWLKPAPAIERLPADMIDRVYRLLRIRVLIGISVGYAAYYLVRSNFTLSSTYLVQEYGFSTAEIGLLGSVMAIVYGFSKFFMGNLSDKAFAQRFIAVGLFLSGLVNICFGFASSFGMIVTLLVVNGIVQGMGAPPCSIVMTKWFSKKERGTKTGIWNISHNVGGMLVPPLVGIGVGIFGENHWQGGVFIFPAIIAMVIAVLVWINAKDTPESEGLPPIDEYRNDYENLEKADNANKMSPKEILMKYVVKNKFVWFLCIANAFVYLIRFGVINWVPLYLTTVKGFSKNEAHAAYTIFEGMAIPSSLIVGLLSDKLFKGKRMPLCIFSMVGVVIGTFVYWQATSILVISIAVSIIGCLIYVPQFLIGLSAMELVPKFAVGTTVGMCGLFGYVGGSLVANAAIGVIVDRSGWDGCFILLLTGAILSTIFLFIVQRGHESKASKVA

SEQ ID NO: 55856 - DNA, 1380 bp, Staphylococcus aureus subsp. aureus MRSA252
  CDS (1)..(1380): transl_table=11
atgaacttttttgatatccataagattccgaacaaaggcattccattatcggtacaacgtaaattatggcttagaaacttcatgcaagctttcttcgtagtgttctttgtttatatggctatgtatttaattcgaaacaactttaaggcggcacaaccgtttttaaaagaggaaattggattatctacattagaacttggttatatcggattagcatttagtatcacgtacggtttagggaaaacattacttggatattttgtcgatggacgtaacacaaaacgtattatctcattcttacttatcttatctgcgattacagttttaattatgggatttgttttaagttactttggttcagtaatgggattattaattgtactttggggacttaacggggtgttccaatcagttggtggacctgcaagttattcaacgatttcaagatgggcgccaagaacgaaacgtggccgatacttagggttttggaatacatcacataatatcggtggtgccattgcaggtggtgttgcactttggggtgctaatgtattcttccatggaaatgttatagggatgttcattttcccatcggtgattgcattacttattggtatcgcaacattatttatcggaaaagatgatccagaagaattaggatggaatcgtgctgaagaaatttgggaagagccggttgataaagaaaatattgattctcaaggtatgacaaaatgggagatctttaaaaaatatatcctgggaaatcctgttatatggattctatgtgtttcaaacgtctttgtatacattgtacgaatcggtattgataactgggcaccgttatatgtgtcagagcatttacactttagtaaaggcgatgcagttaatacgatattctactttgaaattggtgctttagttgcaagtttattatggggctacgtatcagacttattaaaaggtcgtcgtgcaattgtagctattggctgtatgtttatgattacatttgttgtcttattctacacaaatgctacaagtgtaatgatggttaacatttcattgtttgcattaggtgcgttaatctttggtccgcaattattaattggtgtatcattgactggttttgttcctaaaaatgccatcagtgtagcaaacggaatgacaggttcattcgcgtatctattcggtgactcaatggcaaaagttggtttggcggctattgctgatccaacacgtaacggtttaaacatctttggatatacattaagtggatggacagatgttttcatcgtcttctatgttgcattattcctaggcatgattctattaggaatcgttgctttctatgaagaaaagaaaattagaagtttaaaaatctaa

SEQ ID NO: 55857 - protein, 459 aa, Staphylococcus aureus subsp. aureus MRSA252
MNFFDIHKIPNKGIPLSVQRKLWLRNFMQAFFVVFFVYMAMYLIRNNFKAAQPFLKEEIGLSTLELGYIGLAFSITYGLGKTLLGYFVDGRNTKRIISFLLILSAITVLIMGFVLSYFGSVMGLLIVLWGLNGVFQSVGGPASYSTISRWAPRTKRGRYLGFWNTSHNIGGAIAGGVALWGANVFFHGNVIGMFIFPSVIALLIGIATLFIGKDDPEELGWNRAEEIWEEPVDKENIDSQGMTKWEIFKKYILGNPVIWILCVSNVFVYIVRIGIDNWAPLYVSEHLHFSKGDAVNTIFYFEIGALVASLLWGYVSDLLKGRRAIVAIGCMFMITFVVLFYTNATSVMMVNISLFALGALIFGPQLLIGVSLTGFVPKNAISVANGMTGSFAYLFGDSMAKVGLAAIADPTRNGLNIFGYTLSGWTDVFIVFYVALFLGMILLGIVAFYEEKKIRSLKI

SEQ ID NO: 55858 - DNA, 1359 bp, Staphylococcus aureus subsp. aureus MRSA252
  CDS (1)..(1359): transl_table=11
atgaattttcttaaacctgcaaagcatattaagcctttgccagaaaatcagatagatgatacctataaacgattacgtctccaagtatttcttggtattttcatcggttacgctgggtactatttattacgtaaaaacttttcattagcgatgccggcattgcaagagcaaggttttacaaaagcagaactaggttttgcgctttctgctgtttccatcgcatatggatttagtaagttctttatgggtactgtaagtgatcggagcaatgcacggatattcttagttcttggattagtactcactgctatcgtcaatttgttaatgggatttgtaccgttctttacatcaggtatcggtattatgtttgtcctattattcttaaatggatggtttcaaggtatgggctggccaccttcaggccgtgttctcgttcactggtttagtgtaagtgaacgcggaagtaagactgctctttggaacgttgcgcataatgttggtggaggtattatggcacctattgctgcttggggtattacaacaacagcatttatcaactttggttatttaaaaggttttgaaggtgtattcatttaccctgcactcttagcacttatcattgccgcaatttcatatatattgattagagacacacctcaatctcaaggtttacctccaatcgaaatttataaaaatgactttgctacaagcgataagaaaacattagaaacagaattaactacaaaagaaattttatttaaatatgtactgaacaataaatgggtatgggcaattgcctttgcaaatatatttgtttatttcgtgcgttatggtgtacttgattgggcgccagtctacttaagtgaagaaaaacatttcgacttaaaagcatcaggttgggcatacttcttatacgaatgggctggaattcctggtacattattatgtggttacatttctgataaattattcaaaggtcgccgtggacctgctggtttcttctttatgttaggtgtcacagtatttgtattaatttattggttaaatcctccaggcaatgcttggttagacaatgtctcattaattgccattggtttcttaatatatggaccagttatgttaattggtttacaagcattagattatgtacctaaaaaagcagctggcacagcagctggattaactggattatttggttatctgtttggtgctgtaatggccaacatcgtcttaggtgctgtagttgataaattcggatgggatgtcggttttattttattaacagcaatcagtgtgtttgcaatgttgagctttatcctcacttggaataaagtaggacaagaaactgttcatcattaa

SEQ ID NO: 55859 - protein, 452 aa, Staphylococcus aureus subsp. aureus MRSA252
MNFLKPAKHIKPLPENQIDDTYKRLRLQVFLGIFIGYAGYYLLRKNFSLAMPALQEQGFTKAELGFALSAVSIAYGFSKFFMGTVSDRSNARIFLVLGLVLTAIVNLLMGFVPFFTSGIGIMFVLLFLNGWFQGMGWPPSGRVLVHWFSVSERGSKTALWNVAHNVGGGIMAPIAAWGITTTAFINFGYLKGFEGVFIYPALLALIIAAISYILIRDTPQSQGLPPIEIYKNDFATSDKKTLETELTTKEILFKYVLNNKWVWAIAFANIFVYFVRYGVLDWAPVYLSEEKHFDLKASGWAYFLYEWAGIPGTLLCGYISDKLFKGRRGPAGFFFMLGVTVFVLIYWLNPPGNAWLDNVSLIAIGFLIYGPVMLIGLQALDYVPKKAAGTAAGLTGLFGYLFGAVMANIVLGAVVDKFGWDVGFILLTAISVFAMLSFILTWNKVGQETVHH

SEQ ID NO: 55860 - DNA, 1326 bp, Erwinia carotovora subsp. atroseptica SCRI1043
  CDS (1)..(1326): transl_table=11
atgcaagcacccatgtttccaaagggacagctttcaccaacacaaatcagtcagcgctatcgctactggcgaccgcggttgttgatttccatggttatcgggtacgccacgttttacctgacgcgtaaaagcatcaacttcgtcatgccggtgatgcagttggaattagggttaagcaaaggcgatatcggtctgctggggacgctgttttacctctgttatggcgcgtctaaatttatctccggcatcgtgtgcgatcgcactcaggtgcgctggtttatgggtgtcggactgatgattaccggcgtgctgaacattctgttcatgtactgccagtcactcaccggtttgctgattgtctgggcgctgaacggtttctttcagggctggggttggcccccttgcgccagactgctgagcagttggtattcgcgtaatgagcgcggcctctggtggggatgctggaatacgtcgatcaacatcggcggcgcggcggttcccttactcgcaggctatctggcctccgaatgggggtggcaagcggcgctgctggtgccgggcattatcgggattgtgatcgggctgtggctgtgttggcagttgtgcgacaaaccgcagcagcaagggttgccaagcgtcggtcagtggcgacgcgacgcgctggagcttcgtcaggagcagcagagcccgccgatgccgatgcgtcagattctgcgcgatgcgattttgcgtaaccgtaccatctggctgctcgggttttcctacattctggtgtacctgattcgtatcgcactgaatgactggggaaacatctggctgtcggagagccacggattcaacctactcagcgctaacgccacgctgtcgctatttgaactgggtggattgctgggagcgctgtttgctggttggggttcggatctgctgtttcgtggtcaacgcgcaccgatgattttgctgttcgcacttgggctgtttttaaccatgaccgcgctgtggctggcaccgattcaccactattcactgctcgcagcctgtttcttcagtatcggtttttttgtttttggaccacagatgttgatcggtctggctgcgacggaatacagccataaggatgccgcaggcacggtgacaggttttctggcgttgtttgcctatctgggggcggcgctggcgggctggccgctggcacaggtgctgcaacactacggatggtcgggattttttactctgctggcgttggcctcagcctgcatcggactgttattgatgccgctgctgatggcaggtgtcagccgccgggaacgtttgatgacatcaaaatag

SEQ ID NO: 55861 - protein, 441 aa, Erwinia carotovora subsp. atroseptica SCRI1043
MQAPMFPKGQLSPTQISQRYRYWRPRLLISMVIGYATFYLTRKSINFVMPVMQLELGLSKGDIGLLGTLFYLCYGASKFISGIVCDRTQVRWFMGVGLMITGVLNILFMYCQSLTGLLIVWALNGFFQGWGWPPCARLLSSWYSRNERGLWWGCWNTSINIGGAAVPLLAGYLASEWGWQAALLVPGIIGIVIGLWLCWQLCDKPQQQGLPSVGQWRRDALELRQEQQSPPMPMRQILRDAILRNRTIWLLGFSYILVYLIRIALNDWGNIWLSESHGFNLLSANATLSLFELGGLLGALFAGWGSDLLFRGQRAPMILLFALGLFLTMTALWLAPIHHYSLLAACFFSIGFFVFGPQMLIGLAATEYSHKDAAGTVTGFLALFAYLGAALAGWPLAQVLQHYGWSGFFTLLALASACIGLLLMPLLMAGVSRRERLMTSK

SEQ ID NO: 55862 - DNA, 1350 bp, Erwinia carotovora subsp. atroseptica SCRI1043
  CDS (1)..(1350): transl_table=11
atgctgagtatttttaggcccgccgcccaccagccacgcgtgtcgcaagatcacgtcgatcccgtctatcgtcgcctgcgttggcagattttcatggggatcttttttggctacgccgcctactatctggtacgcaaaaacttcacactggcgatgccttatctgattgaacagggcttctcgcgtggtgaccttggctttgcgctgtccggtatctccatcgcctacggcttttccaaattcatcatgggatcgatatccgaccgttctaacccgcgagtgttcctgcccgccggtctgattctgtcagctgcggtcatgctgttcatgggcttcgtaccgtgggcaacgtccagcattgcgattatgttcgtcctgctgttcctgtgcggatggttccagggcatgggctggccgccgtgcggacgtactatggttcactggtggtcacagaaagaacgtggtggcatcgtatctgtatggaactgtgcgcataacgtcggtggtgggcttccccctctgctgttcctgctgggtatggcctggttcaacgactggaaagcggcgctctatatgccggcattcgccgccattctggttgccatgatcgcttttgcactgatgcgtgacacaccgcaatcttgtggtctgccaccgattgaagagtacaaaaacgattatccggttgattacaatgaaaaagcagaagaagagctgaccgctaagcagatcttcatgcagtacgttttcccgaacaaactgctgtggtatatcgctatcgccaacgtgttcgtttacctgctgcgttacggcatcctcgactggtcaccaacttacctgaaagaagttaaacacttcgcactggataagtcgtcctgggcgtacttcctgtacgaatacgcgggtattccgggcacgctgctgtgcggttggatgtctgataaggtgttcaaaggtaaccgtggtgcaacgggcgtattcttcatggtacttgtcaccatcgccaccgtcgtttactggatgaacccagccggtaatccgggtgtggacatggcctgtatgatcatcatcggcttcctgatttacggtccggttatgcttattggtctacacgcgctggaactggcaccgaagaaagcagctggtaccgcggcgggcttcaccggcctgttcggctacctcggtggctccgttgccgccagcgccatcgtcggctacaccgttgacttcttcggttgggacggcggtttcatggtgatgatcggcggcagcattatggctgtgcttctgctggttgttgttatgctgaatgagaaaaagcataaagcagagttagccaatcgcgcctaa

SEQ ID NO: 55863 - protein, 449 aa, Erwinia carotovora subsp. atroseptica SCRI1043
MLSIFRPAAHQPRVSQDHVDPVYRRLRWQIFMGIFFGYAAYYLVRKNFTLAMPYLIEQGFSRGDLGFALSGISIAYGFSKFIMGSISDRSNPRVFLPAGLILSAAVMLFMGFVPWATSSIAIMFVLLFLCGWFQGMGWPPCGRTMVHWWSQKERGGIVSVWNCAHNVGGGLPPLLFLLGMAWFNDWKAALYMPAFAAILVAMIAFALMRDTPQSCGLPPIEEYKNDYPVDYNEKAEEELTAKQIFMQYVFPNKLLWYIAIANVFVYLLRYGILDWSPTYLKEVKHFALDKSSWAYFLYEYAGIPGTLLCGWMSDKVFKGNRGATGVFFMVLVTIATVVYWMNPAGNPGVDMACMIIIGFLIYGPVMLIGLHALELAPKKAAGTAAGFTGLFGYLGGSVAASAIVGYTVDFFGWDGGFMVMIGGSIMAVLLLVVVMLNEKKHKAELANRA

SEQ ID NO: 55864 - DNA, 1188 bp, Desulfotalea psychrophila LSv54
  CDS (1)..(1188): transl_table=11
atgacacgacaacagaagaaagcgctttttatcctctggtttggctatgccaatttttatctgttgcgactcaactatggtatagctatgccgggaatcatggccgaatatggctatagcagaggagaacttggcctgggggcaagtttcttttttatgctctatgcccttggcctggtggtaagtggggtgctcagtgacagactaggaccgaaaaggattttggtctttggcctgctctgctccattcttgttaatctggcctttccgtctattgctggtagcctcttcggcattgtttttctttggtctataaatggtttttttcaggcaatgggctgggcgcctacggtgaagatgacttcaccgtggtttgaggaggggcagaagggtcgggcctcggcgattcttggtacctcatatattatcggcagtgctctgagttggcttcttgccggttatctggcccaaaactactcctggcgtcttgtcttctatggcccaaccctcatcgccgcagtcatcttagctctctacctgatctatatagagcaatatccacaggccactacccctgccagacagtctatcttgaagaccttgggcgctgttttggctgagagggaaatttggtatgtgggttttacccttttagggcttaatatcgtgatctatggatttatgacctgggcacccatatactattttgagcagggtggagatattcaggaggcgacccataaggccctcctttttcccatagccggagccctgggtagcctttttataggctggctttgtgataagttctttgccaagaggcgactctttgtcggcgtcatggccatggttgttcttctcttctctgtccttctttttccctatagcaccgatcctcttgtctcgctgacctgtcttgttttcgtcggggccacagcctatggtacagaggttcttctggtttctcagtttcccatgatatttggcaagcaaaagaatatggcaaccattgttggcgttattgatagtataggttatctgggagcagccataaccagtgtgacaagcggctttttgactgatatttggggctggtcagcggccttctatttctggataggaggtggcttgttcgctatgatcttcctccttatctgtcagcgacagctggggcatacccttcggtaa

SEQ ID NO: 55865 - protein, 395 aa, Desulfotalea psychrophila LSv54
MTRQQKKALFILWFGYANFYLLRLNYGIAMPGIMAEYGYSRGELGLGASFFFMLYALGLVVSGVLSDRLGPKRILVFGLLCSILVNLAFPSIAGSLFGIVFLWSINGFFQAMGWAPTVKMTSPWFEEGQKGRASAILGTSYIIGSALSWLLAGYLAQNYSWRLVFYGPTLIAAVILALYLIYIEQYPQATTPARQSILKTLGAVLAEREIWYVGFTLLGLNIVIYGFMTWAPIYYFEQGGDIQEATHKALLFPIAGALGSLFIGWLCDKFFAKRRLFVGVMAMVVLLFSVLLFPYSTDPLVSLTCLVFVGATAYGTEVLLVSQFPMIFGKQKNMATIVGVIDSIGYLGAAITSVTSGFLTDIWGWSAAFYFWIGGGLFAMIFLLICQRQLGHTLR

SEQ ID NO: 55866 - DNA, 1290 bp, Rickettsia typhi str. Wilmington
  CDS (1)..(1290): transl_table=11
atgacaaatatagagtctaaaattaaaacgccaagatcgccatatgcaaaaaaatataatagttggcgaataaggattttatattctattgttataggttatgcgactttttatttttgtcgtcagaattttaatatagcgacccctgctatcagagaatattttggtgttactaaaacacaaattggttggatcttaactgctgcatctattatgtatggagtgagtaaagcttgtaatgggtttattagcgataaagttaatgctcgagtatttatggttttgggtcttttatttgttgggattattactattctaataggtttttcagattttttatggcttataggaattttatggatagcaagcaattggtttcagtcaatgggatggcctcctgcaacaaaaatgctcactcactggtttgctgcaaaagaacttggcacgaaatgggctatcggtgcaacttctaatcaactaggtggcgctcttgctatgataagctgcggttatttaattgataaatttgactggagagctgctttttttgttccaggtttagttgcgtgtgtagcatcactttttttatataataggctacgtaattctccaaaagaagttggtttatctacagtagaggaatataaagaatatccacctgaagctataggcaattatgagcgattattaactacacaattacttaagatggtcttttgtaataagctaatatggtatgtttgtttagcaaacatgtttgtttatatcattcgttccggagtaatttattgggctccaacatttttaagagatttatgtaatataagctttgtaaatgcaggtttacaaattggtttatatgagatgataggtataccaggagcattaatagcaggtattttatctgacaagctatttcaaggtcgtagaggtcctattgcatctatatgtatgatactgctgaccttgttgttagttttgttttggaaagtccctattcaaagtgaattattaagtatagtaattctttcattaataggtttttttgtttcaggacctcagctcctcgtaggtatagcagctgctgatttcagtactcgtcaagctgttggtactgctaatgggttatcaggattatttggttatttaggcgctgcgattgcgggagtaggagtaggatggattagcgataattacggttggaatggagtatttatattttttagtatttctgctcttttaggaggaggattatttgctttgacatggaatcattcagctaaaaaatag

SEQ ID NO: 55867 - protein, 429 aa, Rickettsia typhi str. Wilmington
MTNIESKIKTPRSPYAKKYNSWRIRILYSIVIGYATFYFCRQNFNIATPAIREYFGVTKTQIGWILTAASIMYGVSKACNGFISDKVNARVFMVLGLLFVGIITILIGFSDFLWLIGILWIASNWFQSMGWPPATKMLTHWFAAKELGTKWAIGATSNQLGGALAMISCGYLIDKFDWRAAFFVPGLVACVASLFLYNRLRNSPKEVGLSTVEEYKEYPPEAIGNYERLLTTQLLKMVFCNKLIWYVCLANMFVYIIRSGVIYWAPTFLRDLCNISFVNAGLQIGLYEMIGIPGALIAGILSDKLFQGRRGPIASICMILLTLLLVLFWKVPIQSELLSIVILSLIGFFVSGPQLLVGIAAADFSTRQAVGTANGLSGLFGYLGAAIAGVGVGWISDNYGWNGVFIFFSISALLGGGLFALTWNHSAKK

SEQ ID NO: 55868 - DNA, 1359 bp, Bacillus licheniformis ATCC 14580
  CDS (1)..(1359): transl_table=11
atgttaaaactgtttaagccagcaccgccgattgagcggctgccggaagatcaaattgattcggaatataagaaattcagactgcaagtttttctcggcatcttcatcggttatgcggcatactatttaattcgcaaaaatttctcgcttgccatgccttatttgatcgaagagggcttttcaaagtcggcgctcggctttgccttgtccgctctatccatctcttacgggctgagcaagttcgtgatggccacgatatcggaccggagcaatccgaggatgttcctgcccgccggtttgatcctttccgctgtcatcagcctcttgatggggtttgttccttttttcacctcatcgatcgccattatgtttatcatgctgttcttaaacggctggttccagggcatgggatggccgccgtcagggcgtgtccttgtccactggttcagcgtcagcgaaaggggaaataaaaccgccatatggaatgtcgcccacaatgtcggcgggggactgatggcgccgattgccgttgccggcgtcgccatcttctcaggcataacgggatctgctacaggctatgaaggtgtgtttattttgccggccttggtcgccatcgccgttgccgtcatttcttactggctgatccgggatacgccgcagtctgtcggacttcctccaatcgaggaataccgcaacgattattcaagcaaatcgaagaaaacctttgaaaaggaattatcaacgaaagaaatccttttcaaacatgtattaaataataaatgggtgtgggcgatcgcacttgccaacattttcgtgtacttcgtccgctacggcgttctggattgggctccaacctatttaagcgaagaaaaaggctttgacatgagcaaatcaagcgtcgcttattttctgtatgaatgggcggggattccggggacattgctgtgcggctggatctctgacaaatggtttaaaggacgccgcggaccggcaggctttgtctttatggcaggtgttttgatcgcggtgcttgtgtactggttcaacccagccggcaatccgatgatcgacatggcatcattgatcgcgatcggattcctcatttacggtcccgtcatgctgatcggccttcaagcgcttgactttgttcctaaaaaagcggccggcacggctgcaggattgaccggtctgttcggttacctgggcggaaccttgacggcgaatgcgctgatgggtgttatcgtcgatgcatccggctggaatgcgggctttacgcttttaaccgcttcatgtgcaatcgcagcactcatatttgcgatgacttggaatgtgcggggacaggaagttgtgaagcattaa

SEQ ID NO: 55869 - protein, 452 aa, Bacillus licheniformis ATCC 14580
MLKLFKPAPPIERLPEDQIDSEYKKFRLQVFLGIFIGYAAYYLIRKNFSLAMPYLIEEGFSKSALGFALSALSISYGLSKFVMATISDRSNPRMFLPAGLILSAVISLLMGFVPFFTSSIAIMFIMLFLNGWFQGMGWPPSGRVLVHWFSVSERGNKTAIWNVAHNVGGGLMAPIAVAGVAIFSGITGSATGYEGVFILPALVAIAVAVISYWLIRDTPQSVGLPPIEEYRNDYSSKSKKTFEKELSTKEILFKHVLNNKWVWAIALANIFVYFVRYGVLDWAPTYLSEEKGFDMSKSSVAYFLYEWAGIPGTLLCGWISDKWFKGRRGPAGFVFMAGVLIAVLVYWFNPAGNPMIDMASLIAIGFLIYGPVMLIGLQALDFVPKKAAGTAAGLTGLFGYLGGTLTANALMGVIVDASGWNAGFTLLTASCAIAALIFAMTWNVRGQEVVKH

SEQ ID NO: 55870 - DNA, 1350 bp, Bacillus cereus E33L
  CDS (1)..(1350): transl_table=11
atgttttttacacaattctttaaacctgcgccccacgcggaacgcttaccagctgaccgcgttgatagtgaataccgtaaactacgtttacaagtattcttaggtatcttcatcggctatgcaggttattactttgttcgaaaaaacttttcactagcaatgccatacttaattgaacaaggctttagtaaaggggagcttggggttatcctttcagcagtttctatcgcttacggattaagtaaatttcttatgggtatcgtatccgatcgttgtaatcctcgctactttttagcagctgggctatttttatcaggtatcattaatattattttcggctcattttctttcattacaacgagtattatacttatgtttgtacttcagtttttaaatggatgggtacaaggtatgggatggcctccttgtggtcgtacaatggttcactggttctctattagtgaacgtggtacaaaaatgtctatttggaacgtcgctcataacgtcggcggagcgcttatgccttctcttgtaacattaggcttatacttctttgcgaatgactggaaaagtattttttacttcccaggtattctttcaattttagttggtatttatgtattaattacgatgagagatacacctcaatcttgtggattaccttctattgaagaacatactggagaatatccaccagatgaaaaagtacaagatcgtgaacgcgaactttcggtaaaagaaattttatttacatacgtactaaacaataaatttttatggtacatcgcgattgcgaacgttttcgtatatttcgtacgttacggtgttgtagactgggctcctacttatttagtagaagaaaaaagctttactcatagtagttcacgtacagcttatgctctatatgaatgggctggtattccaggtacacttctttgcggctggatgagtgataaactatttaaaggacgccgcgcacctgctggtattttatttatggttggtgtatttatcgccgttcttgtgtactggctaaaccctcctggtaatccaatggttgatagtatcgcacttgttgcaattggatttttaatttacggacctgttatgttaattggtctacacgctcttgacttagcaccaaagaaagcggctggaactgcagcgggcttaactggcttcttcggttacttaggcggagcagctttcgctagtgctgctatgggctttatcgtcgatgcatttggatgggatggcggattcatcttattacttgcatcttgtgtacttgcaatgttcttccttgctcttactttaaagacaggatctgcaaaaccaaagaaagcttaa

SEQ ID NO: 55871 - protein, 449 aa, Bacillus cereus E33L
MFFTQFFKPAPHAERLPADRVDSEYRKLRLQVFLGIFIGYAGYYFVRKNFSLAMPYLIEQGFSKGELGVILSAVSIAYGLSKFLMGIVSDRCNPRYFLAAGLFLSGIINIIFGSFSFITTSIILMFVLQFLNGWVQGMGWPPCGRTMVHWFSISERGTKMSIWNVAHNVGGALMPSLVTLGLYFFANDWKSIFYFPGILSILVGIYVLITMRDTPQSCGLPSIEEHTGEYPPDEKVQDRERELSVKEILFTYVLNNKFLWYIAIANVFVYFVRYGVVDWAPTYLVEEKSFTHSSSRTAYALYEWAGIPGTLLCGWMSDKLFKGRRAPAGILFMVGVFIAVLVYWLNPPGNPMVDSIALVAIGFLIYGPVMLIGLHALDLAPKKAAGTAAGLTGFFGYLGGAAFASAAMGFIVDAFGWDGGFILLLASCVLAMFFLALTLKTGSAKPKKA

SEQ ID NO: 55872 - DNA, 1335 bp, Bacillus cereus E33L
  CDS (1)..(1335): transl_table=11
atgtttaaatggctcaagccagcacctgcaattgaaagattgcctgcggatatgatcgaccgtgtgtatcgattactacgtattcgtgtgttaatcggaatttcagttggatatgctgcttattatttagttcgtagtaactttacgttatcaagtacgtacttagtacaagaatatggttttagtacagctgaaattggtctactaggttcagtaatggcaattgtttatggttttagtaagttctttatggggaatttatcagataaagctttcgcccagcgctttatcgcagtcggtttatttttatcagggcttgtaaatatttgcttcggttttgcatcttcatttgggatgattgttacattacttgtcgttaacggtattgtacaaggtatgggagcaccaccttgtagtattgttatgacgaaatggttctcgaagaaagagcgcggtacgaaaacaggtatttggaatatttcacataacgttggtggaatgcttgtaccaccacttgttgggattggtgtaggtatttttggtgaaaatcattggcaaggcggcgtgtttattttcccggcgattatcgcaatgataatttcagttcttgtttggattaatgcgaaggatacaccggaatcagaaggtcttcctccaattgatgagtatcgtaatgactatgaaaatcttgaaaaagcagacaacgctaacaagatgtcaccaaaagaaattttaatgaagtatgtagtgaaaaataaatttgtatggttcttatgtattgcaaatgcatttgtatatttaattcgcttcggtgttattaactgggttccactgtatttaacgacagttaaaggtttctcaaaaaatgaagcacacgcggcgtacgcaatctttgaaggtatggcaattccaagttcattaatcgttggtcttttaagtgataaattatttaaaggaaaacgtatgccattatgtatcattagtatggtcggagttgttattggtacgtttgtatattggcaagcaactagcatacttgttgtaagtattgcagtttctattatcggttgtttaatttatgtaccacagttcttaatcggtttaagtgcgatggaattagtaccgaaatttgcagtaggtacgacagttggtatgtgtggtctgttcggttatgtaggcggaagtcttgtagcaaacgcagcaatcggtgttattgttgatcgttctggctgggatggttgtttcatcttactattaacaggtgccattttatcaacaatcttcttgttcatcgttcaacgtggacatgagagcaaagcttctaaagtagcataa

SEQ ID NO: 55873 - protein, 444 aa, Bacillus cereus E33L
MFKWLKPAPAIERLPADMIDRVYRLLRIRVLIGISVGYAAYYLVRSNFTLSSTYLVQEYGFSTAEIGLLGSVMAIVYGFSKFFMGNLSDKAFAQRFIAVGLFLSGLVNICFGFASSFGMIVTLLVVNGIVQGMGAPPCSIVMTKWFSKKERGTKTGIWNISHNVGGMLVPPLVGIGVGIFGENHWQGGVFIFPAIIAMIISVLVWINAKDTPESEGLPPIDEYRNDYENLEKADNANKMSPKEILMKYVVKNKFVWFLCIANAFVYLIRFGVINWVPLYLTTVKGFSKNEAHAAYAIFEGMAIPSSLIVGLLSDKLFKGKRMPLCIISMVGVVIGTFVYWQATSILVVSIAVSIIGCLIYVPQFLIGLSAMELVPKFAVGTTVGMCGLFGYVGGSLVANAAIGVIVDRSGWDGCFILLLTGAILSTIFLFIVQRGHESKASKVA

SEQ ID NO: 55874 - DNA, 1458 bp, Mannheimia succiniciproducens MBEL55E
  CDS (1)..(1458): transl_table=11
ttggagaattttatgtttggtcctttcaaaccggctcctgctatcgcagagctgccggcagataaaatagactctacataccgccgcttacgctggcaggtatttatggggattttctttggttacgccgcattctacttcgttcgtgcgaatttcgatttagcacaaaaaggtttaattgaagcgggcatgtatacaaaaacggaactcggtattatcggtaccggcgcaggtcttgcttacgggttatctaaatttgtgatggccggtatgtctgaccgttccaacccgaaagtattcttacctttcggtttattactttcaggtttatgtatgaccttgatgggcttaattccatgggcgacatcaggcattttaattatgttcgtgctgatcttcctaaacggttggttccaaggtatgggttggcctccttgcggacgtacaatggttcactggtggtcaaaatccgaacgaggtaccatcgtttcaatttggaactgcgcccataacgtcggcggtatggttccgggtatgatggtattattggcaagcgccgtttatttcagtaataccggcgttcaggcaacagccaaagacgtatggcaacaagcgttatattatccgggtattgccgcgatgatcgcagccattccggtttatttcgtgatgaaagatacgccgcaatcctgcggtttaccgccgattgaaaaatggcgtaacgattatcctgacgactataacgaaaaaacatacgaacacgatttgactacaaaagaaattttcgtgaactatgtattaaaaaacaaattgttatggtacatcgctattgctaacgtattcgtttatttaatccgctacggcgtattaaaatggtctccggtatatttgggtgaagtaaaacactttaatatcaaaggtaccgcatgggcatatacaatttatgaattagccgcaattccgggcacattattgtgcggttgggtatcggataaaatcttcaaaggtaaacgcggtttaaccggtttcatcttcatgattttaaccactattgcggtatttgccttatggaaaaacccggctacaccggaagcggaactcgcgcaatacgcaggcttaccgttctataaaaatccgtaccaattgatggacttcattttaatgacaaccgttggtttcttaatctatggtcctgtaatgttaatcggtttacacgcacttgaacttgcaccgaaaaaagcggcgggtacttcagcaggtttcaccggcttattcggttacttgggcggtacggtttccgcatcagccgttgtcggttgggctgccgataaattcggttgggacggcggtttttacgtcatgatcaccggcggtatcttagcggttatcttaatgttcatcgttatggttgccgaaggaaaacacaaagccaaattgagcgatcattacggaaaataa

SEQ ID NO: 55875 - protein, 485 aa, Mannheimia succiniciproducens MBEL55E
MENFMFGPFKPAPAIAELPADKIDSTYRRLRWQVFMGIFFGYAAFYFVRANFDLAQKGLIEAGMYTKTELGIIGTGAGLAYGLSKFVMAGMSDRSNPKVFLPFGLLLSGLCMTLMGLIPWATSGILIMFVLIFLNGWFQGMGWPPCGRTMVHWWSKSERGTIVSIWNCAHNVGGMVPGMMVLLASAVYFSNTGVQATAKDVWQQALYYPGIAAMIAAIPVYFVMKDTPQSCGLPPIEKWRNDYPDDYNEKTYEHDLTTKEIFVNYVLKNKLLWYIAIANVFVYLIRYGVLKWSPVYLGEVKHFNIKGTAWAYTIYELAAIPGTLLCGWVSDKIFKGKRGLTGFIFMILTTIAVFALWKNPATPEAELAQYAGLPFYKNPYQLMDFILMTTVGFLIYGPVMLIGLHALELAPKKAAGTSAGFTGLFGYLGGTVSASAVVGWAADKFGWDGGFYVMITGGILAVILMFIVMVAEGKHKAKLSDHYGK

SEQ ID NO: 55876 - DNA, 1380 bp, Mannheimia succiniciproducens MBEL55E
  CDS (1)..(1380): transl_table=11
atgcttagttttttaaatgaagtgagaaaaccgacacttgatttgccggtggaagaacgtcgtaaaatgtggtttaaaccctttatgcaatcttatttggttgtgtttttcggttatatggcgatgtatttagtgcgtaaaaatttcaatatcgcgcaaaacgatatgattgaaacctacggtttgaccaaaacccaacttgggatgatcggtcttggattttccatcacctacggcttgggtaaaactatcgtttcttactatgccgacggcaaaaacaccaaacaattcgtgccgtttatgctgattctttccgcactttgtatgcttggttttagcgcaagcatgggtggcagtagcattgccttgttcttaatggtggcgttctatgccttgagcggtttcttccaaagtaccggtggttcttcaagttattccaccattaccaaatggacgccgcgtaaaaaacgcggtactttcctcggtttctggaatctgtctcataatgtaggcggagctgcggcagccggtgtagcgctattcggtgcgcacgtattctttaacggtcatgttatcggtatgtttattttcccttctattattgccttgattatcggctttatcggtttgcgttacggcagcgattcgcccgaagcttacggtttaggcaaagcggaagaattattcggtgaagaaatttcggaagaggacaaagacgccgaacaaaatcaattaacgaaaaaacaaatttttgtgcaatatgttttgaaaaacaaagtaatctggttgttatgttttgccaacatcttcctttacattgtgcgtatcggtatcgaccaatggtcgccggtttatgcctaccaagaattaggcttctctaaagatgcggcaatatcgggctttgccctatttgaagtgggcgccttagtgggaactttcctgtggggttatttatccgatctggcaaacgggcgccgcggtttattagcttgtgtggcattagtattaatcgtcttcactcttgagttttatcaatttgccaacaacgaaaccatgtatttagtggcgttattcgctttaggtttcttagtgttcggtccgcaattattgattggtgtggcggcagtaggtttcgtgccgaaaaaggccatcgccgtagcggacggtgtgaaaggcaccttcgcttacttaatcggtgacagctttgctaaactcggtttaggtatgattgctgacggtacgccgattttcggtttgacaggttgggacggcaccttcgcggccttaaactcatccgccttaatctgcattggattacttgcttttgttgcgattgccgaagagaaaaaaatccgtcgcttaaaaaaagcggaagcttaa

SEQ ID NO: 55877 - protein, 459 aa, Mannheimia succiniciproducens MBEL55E
MLSFLNEVRKPTLDLPVEERRKMWFKPFMQSYLVVFFGYMAMYLVRKNFNIAQNDMIETYGLTKTQLGMIGLGFSITYGLGKTIVSYYADGKNTKQFVPFMLILSALCMLGFSASMGGSSIALFLMVAFYALSGFFQSTGGSSSYSTITKWTPRKKRGTFLGFWNLSHNVGGAAAAGVALFGAHVFFNGHVIGMFIFPSIIALIIGFIGLRYGSDSPEAYGLGKAEELFGEEISEEDKDAEQNQLTKKQIFVQYVLKNKVIWLLCFANIFLYIVRIGIDQWSPVYAYQELGFSKDAAISGFALFEVGALVGTFLWGYLSDLANGRRGLLACVALVLIVFTLEFYQFANNETMYLVALFALGFLVFGPQLLIGVAAVGFVPKKAIAVADGVKGTFAYLIGDSFAKLGLGMIADGTPIFGLTGWDGTFAALNSSALICIGLLAFVAIAEEKKIRRLKKAEA

SEQ ID NO: 55878 - DNA, 1275 bp, Mannheimia succiniciproducens MBEL55E
  CDS (1)..(1275): transl_table=11
atgaatacaacattttcgcccgaaattaaccgcacttatcgctattggcgtattcacctgatgatcgctatgtatatcggctatgccggtttttacttaacccgtaaaagctttaactttgccgtgccggaaatgatcaataatctcggcattgataaaaatgacatcggtatgatggcgacgcttttttatatcacctatggagtgtcaaaattcttttcgggaattttttccgacaaatccaatccgcgccattttatggctgtcgggctgattatgaccggggtggcgaatattttcttcggtttatccagctccgtattgatatttaccgccgtgtggattatcaatgcctggttccaaggttggggctggcccgcttgttcaaaattattaaccacctggtattcccgtaacgagcgcggacgttggtggtctatttggaacaccgcccataatgctggcggggcgctgattccgctgcttataggttatgtaactattcattacagctggcgttacggctttgctattgccggcattgtggccatttctatcggtttgtttttattctggcgattgcgtaatacgcccgaatccctcggtttacccagcatcgggcattggcgaaatgacgaattagagcttgctcaagaggcggaagcaccaaatttaagctggcgtgaaaccttaaaccgttatgtattcttaaataaatatatctggttactcgcattaagctataccttggtttatattgtacgtaccgccattaatgactggggtaatatttatctcaccgaaaaatatcattatgatttggtgtccgccaacagtgctttagcggtttttgaaatcggcggtttctttggctctctggttgcgggttggggatccgatcgtcttttctccagcaatcgcgggccgatggcgctaattttcgctattgggattttcttttcaattaccgctctttggctgttaccgacagaaaattacattttacagaccgcactttttttcgtagtcggttttttcgtattcggtccgcaaatgttaataggtatggcggcggcagaatgttcccataaaaaaacaccgggttcagcaaccggctttgttggtctgttcgcctatttaggcgctgccattgcaggctatccgctggcgcttattatgcagcatttccactggacgggcttttttgtcttcattgcctgttcggcttccggtattgctctgttgctgcttccgtttttaaaggcgcaaaactaa

SEQ ID NO: 55879 - protein, 424 aa, Mannheimia succiniciproducens MBEL55E
MNTTFSPEINRTYRYWRIHLMIAMYIGYAGFYLTRKSFNFAVPEMINNLGIDKNDIGMMATLFYITYGVSKFFSGIFSDKSNPRHFMAVGLIMTGVANIFFGLSSSVLIFTAVWIINAWFQGWGWPACSKLLTTWYSRNERGRWWSIWNTAHNAGGALIPLLIGYVTIHYSWRYGFAIAGIVAISIGLFLFWRLRNTPESLGLPSIGHWRNDELELAQEAEAPNLSWRETLNRYVFLNKYIWLLALSYTLVYIVRTAINDWGNIYLTEKYHYDLVSANSALAVFEIGGFFGSLVAGWGSDRLFSSNRGPMALIFAIGIFFSITALWLLPTENYILQTALFFVVGFFVFGPQMLIGMAAAECSHKKTPGSATGFVGLFAYLGAAIAGYPLALIMQHFHWTGFFVFIACSASGIALLLLPFLKAQN

SEQ ID NO: 55880 - DNA, 1368 bp, Legionella pneumophila subsp. pneumophila str. Philadelphia 1
  CDS (1)..(1368): transl_table=11
atggcattattgagttttctaaaacctgctccatatcttgatgaaattcaggataaaaacgttgttaaacggcaatatcgttattggcgtattcgcaccttttatgcaatgtatatagggtatgcgttgttttattttacgcgaaagagttttaccttcgtgatgcctgcgttacaaagcaccttggggatgactaaaactgaactgggaatgatcgccagcattttgagtttaagttatggtatcagcaaatttttgagtggaattcttggtgataaatctaatcctcgttatttaatggcgatcggactgattttgacaggtgtttttaatattttgtttggattgtcttctacctggtggttattcgctattttttggggattgaatggttggtttcaagggtggggctggccaggatgtactaaattattaacacattggtattctcaatcggagcgtggccgttggtggagtctttggaatacatcacacaacgttggtggtgcattaattcctttgattgttgctgtgtgcgcgcaatacttcggctggcgttcagccatgtttgtgcctgggatcatttgcattttaggaggtgtttttttaatcaatcgtttaagagataccccacaatcacttggtttacccgcgatagagcaatatcatgaagatttttctggttccacaaatcaccaccaggagaaaacagaactctcagtcaaagaaattctttggaattatgtgttgtgcaaccaatatatttggatactgtccatttcttatttgtttatttacattgtccgaacggccattaatgattggagcatgttgtatttaacggaagtgaaagagtattccttaatcactgcaggcagttgtgtcatatggtttgaagttggtggcttttttggaaatctggttgccggctggtcttctgataaaatatttcaaggtaaacgcaatccaatcaacgttctttttactgcaggcgtatttgccactttattgctgtttacgttaaccagggcatatacaccgttcctcgatgctttgtttctttttttctttggtttttttatctttggaccacaaatgatgatcggtatggcctgtgcggaattagcacataaaaaagcagcggcgactgcaactggctttgccggattttttgcttattgtttaggtgctgttctggccggtgctcctttgggtgcaattatcaaaaattacggctgggataatttcttcctcacattgtttgtttgctgcttgattccattacttttgatgctgccgctctggcatgtgaaagttaatccaaagtatcgtcaatcagaattttcaggcaaatccgaatttgcttag

SEQ ID NO: 55881 - protein, 455 aa, Legionella pneumophila subsp. pneumophila str. Philadelphia 1
MALLSFLKPAPYLDEIQDKNVVKRQYRYWRIRTFYAMYIGYALFYFTRKSFTFVMPALQSTLGMTKTELGMIASILSLSYGISKFLSGILGDKSNPRYLMAIGLILTGVFNILFGLSSTWWLFAIFWGLNGWFQGWGWPGCTKLLTHWYSQSERGRWWSLWNTSHNVGGALIPLIVAVCAQYFGWRSAMFVPGIICILGGVFLINRLRDTPQSLGLPAIEQYHEDFSGSTNHHQEKTELSVKEILWNYVLCNQYIWILSISYLFIYIVRTAINDWSMLYLTEVKEYSLITAGSCVIWFEVGGFFGNLVAGWSSDKIFQGKRNPINVLFTAGVFATLLLFTLTRAYTPFLDALFLFFFGFFIFGPQMMIGMACAELAHKKAAATATGFAGFFAYCLGAVLAGAPLGAIIKNYGWDNFFLTLFVCCLIPLLLMLPLWHVKVNPKYRQSEFSGKSEFA

SEQ ID NO: 55882 - DNA, 1368 bp, Legionella pneumophila str. Paris
  CDS (1)..(1368): transl_table=11
atggcattattgagttttctaaaacctgctccatatcttgatgaaattcaggataaaaacgttgttaaacagcaatatcgttattggcgtattcgcaccttttatgcaatgtatatagggtatgcgttgttttattttacgcgaaaaagttttaccttcgtgatgcctgcattgcaaagcaccttggggatgactaaaactgaactggggttgatcgccagcattttgagtttaagttatggcatcagcaaatttttgagcggaattctaggtgataaatctaatcctcgttatttaatggcgatcggactgattttgacaggtgtttttaatattttgtttggattgtcttccacctggtggttattcgctattttttggggattaaatggttggtttcaagggtggggctggccaggatgtactaaattattaacacattggtactcccaatcggagcgtggccgttggtggagtctttggaatacatcgcacaacgttggtggtgcattaattcctttgattgttgctgtgtgcgcgcaatatttcggctggcgttcagccatgtttgtgcctgggatcatctgcattttaggaggtatttttttaatcaatcgtttaagagatactccacaatcgcttggcttgcccgcgatagagcaatatcatgaagatttttctggttccgcaaatcaccaccaggagaaaacagaactctcagtcaaagaaattctttggaattatgtgttgtgcaaccaatatatttggatattgtccatttcttatttgtttatttacattgtccgaacggccattaatgattggagcatgttgtacttaacggaagtgaaggagtattccttaatcacagcaggcagttgtgtcatatggtttgaggttggcggtttttttggaaatctggttgccggctggtcttctgataaaatatttcaaggtaaacgcaacccaatcaatgttctttttaccgcaggagtatttgccactttgttactgtttacgttaaccagggcatatacaccgttcctcgactctttgtttctttttttctttggtttttttatctttggcccacaaatgatgattggtatggcttgtgcggaattagcacataagaaagcagcggcgactgcaactggctttgccggattttttgcctattgtttaggcgctgttctggcaggcgctcctttgggtgcaattatcaaaaattacggctgggataatttcttcctcacattatttatttgctgcttgattccattatttttgatgctgccgctctggcatgtgaaagtcaatccaaaatatcgtcaatcagaattttcaggcaaatccgagtttgcttag

SEQ ID NO: 55883 - protein, 455 aa, Legionella pneumophila str. Paris
MALLSFLKPAPYLDEIQDKNVVKQQYRYWRIRTFYAMYIGYALFYFTRKSFTFVMPALQSTLGMTKTELGLIASILSLSYGISKFLSGILGDKSNPRYLMAIGLILTGVFNILFGLSSTWWLFAIFWGLNGWFQGWGWPGCTKLLTHWYSQSERGRWWSLWNTSHNVGGALIPLIVAVCAQYFGWRSAMFVPGIICILGGIFLINRLRDTPQSLGLPAIEQYHEDFSGSANHHQEKTELSVKEILWNYVLCNQYIWILSISYLFIYIVRTAINDWSMLYLTEVKEYSLITAGSCVIWFEVGGFFGNLVAGWSSDKIFQGKRNPINVLFTAGVFATLLLFTLTRAYTPFLDSLFLFFFGFFIFGPQMMIGMACAELAHKKAAATATGFAGFFAYCLGAVLAGAPLGAIIKNYGWDNFFLTLFICCLIPLFLMLPLWHVKVNPKYRQSEFSGKSEFA

SEQ ID NO: 55884 - DNA, 1368 bp, Legionella pneumophila str. Lens
  CDS (1)..(1368): transl_table=11
atggcattattgagttttctaaaacctgctccatatcttgatgaaattcaggataagaacattgttaaacggcaatatcgttattggcgtattcgcaccttttatgcaatgtatatagggtatgcgttgttttattttacgcgaaagagctttaccttcgtgatgcctgcgttacaaagcaccttggggatgactaaaactgaactgggaatgatcgccagcattttgagtttaagttatggtatcagcaaatttttgagtggaattcttggtgataaatctaatcctcgttatttaatggcaatcgggctgattttgacaggtgtttttaatattttgtttggattgtcttctacctggtggttattcgctattttttggggattgaatggttggtttcaagggtggggctggccaggatgtactaaattattaacacattggtattcccaatccgaacgtggccgttggtggagtctttggaatacatcacacaacgttggtggtgcattaattcctttgattgttgctgtgtgcgcgcaatacttcggttggcgttcagccatgtttgtgcctgggatcatttgcattttaggaggtatttttttaatcaatcgtttaagagataccccacaatcacttggtttacccgcgatagagcaatatcatgaagactgttctggttccgcaaatcaccaccaggagaaaacagaactctcagtcaaagaaattctttggaattatgtgttgtgcaaccaatatatttggatattgtcgatttcttatttgtttatttacattgtccgaacggccattaatgattggagcatgttgtatttaacggaagtgaaagagtattccttaatcactgcaggcagttgtgtcatatggtttgaagttggtggcttttttggaaatctggttgccggctggtcttctgacaaaatatttcaaggcaaacgcaatccaatcaacgttctttttactgcaggcgtatttgccactttattgctgtttacgttaaccagggcatatacaccgttcctcgatgccttgtttctttttttctttggtttttttatctttggaccacaaatgatgattggtatggcctgtgcggaattagcacataagaaagcagcggcgactgcaactggctttgccggattttttgcttattgtttaggtgctgttctggccggcgctcctttgggcgcaattatcaaaaattacggctgggataatttcttcatcacattatttatttgctgcttgattccattatttttgatgctgccgctctggcatgtgaaagtcaatccaaaatatcgtcaatcagaattttcaggcaaatcagaatttgcttag

SEQ ID NO: 55885 - protein, 455 aa, Legionella pneumophila str. Lens
MALLSFLKPAPYLDEIQDKNIVKRQYRYWRIRTFYAMYIGYALFYFTRKSFTFVMPALQSTLGMTKTELGMIASILSLSYGISKFLSGILGDKSNPRYLMAIGLILTGVFNILFGLSSTWWLFAIFWGLNGWFQGWGWPGCTKLLTHWYSQSERGRWWSLWNTSHNVGGALIPLIVAVCAQYFGWRSAMFVPGIICILGGIFLINRLRDTPQSLGLPAIEQYHEDCSGSANHHQEKTELSVKEILWNYVLCNQYIWILSISYLFIYIVRTAINDWSMLYLTEVKEYSLITAGSCVIWFEVGGFFGNLVAGWSSDKIFQGKRNPINVLFTAGVFATLLLFTLTRAYTPFLDALFLFFFGFFIFGPQMMIGMACAELAHKKAAATATGFAGFFAYCLGAVLAGAPLGAIIKNYGWDNFFITLFICCLIPLFLMLPLWHVKVNPKYRQSEFSGKSEFA

SEQ ID NO: 55886 - DNA, 1371 bp, Photobacterium profundum SS9
  CDS (1)..(1371): transl_table=11
atgtttggcatctttaaacccgcggttcatactgcgaaactgtctggtggacaaatagaccctgtctataaacgtctacgttggcaactctttatgggcattttctttggctatgccgggtattatctggtccgtaaaaacttcactctggctatgcctttcttgattgaagaatacggctatagtcgtggtgatttaggtgttgctctggctgctgtttctattgcctatggcttatcaaagttcttaatggggagtgtgtcagaccgttctaatccgcgctatttcatggcggcaggtttgaccatgtcggcgttggtgatgctgtgctttggctttatgccttgggcaacaggcagtattagtgccatgtttatcttattgttcttgaacggttggtttcagggcatgggatggccagcttgtggccgaacaatggtgcactggtggtcacgcaaagaacgtggtgaattagtgtctgtttggaacgtcgcgcataacgtgggtggcggtttaatcggtccaatgttcttattgggtttgtgggcctttaacgatgactggcgtacggcattttatgtacctgcattcttcgcgttgttggttgctgctttcacattaatcgccatgcgtgatacgccgcaatcttgtggtttgcctgccattgaagaatacaaaaacgattacccagataactacgatgaatcacatgaaaaagagatgaccggtaaggaaatcttcttcaagtatatatttaacaacaaattattgtggtttatcgcaattgcgaacgcatttgtttacttgattcgttatggcgtacttgattgggctccagtgtacttaagtgaagtaaaagatttttcagtagataaatcgtcttgggcatatttcctttatgagtgggcgggtattcctggcacattactgtgtggttggatgtcagataaattctttaaaggtcgtcgtgcacctgctggcatcttatttatgtcacttgtaacgattgcggtattggtttactggtttaatccaccgggcaacccaatgatcgatatggcagcactggttgctatcggcttccttatttatggtccggtaatgcttattggcctgtatgcattagagctagcaccgaagaaagcggcgggtacggcagctggccttactggtctgtttggataccttggtggtgcggttgtagcaaatatcgtattaggctataccgttgaccactttggttgggatggtggcttcatggtgctggtttcagcctgtggtttgtcaatcttcttcctcgtgttggcactgatgggtgaaaacaaggagcatgaaaaacgtgccattgagcgcgcgcaacaaaatgcatga

SEQ ID NO: 55887 - protein, 456 aa, Photobacterium profundum SS9
MFGIFKPAVHTAKLSGGQIDPVYKRLRWQLFMGIFFGYAGYYLVRKNFTLAMPFLIEEYGYSRGDLGVALAAVSIAYGLSKFLMGSVSDRSNPRYFMAAGLTMSALVMLCFGFMPWATGSISAMFILLFLNGWFQGMGWPACGRTMVHWWSRKERGELVSVWNVAHNVGGGLIGPMFLLGLWAFNDDWRTAFYVPAFFALLVAAFTLIAMRDTPQSCGLPAIEEYKNDYPDNYDESHEKEMTGKEIFFKYIFNNKLLWFIAIANAFVYLIRYGVLDWAPVYLSEVKDFSVDKSSWAYFLYEWAGIPGTLLCGWMSDKFFKGRRAPAGILFMSLVTIAVLVYWFNPPGNPMIDMAALVAIGFLIYGPVMLIGLYALELAPKKAAGTAAGLTGLFGYLGGAVVANIVLGYTVDHFGWDGGFMVLVSACGLSIFFLVLALMGENKEHEKRAIERAQQNA

SEQ ID NO: 55888 - DNA, 1338 bp, Photobacterium profundum SS9
  CDS (1)..(1338): transl_table=11
atgatcggttttttaaagtcggaacagcatgtacagccagtgaaagatccaaagcaaatcgatgagctttataagtactggcgctttcatattatgcttaccatgtatgcgggttatgctttgttttatttcactcgcaaaagctttaattacgcgatgccggcaatgattgctgatttagggctcgataagtcagatattggcttaatggggacacttttttatattacttacggtgtctctaagtttttatctggcatcgtgtctgatcggtcaaacccacgctattttatgggaataggattggtcatgacgggtattgtgaatattctttttggcttttctagttctatcgttatgttcaccttgctgtggatgaccaatgcgtggtttcaagggtggggctggccctcttgttctaaattgcttacaacctggtactcccgttcagagcgtggcttttggtggtctttatggaataccgcacataatgtagggggggcattgatccctttactcgtgggtgttgtgactttgcattacggctggcgatatggctttattattcccggtattttagctgtttttgtgggactatttctttgttggcgcttgcgtgataaacctgtgaccttggggctaccaactgttgggcactggcgtaacgatgcgctagagttagcgcaagaaaatgaagggttaggcttaactaacactgaaatattaaagaaatatgttttaaataataaatatatttggttactggcttttagttatgttcttgtttatatcgtgcgaactgccatcaatgattggggcaatctctatctgactgaacaacatcattacagtctaatcaccgcgaatgctgccttgtcgttattcgaagttggtggttttgttggttctttagttgcgggttgggggtcagataaaatatttgacggaaatcgtgggcccatgaacctgatttttgccattgggatctttttatcggttgcagctttatggttaatgccgatgactgggtttgtgctacaagcgggatgtttctttgcaatcggtttttttgttttcggtccccagatgttgatcggtatggctgctgcagaatgctcgcataaagactctgtaggcgctgctacaggctttgttggtctgtttgcctatatgggggcggctttagcggggtatcctctagcgttaattatggagcagtaccattgggctggcttctttacagttatttcatgtgccgctgcagtggtaggtctactgttgttaccgttcttaaaagcacaaacgtcagatgtaagtgctgcagctatacccaagtaa

SEQ ID NO: 55889 - protein, 445 aa, Photobacterium profundum SS9
MIGFLKSEQHVQPVKDPKQIDELYKYWRFHIMLTMYAGYALFYFTRKSFNYAMPAMIADLGLDKSDIGLMGTLFYITYGVSKFLSGIVSDRSNPRYFMGIGLVMTGIVNILFGFSSSIVMFTLLWMTNAWFQGWGWPSCSKLLTTWYSRSERGFWWSLWNTAHNVGGALIPLLVGVVTLHYGWRYGFIIPGILAVFVGLFLCWRLRDKPVTLGLPTVGHWRNDALELAQENEGLGLTNTEILKKYVLNNKYIWLLAFSYVLVYIVRTAINDWGNLYLTEQHHYSLITANAALSLFEVGGFVGSLVAGWGSDKIFDGNRGPMNLIFAIGIFLSVAALWLMPMTGFVLQAGCFFAIGFFVFGPQMLIGMAAAECSHKDSVGAATGFVGLFAYMGAALAGYPLALIMEQYHWAGFFTVISCAAAVVGLLLLPFLKAQTSDVSAAAIPK

SEQ ID NO: 55890 - DNA, 1326 bp, Photobacterium profundum SS9
  CDS (1)..(1326): transl_table=11
atgataggtttcctaacatcagagcaacctacaaaaataataaccgataaacaacaaatcgacgccacgtacaaatactggcgattgcatttaatgttttcaatgtatatcggttacggcatgttttattttacccgaaaaagtctcaactttgccatgccagctatgttagctgaccttggcttagagcattcagacatcgggtttctcggcaccctattctatatcacgtatggcgtatcaaaatttgtttctggtatggtcagcgaccagtctaaacccagctatttcatgggattaggtttgatcgctaccggaatcatcaatattgcatttggtttaagttcatctctggcgatgttcgccattttgtggacattgaatgcctttttccaaggctggggttggcccccctgcgctaaattgctcacaacatggtattcccgtacagagcgtggcttttggtggtcaatctggaatacttgccacaatttagggggagctttagttccgctgggtattggttttaccgccatgactttgggttggcgatatggctttattattcccggcattctggcaattttagtgggtattgtgctgtgttttcgcatgcgagataagcctacaaccatggggttaccaaccgtagggcaatggcgaaacgatgaattagagttattacaagaacaagaaggccgagggctatcttttcgccaaatattgaaaacctatgtcattggcaataaatatatctggttgttgtgtagctcgtactttttagtatatgtggtgcgcattgcaattaatgattggggaaatctctacttaattgaacgtcatggttttgatttattttcagccaatgccgccgtttcaatgttcgaagtcggaggatttctaggttcattgtttggcggctggggttcagatcgattctttcatggtaatcgtgcccccatgaacttaattttcgcattgggtattttcatttcagtggccgcattatggcttacacctatgaataacttttcagtcttggcctgttgttttttctccattggattctttatttttggcccacaaatgatgatcggaatggctgcagccgaatgctcacacaaaggtgttgctggaacagcgactggatttgtcggcttgtttggatatttaggggccgcgctggcaagctacccaatatcattggttatcgagcaatttagctgggatggtttcttcagcattattacattttcggccgcctctattggcctgctgatattgccatttgttaaggctcagcaaccttcaattactgctacctag

SEQ ID NO: 55891 - protein, 441 aa, Photobacterium profundum SS9
MIGFLTSEQPTKIITDKQQIDATYKYWRLHLMFSMYIGYGMFYFTRKSLNFAMPAMLADLGLEHSDIGFLGTLFYITYGVSKFVSGMVSDQSKPSYFMGLGLIATGIINIAFGLSSSLAMFAILWTLNAFFQGWGWPPCAKLLTTWYSRTERGFWWSIWNTCHNLGGALVPLGIGFTAMTLGWRYGFIIPGILAILVGIVLCFRMRDKPTTMGLPTVGQWRNDELELLQEQEGRGLSFRQILKTYVIGNKYIWLLCSSYFLVYVVRIAINDWGNLYLIERHGFDLFSANAAVSMFEVGGFLGSLFGGWGSDRFFHGNRAPMNLIFALGIFISVAALWLTPMNNFSVLACCFFSIGFFIFGPQMMIGMAAAECSHKGVAGTATGFVGLFGYLGAALASYPISLVIEQFSWDGFFSIITFSAASIGLLILPFVKAQQPSITAT

SEQ ID NO: 55892 - DNA, 1359 bp, Salmonella enterica subsp. enterica serovar Paratyphi A str. ATCC
  CDS (1)..(1359): transl_table=11
atgttgagtatttttaaaccagcgccgcataaagcgcgcttgccagcggcggagattgatccgacctatcgccgattacgttggcagattttcctggggatattctttggctatgccgcgtattatctggtgcgcaagaactttgccctcgcgatgccctacctggtagaacagggtttttcacgcggcgatctgggctttgcgctgtccgggatttccatcgcttatggtttttcgaaatttataatgggttcggtgtccgatcgctcgaatccgcgcgttttcctgccggcagggttgattctggccgcagcagtcatgttgtttatgggctttgtgccgtgggcgacatccagcatcgccgtgatgtttgtgctgttgttcctttgcggctggttccaggggatggggtggccgccgtgcggacgtacgatggttcactggtggtcgcagaaagagcgcggcggcattgtgtcggtctggaactgtgcgcataacgtcggcggcgggatcccgtcactgctgttcctgctggggatggcgtggtttaacgactggaaagcggcgctctatatgccagcctttggcgcgattgtggtggcgctgttcgctttcgcaatgatgcgcgatacgccgcaatcctgcggtctgccgcctatcgaagagtataaaaacgactatccggatgactacaacgaaaaagcggaagaagagctgactgcgaagcagatcttcatgcagtacgtactgccgaacaaattactgtggtatatcgctatcgccaacgtgtttgtttatctgctgcgctacggcatcctcgactggtcaccgacctacctgaaagaagtgaagcatttcgcactggataaatcctcctgggcctacttcctgtatgaatacgcgggtattccgggcacgctgctgtgtggctggatgtcggataaagtcttccgcggcaaccgtggcgcgaccggcgtattctttatgaccctggtgactatcgcgaccatcgtttactggatgaacccggcagggaacccgaacgttgatatggcttgtatgattatcatcggcttcctgatctacggcccggtaatgttgatcggtctgcacgcgctggaactggcgccgaaaaaagcggcgggtacggcggcgggctttaccggtctgtttggttacctgggcggttctgtcgctgcaagcgccattgtgggttataccgttgacttcttcggttgggatggcggctttatggtgatgattggcggcagcattctggcggtaatcctgctggtggtcgtgatgattggtgaaaaacgccatcatgatgagctgcagttaaaacgcaacggaggctaa

SEQ ID NO: 55893 - protein, 452 aa, Salmonella enterica subsp. enterica serovar Paratyphi A str. ATCC
MLSIFKPAPHKARLPAAEIDPTYRRLRWQIFLGIFFGYAAYYLVRKNFALAMPYLVEQGFSRGDLGFALSGISIAYGFSKFIMGSVSDRSNPRVFLPAGLILAAAVMLFMGFVPWATSSIAVMFVLLFLCGWFQGMGWPPCGRTMVHWWSQKERGGIVSVWNCAHNVGGGIPSLLFLLGMAWFNDWKAALYMPAFGAIVVALFAFAMMRDTPQSCGLPPIEEYKNDYPDDYNEKAEEELTAKQIFMQYVLPNKLLWYIAIANVFVYLLRYGILDWSPTYLKEVKHFALDKSSWAYFLYEYAGIPGTLLCGWMSDKVFRGNRGATGVFFMTLVTIATIVYWMNPAGNPNVDMACMIIIGFLIYGPVMLIGLHALELAPKKAAGTAAGFTGLFGYLGGSVAASAIVGYTVDFFGWDGGFMVMIGGSILAVILLVVVMIGEKRHHDELQLKRNGG

SEQ ID NO: 55894 - DNA, 1317 bp, Francisella tularensis subsp. tularensis SCHU S4
  CDS (1)..(1317): transl_table=11
atgaatttccttaaacctgcaaaagctctgcctttactagctaaagagcaaattcaaaaagcataccctcactggcgcctaagaatgttcttagtggcttatataggttactttatatactatttcggtcgtagtagttttgatgtctcaaaacaatatattacaaccctaactccagatgagcttggattaattggagctggtctaggtattgcctatggtataagtaagtttctaatgggaaatatctctgatagaagtaatgccaaagtatttttagctatcggattatttatcacaggacttataaaccttctattgccaagcttattatcattaggcgtacttgtaatgtttatcgcaatgcttgtaaacggttgggtgcaaggtatgggctggccagcatgtgctcgtataatgacacactggttttgtgctaatgagcgtggtactaaaatgggtatttggaatactgctcataacgttggagcaggttttttagctattgctgttgtgcctattggattactgctatttcatgatgactggcatggtcttttttatgttgcaggagcaatgtgtatttttgtatcaattttagtcctgatatttggtgctgacactcctcaatcagttggcttaccagcaatagaagtatataaaggttatactactgccgaagctcatcatgaacaagagttttcagctaaagaaatctttttaaaatatgtattaaataataagtgggtttggttaattgccatagcgaatgcatttgtttattgtgctaggtatggtcttcttagctggtcaacttattatcttgttaatgtaaagcatatgtctaccactaccggacttttaggttttgcattatttgaattaccagcaattccaggaactataataattggttggataacagataagtattttggtagtcgtagagccccaatgggtgtaatatgtatgcttttatttatttgtgctttatttgtatattggtatagtgatactgcttgggtattattactttcattatctgcgatgggagtactaatatatgggcctgtcgctttgatagggatattggctttggacttagtacctaaaaaagctggtgggactgcagctgggtttacaggattatttggctattttttaggtacagttggagcacaagctgtgattggtattattgccacaatgctaggatgggacgctgtatttatatttttattaggttcatgtataattgccatagcacttctagctgtttgctggaatcttagttataatcaagctttcagtgattaa

SEQ ID NO: 55895 - protein, 438 aa, Francisella tularensis subsp. tularensis SCHU S4
MNFLKPAKALPLLAKEQIQKAYPHWRLRMFLVAYIGYFIYYFGRSSFDVSKQYITTLTPDELGLIGAGLGIAYGISKFLMGNISDRSNAKVFLAIGLFITGLINLLLPSLLSLGVLVMFIAMLVNGWVQGMGWPACARIMTHWFCANERGTKMGIWNTAHNVGAGFLAIAVVPIGLLLFHDDWHGLFYVAGAMCIFVSILVLIFGADTPQSVGLPAIEVYKGYTTAEAHHEQEFSAKEIFLKYVLNNKWVWLIAIANAFVYCARYGLLSWSTYYLVNVKHMSTTTGLLGFALFELPAIPGTIIIGWITDKYFGSRRAPMGVICMLLFICALFVYWYSDTAWVLLLSLSAMGVLIYGPVALIGILALDLVPKKAGGTAAGFTGLFGYFLGTVGAQAVIGIIATMLGWDAVFIFLLGSCIIAIALLAVCWNLSYNQAFSD

SEQ ID NO: 55896 - DNA, 1359 bp, Staphylococcus epidermidis RP62A
  CDS (1)..(1359): transl_table=11
atgtttaatttcttaaaaccagctagacatatcaaatcattgccatcagaaaaagtagatgatacgtataaaagactacgctttcaagtctttttaggaatatttatcggttatgctggttactatttattaagaaagaacttctctttagcaatgccttcattaattgagcaaggctttagtaaaggggaattaggtattgcattatctgcagtatctatcgcatatggctttagtaaatttgtaatgggcactgtcagcgatcgaagtaatgctcggatgttcttaactttaggtttagtattgacagcaattattaacttattattaggatttattccattctttacttcaagcataactattatgtttatcatgctgtttttagttggatggttccaaggaatgggctggccaccatctggacgtgtgttagttcattggtttagtgtcagcgaacgtggaagcaaaacgtcaatatggaatgtagcacataatgtaggcggaggtttaatggcacctattgctacgtggggtatttccatgactgcattatacaacttcggttatttaaaagggtttgaaggtgtctttatataccctgcactattggctatcattattgccatcttgtcttacatactaattagagatacaccacaatctcagggtttaccaccaattgagcagtataaaaatgattatgccacttcaactaaacaaacaattgaaacagaactaactacgaaagaaatattatttaaatatgtacttaataacaaatgggtatgggcgattgcttttacaaacattttcgtttattttgtgcgttatggtgttttggactgggctccgacatacttaagtgaggaaaagcattttgatttaagtgcttcaggttgggcttacttcttatacgaatgggcaggaattccgggcacgctactctgtggttatctatctgacaaactatttaaaggtcgccgtggtccagcaggcttcttctttatgttaggcgtaacaatctttatccttatatattggttaaatccaccaggtcacgcatggttagataatctttcattaattggtattggtttcttaatttatggtccagtcatgttaattggtttacaagcgttagattatgttcctaaaaaagcagctggcactgcggctggtctaactggtctatttggatacttattcggtgcagttatggctaatattgtattagggtttgtagttcaacattttggatggcatattggctttgtgttattaacagtcatcagcatactcgctatgttatgtttcattttaacttggaataaacgtggtcaagaacaaatcgactag

SEQ ID NO: 55897 - protein, 452 aa, Staphylococcus epidermidis RP62A
MFNFLKPARHIKSLPSEKVDDTYKRLRFQVFLGIFIGYAGYYLLRKNFSLAMPSLIEQGFSKGELGIALSAVSIAYGFSKFVMGTVSDRSNARMFLTLGLVLTAIINLLLGFIPFFTSSITIMFIMLFLVGWFQGMGWPPSGRVLVHWFSVSERGSKTSIWNVAHNVGGGLMAPIATWGISMTALYNFGYLKGFEGVFIYPALLAIIIAILSYILIRDTPQSQGLPPIEQYKNDYATSTKQTIETELTTKEILFKYVLNNKWVWAIAFTNIFVYFVRYGVLDWAPTYLSEEKHFDLSASGWAYFLYEWAGIPGTLLCGYLSDKLFKGRRGPAGFFFMLGVTIFILIYWLNPPGHAWLDNLSLIGIGFLIYGPVMLIGLQALDYVPKKAAGTAAGLTGLFGYLFGAVMANIVLGFVVQHFGWHIGFVLLTVISILAMLCFILTWNKRGQEQID

SEQ ID NO: 55898 - DNA, 1365 bp, Vibrio fischeri ES114
  CDS (1)..(1365): transl_table=11
atgtttggtgtttttaaacctaaagcacatatcgcacaactcccaacaggagaaatcaatagcacttataaacggttacggtggcaactttttctcggcattttctttggttatgctggatactatcttgttcgaaaaaacttcagtttagcaatgccttaccttatcgaacaaggatacagtcgaggcgatttaggggttgctctagctgcggtatctatcgcttatggtttatctaaattcttaatgggaagtgtttctgaccgttccaatcctcgatattttctcagtgctggtttggtcatgtctgctctcgttatgttttgttttggctttatgccttgggcaacaggcagcattaccgccatgtttatcttgttatttttaaatggttggtttcaaggtatgggatggcctgcctgtggtagaaccatggtgcactggtggtcaagaaaagagcgtggtgaaatagtttcggtatggaacgttgcacacaacgttggaggcgggttaattggcccaatgttccttcttggtttatgggcatttaatgatgattggcgaactgcgttttacgtaccagctttctttgctcttcttgttgctttttttgtttggttaacagtaagagatactcctcaatcatgcggtcttccgccaattgaagaatttaaaaacgactacccagatgattatgattccgcatatgaaacagaaatgacggcgaaagaaatcttcttcaagtatgttttttcaaataaattattgtggtctattgcgatagccaacgcctttgtctacctaatccgttatggcgttttagattgggctcctgtttacttaaaagaagccaaagaattcactgttgataaatcttcttgggcatatttcctatatgagtgggctggtattccaggcacccttctatgtggttggatttctgataagttatttaaagggaaacgagcgcctgctgggattctatttatggcattagtgactattgcagtattggtttactggtttaaccctgcaggaaacccaaccgttgatatgatcgcattagttgctattggtttcttaatctatggtccggtaatgcttattggtttatatgcgttggaattagcacctaaaaaggcggcgggtacagcggcaggattaactggattatttggttaccttggtggagccgttgcagcgaacgcactgcttggttataccgttgaccactttggttgggatggtggctttatgatcttagttgcctcttgtgtcatctctattgtttgcctaacttatgcactaattggtgagcaaaagcatcataaagaaaagattgagaaagaaagtcacatggcttaa

SEQ ID NO: 55899 - protein, 454 aa, Vibrio fischeri ES114
MFGVFKPKAHIAQLPTGEINSTYKRLRWQLFLGIFFGYAGYYLVRKNFSLAMPYLIEQGYSRGDLGVALAAVSIAYGLSKFLMGSVSDRSNPRYFLSAGLVMSALVMFCFGFMPWATGSITAMFILLFLNGWFQGMGWPACGRTMVHWWSRKERGEIVSVWNVAHNVGGGLIGPMFLLGLWAFNDDWRTAFYVPAFFALLVAFFVWLTVRDTPQSCGLPPIEEFKNDYPDDYDSAYETEMTAKEIFFKYVFSNKLLWSIAIANAFVYLIRYGVLDWAPVYLKEAKEFTVDKSSWAYFLYEWAGIPGTLLCGWISDKLFKGKRAPAGILFMALVTIAVLVYWFNPAGNPTVDMIALVAIGFLIYGPVMLIGLYALELAPKKAAGTAAGLTGLFGYLGGAVAANALLGYTVDHFGWDGGFMILVASCVISIVCLTYALIGEQKHHKEKIEKESHMA

SEQ ID NO: 55900 - DNA, 1341 bp, Vibrio fischeri ES114
  CDS (1)..(1341): transl_table=11
atgtttggatttttacgctcaaccacatcaaatgacaacacacttagtgatactcaagtaaacgaaagttatcgctattggcgtttacatatcatgatcggcatgtacattggttatgctggtttttactttactcgtaaaacctttaactatgccgctcctgctatgatcacagatttagggcttgataaaggtgatctcggtttaatcggcactcttttctatatctcgtacggcttatcaaaatttctttcaggcaccatttctgatcgctctaaccctcgttattttatggggctaggattaattgccaccggactgattaatattgcttttggcttctctagttcattagcggcttttatctctctgtgggtacttaatgcatggtttcaaggatggggttggccttcatgttcaaagctcctcaccacttggtactctcgatctgaaagagggttccgttgggcaatatggaacacagcacacaacatcggtggagcgctaatccctattcttgtgggctatttaacccttcattacagttggcgagaaggttttatcttaccgggtattattggtgtcgcaattggacttattgtatgttggcgtctacgtgataaacccaccaccatgggcttacctagtgtaggaaaatggcgtaatgatccactagagctcgcacaagaaaaccatggccaaggattaagctatcgagagattttaaaaacctatgtgtttagtaataagtacatttggttactcgcttttagctatgtattggtttacatcgtaagaaccgcagtcaatgactggggaaacctgtatctcacagaagaacacaactacagcttaattaatgcaaatgccgcattatccctatttgaaattggcggttttgtgggctctcttgttgctggatggggttctgacaagctctttgggggcaatcgtggacctatgaatattttgttcgctattggtatttttctttccgtttcagcgttatggcttatgccgttaaccaattttgtgtttcaagctgctgggctattttctgttggtttctttgtttttggaccacaaatgttaattggtatggctgcggctgaatgctcacacaaagactcggcaggcgccgctacagggtttgttggattatttgcttatatgggggcagcgctttcaggctacccattagcggtgattttagaaacctatggatggacagggttctttatcaccatttcgacttgtgctgctgtcatagggttactgcttctgccctttttacaagctcaatcacctcaaaaaccgattgaaacaagagtacgcttataa

SEQ ID NO: 55901 - protein, 446 aa, Vibrio fischeri ES114
MFGFLRSTTSNDNTLSDTQVNESYRYWRLHIMIGMYIGYAGFYFTRKTFNYAAPAMITDLGLDKGDLGLIGTLFYISYGLSKFLSGTISDRSNPRYFMGLGLIATGLINIAFGFSSSLAAFISLWVLNAWFQGWGWPSCSKLLTTWYSRSERGFRWAIWNTAHNIGGALIPILVGYLTLHYSWREGFILPGIIGVAIGLIVCWRLRDKPTTMGLPSVGKWRNDPLELAQENHGQGLSYREILKTYVFSNKYIWLLAFSYVLVYIVRTAVNDWGNLYLTEEHNYSLINANAALSLFEIGGFVGSLVAGWGSDKLFGGNRGPMNILFAIGIFLSVSALWLMPLTNFVFQAAGLFSVGFFVFGPQMLIGMAAAECSHKDSAGAATGFVGLFAYMGAALSGYPLAVILETYGWTGFFITISTCAAVIGLLLLPFLQAQSPQKPIETRVRL

SEQ ID NO: 55902 - DNA, 1395 bp, Vibrio fischeri ES114
  CDS (1)..(1395): transl_table=11
atgttaaagttcttagatcaggttagaaaaccaacattagatcttccggtagaagtacgaagaaaaatgtggtttaagcctttcctacaatcttacctagttgtatttattggttatttaaccatgtatctgatccgtaaaaacttcaatgtcgcacaaaacgacatgatttcaacttacggattatcaatgactgacttaggtctgattggtcttggcttttcaattacttatggtattggtaaaaccgttgtgtcttactatgctgatggtaaaaacaccaaacaattcttacctttcatgctgattctttctggtttagctatgctaggttttagcttcagtatgggtggcggcagcgcgagtctattcatgatggtcgctttctatgcgttaagtggttttttccaaagtacaggtggtccttcaagttactcaaccatcactaaatggacgcctcgtaataaacgtggttcatatttaggtctttggaatatgtcacacaacgttggtggtgctggtgcggctggtgttgctctatttggtgcaaactacctatttgatggcaacgttatcggtatgttcgtattcccatctatcattgcaatcattgttggctttattggtatgcgttttggtagtgactcaccagaagcttatggcctaggtaaagttgaagaactttttgatgaagagatcagtgaagaagatactgctgctgaagaaaatcaaatgacgaaaaaagagatctttgttgagtatgtacttaaaaacaaagtgatctggttactctgctttgcgaatattttcttatacattgttcgtattggtatcgatcaatggtctacggtttacgcttatcaagaattaggtctatcaaaagaaactgctatttcaggctttactctatttgaagtcggcgctcttgttggcacattaatgtggggttatttatctgaccttgctaacggtcgtcgtgctttggttgcttgtgtttctcttggcttaatcattgtgtcactagagttttaccaacacgcgaccagtgagttcatgtatcttgcttctctgtttgtacttggtttcttagtgtttggtcctcagttattaattggtgttgctgcggttggttttgttcccaaaaaagccatcagtgttgccgatggtgtgaaaggtactttcgcttacttaattggtgacagctttgcaaaactaggccttggtatgattgcagatggtactcctatctttggcttaaccggttggaaaggcacatttgcggcgttagatacttctgctgcaatctgtattttcttacttgtgtttgtcgctatcgccgaagagaagaaaatccgtcacgctaaaaaaatgcacctagctgcaaaacaagcgtaa

SEQ ID NO: 55903 - protein, 464 aa, Vibrio fischeri ES114
MLKFLDQVRKPTLDLPVEVRRKMWFKPFLQSYLVVFIGYLTMYLIRKNFNVAQNDMISTYGLSMTDLGLIGLGFSITYGIGKTVVSYYADGKNTKQFLPFMLILSGLAMLGFSFSMGGGSASLFMMVAFYALSGFFQSTGGPSSYSTITKWTPRNKRGSYLGLWNMSHNVGGAGAAGVALFGANYLFDGNVIGMFVFPSIIAIIVGFIGMRFGSDSPEAYGLGKVEELFDEEISEEDTAAEENQMTKKEIFVEYVLKNKVIWLLCFANIFLYIVRIGIDQWSTVYAYQELGLSKETAISGFTLFEVGALVGTLMWGYLSDLANGRRALVACVSLGLIIVSLEFYQHATSEFMYLASLFVLGFLVFGPQLLIGVAAVGFVPKKAISVADGVKGTFAYLIGDSFAKLGLGMIADGTPIFGLTGWKGTFAALDTSAAICIFLLVFVAIAEEKKIRHAKKMHLAAKQA

SEQ ID NO: 55904 - DNA, 1392 bp, Salmonella enterica subsp. enterica serovar Choleraesuis str
  CDS (1)..(1392): transl_table=11
atgttaacaatattaaaaacagggcaatcggcgcataaagtcccaccggaaaaagtccaggctacgtatggtcgatatcgtatacaggcattgttaagcgtatttctgggatatctcgcttactatatagtcagaaacaacttcacattatcgacgccttatttaaaagagcaattggatctcagcgctacgcaaatcggcctgctgagtagctgtatgcttattgcttacggaatcagtaaaggcgtaatgagcagtctggcggataaagccagcccaaaagtcttcatggcgtgcggtctggtactctgcgcgattgttaacgttgggctgggattcagtagcgcattctggatatttgccgctctggtggtcttcaatggcctttttcagggcatgggcgtcggcccctcgtttattactattgcaaactggttccctcgtcgggaacgcggacgcgtaggcgccttctggaatatctcgcataacgttggcggcgggatcgtcgcgcctatcgtcggtgcggcttttgcgatattgggcagcgaacactggcaaagcgccagttatatcgttccggcctgcgtcgccgtcatttttgccttaattgttctggtcttgggaaaaggttcgccgcgcgaagaaggtcttccctccctggaacagatgatgccggaagaaaaagtcgtactgaaaacgaagaatacggcaaaagcgccggaaaatatgagcgcatggcaaatcttctgtacttatgtgctgcgcaataaaaatgcctggtatatttcgctggtggatgtcttcgtctatatggtgcggtttggcatgattagctggttgcctatctatctgttgacagtaaaacacttttcaaaagaacagatgagcgtcgcgtttctctttttcgagtgggcggcgattccctccacgctactggcaggctggctgtcagataaactgtttaagggccgcagaatgccgttagccatgatttgcatggcgctgatttttgtctgtctgatcggatactggaaaagtgaatctttgctgatggtaacgattttcgccgccattgtaggttgtctgatttacgtcccgcagttcctcgcgtccgtacagacaatggagatagtccccagctttgccgtaggttccgccgtcggtttacgtgggttcatgagctatattttcggcgcctcgttgggcaccagcctgtttggtgtaatggtggataaacttggctggtacggcggattttatcttctgatgggcggcatcgtgtgctgcattctattctgttacctctcccatcgcggcgcgctggaactggaacgccagcgccagaatgcgttacataatcaggactcactgcagcttgcggacgcgcaataa

SEQ ID NO: 55905 - protein, 463 aa, Salmonella enterica subsp. enterica serovar Choleraesuis str
MLTILKTGQSAHKVPPEKVQATYGRYRIQALLSVFLGYLAYYIVRNNFTLSTPYLKEQLDLSATQIGLLSSCMLIAYGISKGVMSSLADKASPKVFMACGLVLCAIVNVGLGFSSAFWIFAALVVFNGLFQGMGVGPSFITIANWFPRRERGRVGAFWNISHNVGGGIVAPIVGAAFAILGSEHWQSASYIVPACVAVIFALIVLVLGKGSPREEGLPSLEQMMPEEKVVLKTKNTAKAPENMSAWQIFCTYVLRNKNAWYISLVDVFVYMVRFGMISWLPIYLLTVKHFSKEQMSVAFLFFEWAAIPSTLLAGWLSDKLFKGRRMPLAMICMALIFVCLIGYWKSESLLMVTIFAAIVGCLIYVPQFLASVQTMEIVPSFAVGSAVGLRGFMSYIFGASLGTSLFGVMVDKLGWYGGFYLLMGGIVCCILFCYLSHRGALELERQRQNALHNQDSLQLADAQ

SEQ ID NO: 55906 - DNA, 1368 bp, Chlamydophila abortus S26/3
  CDS (1)..(1368): transl_table=11
atgaatatttggaccaaattctttcagcctcccaagcacattaaagaacttgatgatccagaattagtcaaaaaacaatacaagtattggagaatccgcatcttctatagcatgtttatagggtatgtcttctattatttcacaaggaagagttttacctttgccatgcccacactaatgacagatcttggctttgataaagcgcaactggggatcatcggaagtactttatacatcagttacggtgtgagcaaatttgttagtggtgtgatatctgaccagtccaatcctcgttattttatggcgctgggtttaattgttacaggattcactaatatcttcttcggaatgtcttcctcgatcttgttatttgcattatggtgggggcttaacggttggtttcaaggctggggctggcctccatgtgcccgtttactcactcactggtattcgaaatctgaaagaggaacatggtggagtgtgtggagcacttcgcacaatattggtggggcattaattcctattctcacaggatttgctattgattgttgtggttggcgcggggcgatgtttgtccccggtatactctgtattctcatgggattagttttaattaatcgccttcgtgatacgccacaatccctaggtcttccttccattgaaaaattccgaaaaaaacaggaatctcaaaaacacgaagaaaccactgtagatattttagaagaagaagcagaaaaagagctttctactagagaaatcctctttacttatgtgttgaaaaacaaatggatctggttattgtcctttgcttcatttttcatttatgttgtccgtatggccgtcaatgattggagcgctttattcttgattgaaacaaagcgttacgtagctgttaaagccaatttctgtgtttctctatttgagattggcggactttttggcatgttaattgctggatggttatctgataaaatttccaaaggcaaacgcggtcctatgaatgttgtattttctttaggattgctattctccattttaggcatgtggtacagccgtaatcaagatatgtggtggttagatggctcccttctttttgttattggctttttcttgtttggtcctcaaatgatgatagggttagcagctgctgaactatcacataaaaaagctgcaggtacggctagcggctttgcaggatggtttgcgtattttggagcagcgtttgcaggttatccgttaggaaaaatagctcaagattggggctggagaggtttctttattgcccttctgggttgcgctttaatagctttggttttgttccttcctacatggaatgcctcagagagaagtttacaaactagaaaataa

SEQ ID NO: 55907 - protein, 455 aa, Chlamydophila abortus S26/3
MNIWTKFFQPPKHIKELDDPELVKKQYKYWRIRIFYSMFIGYVFYYFTRKSFTFAMPTLMTDLGFDKAQLGIIGSTLYISYGVSKFVSGVISDQSNPRYFMALGLIVTGFTNIFFGMSSSILLFALWWGLNGWFQGWGWPPCARLLTHWYSKSERGTWWSVWSTSHNIGGALIPILTGFAIDCCGWRGAMFVPGILCILMGLVLINRLRDTPQSLGLPSIEKFRKKQESQKHEETTVDILEEEAEKELSTREILFTYVLKNKWIWLLSFASFFIYVVRMAVNDWSALFLIETKRYVAVKANFCVSLFEIGGLFGMLIAGWLSDKISKGKRGPMNVVFSLGLLFSILGMWYSRNQDMWWLDGSLLFVIGFFLFGPQMMIGLAAAELSHKKAAGTASGFAGWFAYFGAAFAGYPLGKIAQDWGWRGFFIALLGCALIALVLFLPTWNASERSLQTRK

SEQ ID NO: 55908 - DNA, 1350 bp, Pseudomonas syringae pv. syringae B728a
  CDS (1)..(1350): transl_table=11
atgtttgggtttttccgtcctgccaggcatcaggcaccccttcccgaagaaaaggtcgacagcacctatcggcgtctgcgctggcagatcttcgcaggcatctttatcggctatgcgggttactacctgctgcgcaagaatttctcgctggcgatgccgtatctgatcgacgaaggctatacgcgtggccagctgggcgtggcgatgtctgccattgccattgcctacggcttgtcgaaattcctcatgggcatcgtttcggatcgctccaacccgcgttacttcctgccgttcggcctgctggtctctgccgggatcatgttcatcttcggcttcgcgccgtgggcgacgtccagtgtcacgatcatgttcgtgctgctgttcatcaatggctgggcacagggcatgggctggccgccgagcgggcggacaatggttcactggtggtcgcagaaagagcgcggcggtgtggtgtcggtgtggaacgtggcgcacaacgtcggcggcggcctgatcggcccgctgttcctgctcggcatgggctggaccaacgactggcatgcggcgttctacgtgccggcggcggttgcgttgctggtcgcggtgttcgccttcgcgaccatgcgtgacaccccgcaatcggtcggcctgccgcctatcgagcactacaagaacgattacccggaaggctacgatgccagccacgaggaagaattcagcgcccgggagatcttcgtcaagtacgtgctgcgcaacaagttcctgtggtacatcgccatggccaacgtgttcgtttatctgctgcgctatggcgtactggactgggcaccgacctatctcaaggaagccaaacacttcacggtcgacaagacctcctgggcttactttctgtacgagtgggcgggcattccgggcacgctgctgtgcggctggatgtcggacaagatcttcaagggcaatcgcggcctgaccggcatggtgttcatgtttctggtgaccatcgccacgctggtgtactggctgaaccctgaaggcaatccgaccgtcgacatgatcgcgctggtgtccatcggtttcctgatctacggaccggtgatgctgatcggcctgcaggcgctggaactggcaccgaagaaggcagcaggcacggccgccggctttaccgggctgttcggctatctgggcgggtcggtcgcggccagcgcagcgatgggctacacggttgaccacttcggctgggatggcggcttcgtgctgttgatcggcgcgtgcattctggcgatggtgttccttgcgccgacgctgcggcacaaacaggtcgccagcacatctcgcgacaccaaaggctga

SEQ ID NO: 55909 - protein, 449 aa, Pseudomonas syringae pv. syringae B728a
MFGFFRPARHQAPLPEEKVDSTYRRLRWQIFAGIFIGYAGYYLLRKNFSLAMPYLIDEGYTRGQLGVAMSAIAIAYGLSKFLMGIVSDRSNPRYFLPFGLLVSAGIMFIFGFAPWATSSVTIMFVLLFINGWAQGMGWPPSGRTMVHWWSQKERGGVVSVWNVAHNVGGGLIGPLFLLGMGWTNDWHAAFYVPAAVALLVAVFAFATMRDTPQSVGLPPIEHYKNDYPEGYDASHEEEFSAREIFVKYVLRNKFLWYIAMANVFVYLLRYGVLDWAPTYLKEAKHFTVDKTSWAYFLYEWAGIPGTLLCGWMSDKIFKGNRGLTGMVFMFLVTIATLVYWLNPEGNPTVDMIALVSIGFLIYGPVMLIGLQALELAPKKAAGTAAGFTGLFGYLGGSVAASAAMGYTVDHFGWDGGFVLLIGACILAMVFLAPTLRHKQVASTSRDTKG

SEQ ID NO: 55910 - DNA, 1326 bp, Pseudomonas fluorescens Pf-5
  CDS (1)..(1326): transl_table=11
atgaacaagcagatcggcaccatcaaacgttggcgcgtgcagattttcgccatcacctggatcgcctacgcggcgttctacttcacccgcaaagccttttccgtcgccaagcttgggatcgccgacgatcccgacttcaccctcgacaagatggccatggccaacctcgacgccatctacctggcggcctacgccgtggggcagttcacctggggcatcttcgccgaccgcttcggcccgcgggtggtggtgctgggcggcttgctgatttccgccgctgcggcgctggtgatgggcagcttcgccaccttgccggtgttcgccacctgcatgctggtccaggggctggcgcagtccacgggctggtcggggctgtgcaagaacatcggcagtttctttcccgccgggcagcgcggcagggtgctggggctgtggagttcctgctacgccttcggcggcctggtggcctcgccctttgccggctggtgggcctatacgctgatcggcacctggcacgcggcgttcatttccagcgcggtggtggtgggcttgaccgcggtgctgttcttcatcttccagcgcaataccccggaggacgtgggcctgccggccgtggagccattgcccccgcagagcgccgaagaagacgccgccggacggcgcatgagcgtctgggaaccgctgcgcgagatcctgcgcaaccgcacggtgctgatcctcgggctgtcgtacttcctgctcaagccggcgcgttacgcgatcctgctgtgggggccggtgatcgtttacgaacagatgccctcggtgggcaaggtgggggcggcgatcgtgcccaccagcttcgagctggccgggctgttggggccggtgatgatcggcctggcctcggacaagctgttcggcgcccggcgcatgccggcatgtgtcatcagcctgctggcgctgaccctgtccctggcgctgttcatgggcgctctgcataccggcagcgtcgtgctggtgatggccctgctgtttttcatgggcctgaccctgtacgggccggactcgatgatctgtggcgctgcagccatcgacttcggctcggccaaggccggggccaccgcggccggtttcgtcaatggctgcggctcggtgggcgcggtgctgggtggcctgctgccgggttacttcgacacggtcacggtgttcatcgtgtttgccgcctgcgccctggtctcggccctggtgctggtgccgtactggaacagccggccccaagggctcgagccggtgcgcgcactcgttcccaatggacctttgctgatcaaaccgctgcgtacctga

SEQ ID NO: 55911 - protein, 441 aa, Pseudomonas fluorescens Pf-5
MNKQIGTIKRWRVQIFAITWIAYAAFYFTRKAFSVAKLGIADDPDFTLDKMAMANLDAIYLAAYAVGQFTWGIFADRFGPRVVVLGGLLISAAAALVMGSFATLPVFATCMLVQGLAQSTGWSGLCKNIGSFFPAGQRGRVLGLWSSCYAFGGLVASPFAGWWAYTLIGTWHAAFISSAVVVGLTAVLFFIFQRNTPEDVGLPAVEPLPPQSAEEDAAGRRMSVWEPLREILRNRTVLILGLSYFLLKPARYAILLWGPVIVYEQMPSVGKVGAAIVPTSFELAGLLGPVMIGLASDKLFGARRMPACVISLLALTLSLALFMGALHTGSVVLVMALLFFMGLTLYGPDSMICGAAAIDFGSAKAGATAAGFVNGCGSVGAVLGGLLPGYFDTVTVFIVFAACALVSALVLVPYWNSRPQGLEPVRALVPNGPLLIKPLRT

SEQ ID NO: 55912 - DNA, 1350 bp, Pseudomonas syringae pv. phaseolicola 1448A
  CDS (1)..(1350): transl_table=11
atgtttgggttcttccgccccgccaggcatcaggcaccccttcccgaagaaaaggtcgatagcacctatcggcgtctgcgctggcagatcttcgcaggcatctttatcggttatgccggttactacctgctgcgcaagaatttctcgctggcgatgccgtatctgatcgacgaaggctatacgcgtggccagctgggcgtggcgatgtcggccatcgcgattgcctatggcctgtcgaaattcctcatggggatcgtttcagaccgctccaatccgcggtacttcctgccgttcggcctgctggtgtctgccgggatcatgttcatcttcggcttcgcgccgtgggcgacgtccagtgtcacgatcatgttcgtgctgctgttcatcaatggctgggcacagggcatgggctggccgccgagcgggcggacgatggtccactggtggtcgcagaaagagcgcggcggcgtggtgtcggtgtggaacgtggcgcacaacgttggcggcggcctgattggcccgctgttcctgcttggcatgggctggaccaacgactggcacgcagcattctatgtgccggcggccgttgcgctgctggtggcggtctttgctttcgccaccatgcgcgacaccccgcaatcggtgggcctgccgcctatcgagcactacaagaacgattacccggaaggctacgatgccagccacgaagaggaattcagcgcccgggaaatcttcgtcaaatacgtgctgcgcaacaagttcctgtggtacatcgcgatggccaacgtgttcgtttatctgctgcgctacgacgtgctggactgggccccgacctacctgaaagaagccaagcatttcacggtcgacaagacctcatgggcctattttctttacgagtgggcaggtattccgggcacgctgctgtgcggctggatgtcggacaggatcttcaagggtaatcgcggcctgaccggcatggtgttcatgtttctggtgaccattgccacgctggtgtattggctgaaccctgaaggcaacccgaccgtcgacatgatcgcgctggtgtctatcggtttcctgatctacggcccggtcatgctgatcggcctgcaggcgctggaactggcaccgaagaaggcagcgggtacggcagccggctttaccgggctgttcggctacctgggcgggtcggtcgcggcgagtgctgcgatgggctacacggtcgaccacttcggctgggacggcggctttgtgctgctgatcggcgcgtgcattctggcgatggcattccttgcgccgacgctgcggcacaaacaggtcgccagcacctcgcgcgataccaaggactga

SEQ ID NO: 55913 - protein, 449 aa, Pseudomonas syringae pv. phaseolicola 1448A
MFGFFRPARHQAPLPEEKVDSTYRRLRWQIFAGIFIGYAGYYLLRKNFSLAMPYLIDEGYTRGQLGVAMSAIAIAYGLSKFLMGIVSDRSNPRYFLPFGLLVSAGIMFIFGFAPWATSSVTIMFVLLFINGWAQGMGWPPSGRTMVHWWSQKERGGVVSVWNVAHNVGGGLIGPLFLLGMGWTNDWHAAFYVPAAVALLVAVFAFATMRDTPQSVGLPPIEHYKNDYPEGYDASHEEEFSAREIFVKYVLRNKFLWYIAMANVFVYLLRYDVLDWAPTYLKEAKHFTVDKTSWAYFLYEWAGIPGTLLCGWMSDRIFKGNRGLTGMVFMFLVTIATLVYWLNPEGNPTVDMIALVSIGFLIYGPVMLIGLQALELAPKKAAGTAAGFTGLFGYLGGSVAASAAMGYTVDHFGWDGGFVLLIGACILAMAFLAPTLRHKQVASTSRDTKD

SEQ ID NO: 55914 - DNA, 1323 bp, Shigella sonnei Ss046
  CDS (1)..(1323): transl_table=11
atgatgttgccgtttctgaaagcgcctgccgatgcgccattaatggctgataaatatgaaattgatgcccgctatcgctactggcgtcggcatattctgctgaccatctggctgggttacgcgctgttttacttcacgcggaaaagttttaacgccgccgtaccagaaatccttgctaacggcgtgctcagccgtagcgatatcggcctgttagcgaccctgttttacattacctatggcgtgtcgaagtttgtctccggcattgtcagcgatcgctcaaatgcccgttattttatggggatagggcttatcgccacgggcattatcaacattctgtttggcttctcgacgtcgctatgggcgtttgccgtactctgggtgctgaacgcctttttccagggctggggttcaccggtgtgtgcgcgtctgttaacggcctggtattcacgtaccgagcgcggtggttggtgggcattatggaacacggcgcataacgtcggcggcgcactcattcccattgtgatggcagcggctgcactacattacggctggcgtgccgggatgatgattgctggttgtatggcgatcgtcgtgggaatttttctctgctggcggctgcgcgatcgcccgcaggcgttaggtttaccggcggtcggtgaatggcgacacgacgcgctggagatagctcaacaacaagaaggggcagggctgacgcgtaaagagatcctcaccaaatatgtgttgctgaatccgtatatctggctgctttcgttttgctatgtgctggtctatgtggtccgggcggcgatcaacgactggggcaatttgtatatgtccgagacgctgggcgtcgatctggtcacggcgaatacggcagtgacgatgtttgaactgggtggatttatcggtgcgctggtagcgggttggggctcggacaaattgtttaacggcaaccgagggccgatgaatttgattttcgccgccggaattttgctttcagtcggctccctgtggctgatgccatttgccagctacgtgatgcaggcaacctgcttcttcaccattggtttttttgtctttggcccacagatgttaatcggtatggcggcggcagagtgttcccacaaagaggcggcaggggcggcgacggggtttgtcggcttgtttgcttatctgggggcgtcgcttgctggttggccgctggcgaaagtactcgatacctggcactggagcggattttttgtggttatctctatcgccgccgggatttccgcactgctgttactgccctttttgaacgcccagacaccgcgcgaagcgtga

SEQ ID NO: 55915 - protein, 440 aa, Shigella sonnei Ss046
MMLPFLKAPADAPLMADKYEIDARYRYWRRHILLTIWLGYALFYFTRKSFNAAVPEILANGVLSRSDIGLLATLFYITYGVSKFVSGIVSDRSNARYFMGIGLIATGIINILFGFSTSLWAFAVLWVLNAFFQGWGSPVCARLLTAWYSRTERGGWWALWNTAHNVGGALIPIVMAAAALHYGWRAGMMIAGCMAIVVGIFLCWRLRDRPQALGLPAVGEWRHDALEIAQQQEGAGLTRKEILTKYVLLNPYIWLLSFCYVLVYVVRAAINDWGNLYMSETLGVDLVTANTAVTMFELGGFIGALVAGWGSDKLFNGNRGPMNLIFAAGILLSVGSLWLMPFASYVMQATCFFTIGFFVFGPQMLIGMAAAECSHKEAAGAATGFVGLFAYLGASLAGWPLAKVLDTWHWSGFFVVISIAAGISALLLLPFLNAQTPREA

SEQ ID NO: 55916 - DNA, 1353 bp, Haemophilus somnus 2336
  CDS (1)..(1353)
ttgggaatatttttcggttatgcggcttattatttcgttcgtgctaactttgacctagctcaaaaagggttaattgaagccggtttatacaataaagcggagttgggaattatcggtacgggagcaggtttggcatatggattgtcaaaatttgtgatggcaggtatatctgatcgctcaaatccgaaagttttcttgcctttcggtttattattgtcagggttatgtatgacaatgatgggcttaatgccttgggcaacctccggtattgctgttatgtttgtgatgatattcttaaatggctggtttcagggaatgggatggcctccatgtggtcgtacaatggttcactggtggtctaaatccgaacgtggaacaatcgcttctatttggaactgtgcacataatatcggaggtatggtaccgggattaatggtattgttggcaagtgcgatttatttcagcgagtttggagtacaggcaactgcaaaagatatttggcaacaagcgttatattatccgggtattgccgctatgatttgtgcaattccggtctattttgtgatgaaagatacaccacagtcttgcggattacctgcaattgaaaaatggcgtaatgattatcctgatgactataatgaaaaaacctatgaaaacaatttaacaacaaaagagatctttgttacttatgttctaaaaaacaaattgttgtggtatatcgctattgcaaacgtatttgtgtacctcattcgttatggagtgttgaaatggtcccctgtatatttaggagaagtaaaacattttaatattaagggtactgcttgggcatacactatttatgaattagctgcggtaccgggtacattattatgtggttgggtttccgacaaagtatttaagggtaaacgtggtttaaccggtttcattttcatgattttgactactattgcagtggtagcattatggatgaacccagcaacaccagaacatgaattagcacagtatgcaggaaaagcgtggtatcaaaatccatatcaattaactgacttcattttaatgacaacagttgggttcttaatttacggaccggtaatgttgatcggattacatgcacttgaacttgcaccgaaaaaagcagcaggcacatcagcaggtttcacagggttattcggttatctcggtggtacagtatccgcttcagccgttgtaggttgggctgcagaatactacggctgggacggtggcttctacgtcatgataaccggtggtattttagccatcctgttaatgtttatcaccatgatagaagaaggtaaacataaagcaaaactagacgatcattacggtaaataa

SEQ ID NO: 55917 - protein, 450 aa, Haemophilus somnus 2336
MGIFFGYAAYYFVRANFDLAQKGLIEAGLYNKAELGIIGTGAGLAYGLSKFVMAGISDRSNPKVFLPFGLLLSGLCMTMMGLMPWATSGIAVMFVMIFLNGWFQGMGWPPCGRTMVHWWSKSERGTIASIWNCAHNIGGMVPGLMVLLASAIYFSEFGVQATAKDIWQQALYYPGIAAMICAIPVYFVMKDTPQSCGLPAIEKWRNDYPDDYNEKTYENNLTTKEIFVTYVLKNKLLWYIAIANVFVYLIRYGVLKWSPVYLGEVKHFNIKGTAWAYTIYELAAVPGTLLCGWVSDKVFKGKRGLTGFIFMILTTIAVVALWMNPATPEHELAQYAGKAWYQNPYQLTDFILMTTVGFLIYGPVMLIGLHALELAPKKAAGTSAGFTGLFGYLGGTVSASAVVGWAAEYYGWDGGFYVMITGGILAILLMFITMIEEGKHKAKLDDHYGK

SEQ ID NO: 55918 - DNA, 1443 bp, Haemophilus influenzae R2866
  CDS (1)..(1443)
atgtttggaccattcaaacccgctccgcatattgcggaacttccagcggaaaaaattgattccacgtataaacgcttacgttggcaagtgtttgcagggatcttcttcggttatgctgcatattattttgtgcgtgcaaactttgacttagcacaaccaggtttaattcaagctggcttgtactcaaaagcggaactaggtgttatcggctcagcggctggtcttgcttacggtttatcaaaattcgttatggcaggtatgtctgaccgctctaaccctcgtgtattcttaccgtttggtttattgctctctggtttatgtatgaccttaatgggtctattcccatgggcaacttcaggcattgccattatgtgggtaatgatcttcttaaatggttggttccaaggtatgggttggcctccatgtggtcgtactatggtgcattggtggtctaaatctgaacgtggttctatcgtgtcaatttggaatacggcgcacaatatcggcggtatggtgccgggtgcgatggtgctattagcaagtgcaattttcttcagcactcacggtattgaagcgcaggcgaaagatgtttggcaacaatcattatacttcccaggtattgctgcaatgatctgtgcaattcctgtgtacttcgtgatgcgtgatacgccacaatcttgtggtttaccatcaatcgaaaaatggcgtaatgactacccagatgactataacgaaaaaacttacgaaaacgatttaactgcaaaagaaatctttgtcacttatgtattaaaaaacaaattgttatggtacatcgcactggctaacgtatttgtatatttaattcgctatggcgtattaaaatggtctccggtttacttaagtgaagtaaaacacttcaacatcaaaggtaccgcatgggcatacacaatctatgaattagcagcggttccaggtacgttattatgtggttgggtatcagataaagtattcaaaggtaaacgtggtttaactggtttcatcttcatgatcttaaccactgcagcagttgttgcatactggatgaatcctgcgacaccagaagctgaattagcgaactacagcgcatggtatcaaaacccataccaattaactgacttcgtattaatgactttaatcggtttcttaatctatggtcctgtaatgttaatcggtttacatgcgcttgagttagcaccgaaaaaagcagcaggtactgcagcaggtttcaccggtttattcggttacttaggtggtacagtttctgcatcagcagttatcggttgggctgctcaacattatggatgggacggtggtttcttcgtcatgatcggcggtggtgtattagcagtgttattactcttaatcgtaatggttgaagaaggaaaacacaaagcgaaattaggcgatacttacggtactaaataa

SEQ ID NO: 55919 - protein, 480 aa, Haemophilus influenzae R2866
MFGPFKPAPHIAELPAEKIDSTYKRLRWQVFAGIFFGYAAYYFVRANFDLAQPGLIQAGLYSKAELGVIGSAAGLAYGLSKFVMAGMSDRSNPRVFLPFGLLLSGLCMTLMGLFPWATSGIAIMWVMIFLNGWFQGMGWPPCGRTMVHWWSKSERGSIVSIWNTAHNIGGMVPGAMVLLASAIFFSTHGIEAQAKDVWQQSLYFPGIAAMICAIPVYFVMRDTPQSCGLPSIEKWRNDYPDDYNEKTYENDLTAKEIFVTYVLKNKLLWYIALANVFVYLIRYGVLKWSPVYLSEVKHFNIKGTAWAYTIYELAAVPGTLLCGWVSDKVFKGKRGLTGFIFMILTTAAVVAYWMNPATPEAELANYSAWYQNPYQLTDFVLMTLIGFLIYGPVMLIGLHALELAPKKAAGTAAGFTGLFGYLGGTVSASAVIGWAAQHYGWDGGFFVMIGGGVLAVLLLLIVMVEEGKHKAKLGDTYGTK

SEQ ID NO: 55920 - DNA, 1350 bp, Bacillus cereus G9241
  CDS (1)..(1350): transl_table=11
atgtttttcacacaattctttaaacctgcgccccacgcggaacgcttaccagctgatcgcattgatagtgaataccgtaaattacgtttacaagtattcttaggtatcttcatcggctatgcaggttattactttgttcgaaaaaacttttcactagcaatgccatacttaattgaacaaggctttagtaaaggggaacttggggttatcctttcagcagtttctattgcttacggattaagtaaatttcttatgggtatcgtatccgatcgttgtaatcctcgctactttttagcagctgggctatttttatcaggtatcattaatattattttcggctcattttctttcattacaacaagcattatacttatgttcgtacttcagtttttaaatggatgggtacaaggtatgggatggcctccttgtggtcgtacgatggttcactggttctctattagcgaacgtggtacaaaaatgtctatttggaacgtcgctcataatgttggcggagcgcttatgccttcccttgtaacattaggcttatacttcttcgcagatgactggaaaagtattttttacttcccaggtattctttcaattttagttggtatttatgtattaattacgatgaaagatacgcctcaatcttgcggattgccttctattgaagaacatactggagaatatccaccagatgaaaaagtaaaagatcgcgaacgtgaactttcagtaaaggaaattttatttaaatacgtattaaacaataagtttttatggtacatcgctattgcgaacgttttcgtatatttcgtacgttacggcgttgtagactgggctcctacttatttagtagaagaaaaaagctttactcatagtagctcacgtacagcttacgctctatatgaatgggctggtattccaggtacacttctttgtggctggatgagtgataaactatttaaaggacgccgcgcacctgctggtattttatttatggttggtgtatttatcgccgttcttgtgtactggctaaaccctcctggtaatccaatggttgatagtatcgcacttgttgcaattggatttttaatttacggacctgttatgttaattggtctacacgctcttgacttagcaccaaagaaagctgctggaactgcagcgggcttaactggcttcttcggttacttaggcggagcagctttcgctagtgctgctatgggctttatcgtcgatgcatttggatgggatggcggattcatcttattacttgcatcttgtgtacttgcaatgttcttccttgctcttactttaaagacaggatctgcaaaacaaaagcaagcttaa

SEQ ID NO: 55921 - protein, 449 aa, Bacillus cereus G9241
MFFTQFFKPAPHAERLPADRIDSEYRKLRLQVFLGIFIGYAGYYFVRKNFSLAMPYLIEQGFSKGELGVILSAVSIAYGLSKFLMGIVSDRCNPRYFLAAGLFLSGIINIIFGSFSFITTSIILMFVLQFLNGWVQGMGWPPCGRTMVHWFSISERGTKMSIWNVAHNVGGALMPSLVTLGLYFFADDWKSIFYFPGILSILVGIYVLITMKDTPQSCGLPSIEEHTGEYPPDEKVKDRERELSVKEILFKYVLNNKFLWYIAIANVFVYFVRYGVVDWAPTYLVEEKSFTHSSSRTAYALYEWAGIPGTLLCGWMSDKLFKGRRAPAGILFMVGVFIAVLVYWLNPPGNPMVDSIALVAIGFLIYGPVMLIGLHALDLAPKKAAGTAAGLTGFFGYLGGAAFASAAMGFIVDAFGWDGGFILLLASCVLAMFFLALTLKTGSAKQKQA

SEQ ID NO: 55922 - DNA, 1311 bp, Pseudomonas fluorescens PfO-1
  CDS (1)..(1311)
ttgcctgaagaaaaaatcgacagcacctaccgacgcctgcgttggcagatcttcgccggcatcttctttggttacgcgggttactacctgctgcgcaagaacttctcgctggccatgccgtacctgatcgacgaaggctacagccgtggcgatctgggcctggcaatgtcggccatcgccatcgcctacggtctgtccaagttcctcatgggcctggtttccgaccgctccaacccgcgttacttcctgccgttcggcctgctggtatcggccggggtgatgttcattttcggtttcgcgccttgggcaacctccagcgtgaccatgatgttcatcctgctgttcatcaacggttgggcccagggcatgggctggccgccgagcggacgcacgatggtgcactggtggtcgcagaaggaacgtggcggcgtggtgtcggtgtggaacgtggcgcataacgtcggtggcggtctgatcggcccgctgttcctgatcggcatgggcctgttcaacgactggcacgcagcgttctacgtcccggccgccgtggctctggcagtagcggtgttcgctttcgtgaccatgcgtgacaccccgcaatcggtcggcctgccgccgatcgagaagtacaagaacgactacccggaaggctacgacgccagccacgaagacgaattcagcgccaaggaaatcttcgtcaaatacgtgctgcgcaacaaaatgctctggtacatcgccatggccaacgtcttcgtctacctgctgcgttacggcgtgctggactgggcgccgacctacctgaaagaagccaagggtttcaccgtggataaaacctcgtgggcctatttcttctacgaatgggcggggattccgggcacgctgctgtgcggctggatgtcggacaagatcttccgtggcaaccgtggcctgaccggcatggtgttcatggccctggtgaccgtcgcgacgctggtgtactggctgaacccggccggcaacccgaccatcgacatgatcgcgctgttctcaatcggcttcctgatctacggcccggtgatgctgatcggcctgcaagcgctggaactggcgccgaagaaagccgccggcactgccgcaggcttcaccggtctgttcgggtatctgggtggttcggtcgcggccagtgcagcgatgggctacaccgtggaccatttcggctgggatggtggtttcgtgctgctggtgggcgcttgcctgctgtcgatggccttcctggccccgaccctgtggcacaagcaagtcgccagtcagagccgtgaagcggtcgcctga

SEQ ID NO: 55923 - protein, 436 aa, Pseudomonas fluorescens PfO-1
MPEEKIDSTYRRLRWQIFAGIFFGYAGYYLLRKNFSLAMPYLIDEGYSRGDLGLAMSAIAIAYGLSKFLMGLVSDRSNPRYFLPFGLLVSAGVMFIFGFAPWATSSVTMMFILLFINGWAQGMGWPPSGRTMVHWWSQKERGGVVSVWNVAHNVGGGLIGPLFLIGMGLFNDWHAAFYVPAAVALAVAVFAFVTMRDTPQSVGLPPIEKYKNDYPEGYDASHEDEFSAKEIFVKYVLRNKMLWYIAMANVFVYLLRYGVLDWAPTYLKEAKGFTVDKTSWAYFFYEWAGIPGTLLCGWMSDKIFRGNRGLTGMVFMALVTVATLVYWLNPAGNPTIDMIALFSIGFLIYGPVMLIGLQALELAPKKAAGTAAGFTGLFGYLGGSVAASAAMGYTVDHFGWDGGFVLLVGACLLSMAFLAPTLWHKQVASQSREAVA

SEQ ID NO: 55924 - DNA, 1290 bp, Rickettsia akari str. Hartford
  CDS (1)..(1290)
atgacagatacaaaacccaaaattaaaactccaagatcgccatatgtaaaaaaatataatagttggcgagtaaggattttatattctattattataggttatgcgactttttatttgtgtcgtcagaattttaatatagcaactcctgctataagagaatattttggggttactaaaacgcaaattggttggatattaactgcttcatctattatgtatggagtgagtaaagcttgtaatgggtttattagcgacaaagttaatgctcggatatttatggttttgggtcttttagttgtcggaatcattactattctaataggtttttcatattctttgtggtttataggaattttatggatatccagtaactggtttcaatcgatggggtggccccctgcaacaaaaatgcttactcactggtttgcttcaaaagaacttggcactaaatgggctatgggtacaacctctaatcaaataggtggtgccattgctatgataagctgcggttatttaatcgataaatttgattggagagctgcttttttcgttcctggtgtagtcgcttgtgtagtatcgctttttttatataataggcttcgtaattccccaaaagaagtaggtttatctaccgtagaggaatataaagaatatccgcctgaatctataggagattatgagaagctattaactccacaattacttagaatggtcttttgtaataggctaatatggtatgtttgtttagcaaatatgtttgtttatataatacgttccggagtaatttattgggctccaacatttttaaaagatttacgtaatataagccttgcaaatgcaggattacaaattggtttatatgaaatgataggtattcccggggcgttgatagctggctttttatcggataaattatttcaaggacgtcgcggtcctattggagcgatatgtatggtattgcttagcttattgttagtcttgttttggacaattcctattcaaagtgaattattaagtatagtaattctatctttaataggcttttttgttgcaggacctcagctccttgtaggtatagcagctgctgatttcagtactcgtcaagctgtcggtacggctaatggattatcagggttatttggttatttaggagcctctattgcaggaatcggcgtaggatggattagcgatcattatggttggaatggagtatttatatttttcagtatttctgctcttttaggaggagggttgtttgctttaacatggaatcgttcagctaaaaaataa

SEQ ID NO: 55925 - protein, 429 aa, Rickettsia akari str. Hartford
MTDTKPKIKTPRSPYVKKYNSWRVRILYSIIIGYATFYLCRQNFNIATPAIREYFGVTKTQIGWILTASSIMYGVSKACNGFISDKVNARIFMVLGLLVVGIITILIGFSYSLWFIGILWISSNWFQSMGWPPATKMLTHWFASKELGTKWAMGTTSNQIGGAIAMISCGYLIDKFDWRAAFFVPGVVACVVSLFLYNRLRNSPKEVGLSTVEEYKEYPPESIGDYEKLLTPQLLRMVFCNRLIWYVCLANMFVYIIRSGVIYWAPTFLKDLRNISLANAGLQIGLYEMIGIPGALIAGFLSDKLFQGRRGPIGAICMVLLSLLLVLFWTIPIQSELLSIVILSLIGFFVAGPQLLVGIAAADFSTRQAVGTANGLSGLFGYLGASIAGIGVGWISDHYGWNGVFIFFSISALLGGGLFALTWNRSAKK

SEQ ID NO: 55926 - DNA, 1146 bp, Wolbachia endosymbiont of Drosophila simulans
  CDS (1)..(1146): transl_table=11
atgctgctttatttatcaagacaaagtataccaattgctctaccactgttaatagatactgaccatgtaaaattaagctatttttttgcctgcttttcttttttttatggagtatcaaaatttgttaatggaataatcatggactccaaaaataatccattatttatgtttgggctatgcaatattgcaactggattattaaccattggtataactttatcatataataatctaactttattactgttaacattaatattattagcttggacacaagggttaggttggccagctattaccaagtttatggttacaaactctagcatctcttcaattgcatcatcatggggagttatgagcgcatctcagcaacttggttcttgtattactttaattgtattaccaagtataattaaaatatataatgcaaaaagtgcatttttgtactctggtttcttatgcttactttttggaatttatataatattaaaggcatattacaaagaaagtgccaactttactacctattataaggtgcagaaatctcaaataggtatcaaggtaacaagttccatatggtttctatgttgtgctactttttgtgcttatattataaaaatgggaatcttcttttggtttcctataattttaaagaataaattacaaatttctcttgtacaatcctcactaataacaggcgtatatgatttaggtggaatccttggaactttaataacaggaagaattagtgatatgtacttctttcaaaatagaagcttgctggcatcactttatatgttgggtatagcactcacttttattgcaatgaactttggtcaaaacataattcttatgaacctttgtgcaatcttatcaggattctttatatttggagtgcaagtactgacaggtgttatagctgtagaaattgctccacaaaataatgtatgtgcaattgtaagcttaacaggattatttgggtatattgcaagttcaatattttcatgcgtgctcttaggagtacttgttaagcactgtggtaacagtattatgttttcatttttttccatttgctctgttgttgcactcgtttgcttttccatactatcaagcaaagatctaaaaaaactaagtaaagcggtgtaa

SEQ ID NO: 55927 - protein, 381 aa, Wolbachia endosymbiont of Drosophila simulans
MLLYLSRQSIPIALPLLIDTDHVKLSYFFACFSFFYGVSKFVNGIIMDSKNNPLFMFGLCNIATGLLTIGITLSYNNLTLLLLTLILLAWTQGLGWPAITKFMVTNSSISSIASSWGVMSASQQLGSCITLIVLPSIIKIYNAKSAFLYSGFLCLLFGIYIILKAYYKESANFTTYYKVQKSQIGIKVTSSIWFLCCATFCAYIIKMGIFFWFPIILKNKLQISLVQSSLITGVYDLGGILGTLITGRISDMYFFQNRSLLASLYMLGIALTFIAMNFGQNIILMNLCAILSGFFIFGVQVLTGVIAVEIAPQNNVCAIVSLTGLFGYIASSIFSCVLLGVLVKHCGNSIMFSFFSICSVVALVCFSILSSKDLKKLSKAV

SEQ ID NO: 55928 - DNA, 1605 bp, Arabidopsis thaliana
  CDS (1)..(1605)
atggcgatgaattcgaagaggaaaacaccacctgggattgcgcttctgaggagagtcagaggaagaaattggagtccaaagacgtttcggtacgcgattttgtttattactttcatcgcatatgcttgttaccatgcttctcgtaaaccaagcagcatagtgaagagcgttttacacccagactcaagcactaagccacctcaagaacataacagcgacaaaatttatccttggcctatgggtaacgtgtttgtgaagagagaaattggtgatatagatgaggttttgttgcatcgtaagtctaaaggatgggaaccgtttaatgggaaagatgggacgtctaggttgggagagattgatgtggcgtttcttgcttgttactctataggaatgtatgttgctggtcatttgggtgatagtttggatctgagattgtttctgacttggggaatgattgggagtgggttctttgttgggttgtttggtatgggttatttctggaacattcatgcgttttggttctttttggttatgcaaatggcggctgggttgtttcaggcgacaggatggccatctgttgtggctgttgttgggaattggtttgggaaaaggaagagaggtcttataatggggatttggaatgctcatacttctgttgggaacatttgtggttctttaattgctgctggtgttcttgaatatggttggggatggtcttttatagctcctggttttgtcatgtctttaggaggagttcttgtttatttgttcttggctgcgtatcctgaggatgttgggtttccagatatcaattctaattcagggaagtttattaagaggaagagagatgttgaagaggaagaagaggaagtagaagaagatttagggacagatgttgaaggggatggggagggatcatcagggtcaggttcagggtatgagaataaaagaagtgttggacttttgcaagcttgtatgatccctggtgttataccgtttgcgttgtgtctctttttctcgaagctggtcgcgtacacgttcttgtactggttaccgttttacttgagccaaacaactattggtggagagtacgtgtctgtgaaaacagcagggaatctctccacactatttgatgttggaggcattgtaggagggattctttgtggttacatttcagacaaattcaaagcaagggctacaactgcagctgcattcatgtacgctgcgattccggcaatgcttgtgtaccattcctatggaggtgtctctcagacagtcaacatcctcctcatgatggttgctggtttgtttgtcaatggtccttatgcactcatcacaaccgcagtctctgcggatctgggaacgcacaagtctttacaaggcgattcaagggcgcttgcgactgttactgctatcattgacgggactggatctgccggtgcggctttaggtccgcttttgacagggtttctttctactctgggttggcaagctgtgttctatatgttggtcgttggagctctctgtgctggtttgcttttgacccgtctggttattgctgaaattagagagaaacttggatatgttgatgaagaaggtaaataa

SEQ ID NO: 55929 - protein, 534 aa, Arabidopsis thaliana
MAMNSKRKTPPGIALLRRVRGRNWSPKTFRYAILFITFIAYACYHASRKPSSIVKSVLHPDSSTKPPQEHNSDKIYPWPMGNVFVKREIGDIDEVLLHRKSKGWEPFNGKDGTSRLGEIDVAFLACYSIGMYVAGHLGDSLDLRLFLTWGMIGSGFFVGLFGMGYFWNIHAFWFFLVMQMAAGLFQATGWPSVVAVVGNWFGKRKRGLIMGIWNAHTSVGNICGSLIAAGVLEYGWGWSFIAPGFVMSLGGVLVYLFLAAYPEDVGFPDINSNSGKFIKRKRDVEEEEEEVEEDLGTDVEGDGEGSSGSGSGYENKRSVGLLQACMIPGVIPFALCLFFSKLVAYTFLYWLPFYLSQTTIGGEYVSVKTAGNLSTLFDVGGIVGGILCGYISDKFKARATTAAAFMYAAIPAMLVYHSYGGVSQTVNILLMMVAGLFVNGPYALITTAVSADLGTHKSLQGDSRALATVTAIIDGTGSAGAALGPLLTGFLSTLGWQAVFYMLVVGALCAGLLLTRLVIAEIREKLGYVDEEGK

SEQ ID NO: 55930 - DNA, 1374 bp, Streptococcus agalactiae A909
  CDS (1)..(1374): transl_table=11
atgttgaaaaaactatttgcaccccctcagaaaagagaacgtttatcagctgaggaaattaagcataaatatcctcgttatcgtgtacaagtccttatttctatttttgtaggttatatgggatactattttgttcgtaatacgacttcaattctatctggtatccttaatatgtctgctactgagattggtattattacctgtgctagctacattgcttatggtctctctaaatttatttctggtttgatttcagatgaatcgaattctaaaattttccttccagttggtttgtttcttacaggactagttaatgtgttaatcggtgttattccctctgtaattactagtatttggctctttactatcatgtatcttattaatggttggttacaagggatgggataccctcctggagcgcgtacattagtctattggtatgataataaagaaagaattaaatatgccaccatttggaatttatctcacaattttggtggagcaatagcgccgattttaactggtgtaggtctagctcttgctggtaatgattctcttaatcaagcgcgtgctgcttattggtttccaggggtggtggcttgtcttttggctattcttgtttactttttacaagaagatactccagaatctatcggacttccgcctatagaagagtatcataaagagcaatatactaatgttgtggattcaagtaacattttagaagagcctgaagttttgggtatgggcgaaattataaaaaaatatattctaccaaatactaaactgatgtgggcatccttgtattcaatatttgtatatattttacgttacggtattgtctcatggactcctaagtttttagcgacgagtgtgcaagatggtggaaaaggtattactgcaacagctggtatgggtggtttttcactttttgaaataggtggtattattgggatgctaacagcaggatatctatctgccaaagtgtttaaaaactctaaacctttaaccaatgtagccttcttagttgtagcaatcttattactagctgcctattggtttattccagcaggacctcaatatatggcattagacttcattattttactaggtttgggggcatcaatctacggccctgttatgatggttggcctgtatgctatggagttggttccaaaagcagcagctggagcagcttcaggattgactggcacatttagttatgtcggaggagcaacaatcgctactctagctatcggtattattattgaccactttggttggggagtagcatttataatatttggtatttctggatttgcggctattgtctgtaccttgctttcaagagataagagtctagagtattggtga

SEQ ID NO: 55931 - protein, 457 aa, Streptococcus agalactiae A909
MLKKLFAPPQKRERLSAEEIKHKYPRYRVQVLISIFVGYMGYYFVRNTTSILSGILNMSATEIGIITCASYIAYGLSKFISGLISDESNSKIFLPVGLFLTGLVNVLIGVIPSVITSIWLFTIMYLINGWLQGMGYPPGARTLVYWYDNKERIKYATIWNLSHNFGGAIAPILTGVGLALAGNDSLNQARAAYWFPGVVACLLAILVYFLQEDTPESIGLPPIEEYHKEQYTNVVDSSNILEEPEVLGMGEIIKKYILPNTKLMWASLYSIFVYILRYGIVSWTPKFLATSVQDGGKGITATAGMGGFSLFEIGGIIGMLTAGYLSAKVFKNSKPLTNVAFLVVAILLLAAYWFIPAGPQYMALDFIILLGLGASIYGPVMMVGLYAMELVPKAAAGAASGLTGTFSYVGGATIATLAIGIIIDHFGWGVAFIIFGISGFAAIVCTLLSRDKSLEYW

SEQ ID NO: 55932 - DNA, 1350 bp, Pseudomonas fluorescens PfO
  CDS (1)..(1350): transl_table=11
atgtttgctttctttcgtcctgccgcacatcaggctccattgcctgaagaaaaaatcgacagcacctaccgacgcctgcgttggcagatcttcgccggcatcttctttggttacgcgggttactacctgctgcgcaagaacttctcgctggccatgccgtacctgatcgacgaaggctacagccgtggcgatctgggcctggcaatgtcggccatcgccatcgcctacggtctgtccaagttcctcatgggcctggtttccgaccgctccaacccgcgttacttcctgccgttcggcctgctggtatcggccggggtgatgttcattttcggtttcgcgccttgggcaacctccagcgtgaccatgatgttcatcctgctgttcatcaacggttgggcccagggcatgggctggccgccgagcggacgcacgatggtgcactggtggtcgcagaaggaacgtggcggcgtggtgtcggtgtggaacgtggcgcataacgtcggtggcggtctgatcggcccgctgttcctgatcggcatgggcctgttcaacgactggcacgcagcgttctacgtcccggccgccgtggctctggcagtagcggtgttcgctttcgtgaccatgcgtgacaccccgcaatcggtcggcctgccgccgatcgagaagtacaagaacgactacccggaaggctacgacgccagccacgaagacgaattcagcgccaaggaaatcttcgtcaaatacgtgctgcgcaacaaaatgctctggtacatcgccatggccaacgtcttcgtctacctgctgcgttacggcgtgctggactgggcgccgacctacctgaaagaagccaagggtttcaccgtggataaaacctcgtgggcctatttcttctacgaatgggcggggattccgggcacgctgctgtgcggctggatgtcggacaagatcttccgtggcaaccgtggcctgaccggcatggtgttcatggccctggtgaccgtcgcgacgctggtgtactggctgaacccggccggcaacccgaccatcgacatgatcgcgctgttctcaatcggcttcctgatctacggcccggtgatgctgatcggcctgcaagcgctggaactggcgccgaagaaagccgccggcactgccgcaggcttcaccggtctgttcgggtatctgggtggttcggtcgcggccagtgcagcgatgggctacaccgtggaccatttcggctgggatggtggtttcgtgctgctggtgggcgcttgcctgctgtcgatggccttcctggccccgaccctgtggcacaagcaagtcgccagtcagagccgtgaagcggtcgcctga

SEQ ID NO: 55933 - protein, 449 aa, Pseudomonas fluorescens PfO
MFAFFRPAAHQAPLPEEKIDSTYRRLRWQIFAGIFFGYAGYYLLRKNFSLAMPYLIDEGYSRGDLGLAMSAIAIAYGLSKFLMGLVSDRSNPRYFLPFGLLVSAGVMFIFGFAPWATSSVTMMFILLFINGWAQGMGWPPSGRTMVHWWSQKERGGVVSVWNVAHNVGGGLIGPLFLIGMGLFNDWHAAFYVPAAVALAVAVFAFVTMRDTPQSVGLPPIEKYKNDYPEGYDASHEDEFSAKEIFVKYVLRNKMLWYIAMANVFVYLLRYGVLDWAPTYLKEAKGFTVDKTSWAYFFYEWAGIPGTLLCGWMSDKIFRGNRGLTGMVFMALVTVATLVYWLNPAGNPTIDMIALFSIGFLIYGPVMLIGLQALELAPKKAAGTAAGFTGLFGYLGGSVAASAAMGYTVDHFGWDGGFVLLVGACLLSMAFLAPTLWHKQVASQSREAVA

SEQ ID NO: 55934 - DNA, 1299 bp, Xenopus tropicalis
  CDS (1)..(1299)
atggcagcgcagggacagggttatggctactaccgtacagttattttttccgcaatgtttgtgggatacacactgtattacttcaatcggaagaccttttcctttgtcatgccatctgtaatgcaggagataaaactggataaagatgatctaggtctgatcaccagcagccagtctgcagcatatgccatcagtaagtttattagtggagttctgtctgatcagatgagcgctcgctggctgttttcctctggcctttgcttggtgggtctggtaaacgtggtattttcctggagttccagtgtgtcagtttttgccattctttggttttttaatggactagctcaaggactcggctggccaccatgtggaaaagtcctgcgcaagtggtttgaaccttcccagttcggcacttggtgggcagtgctctccactagtatgaacttggcaggcagtcttggccccatcatagctactctggtagctgccagttacagttggagatccacattatccctttctggtctgatctgtgtgggagcctctgtcctttgccttatacttataaagaatgagccttctgatgtggggctgaaaaacatagaacctgggcccaaaaaaggaaaacaagcttcccagtctggtgatgaaacaactctaaaggagttcttgctttccccgtacctttggctactgtgtgctggatacctagtggtatttggagtaaaaacctgctgtacagactggggacagctttttctcattcaggacaaaggacagtctgccctgataggcagctcatacatgagcgccctggaggttggtggcttggtgggcagtattgcagctggtttgttgtctgatcgagctgtggctaagatgggattgagaaatcatggtaatcctcgccatggcctgctcctctctatgatggctggaatggctgtgtccttgtacttgttccgtgttactgtcactgcaggatcttcaaaggtctggatcttgattctgggagctgtatttggattttcttcgtatggacctattgcactttttggagtcattgccaatgagagcgccccttccaatttctgtgggacatcacatgctattgtggccctctctgcaaatgtgggtggtttcctcgccggactcccatttagcactattgccaaacactatggttggaacacagcatttcaagcagctgagattacctgcttagctgttacaatcatatttttccttctaaggaatattcaaaccaagatgggccgtctgccgaagaaagcggactga

SEQ ID NO: 55935 - protein, 432 aa, Xenopus tropicalis
MAAQGQGYGYYRTVIFSAMFVGYTLYYFNRKTFSFVMPSVMQEIKLDKDDLGLITSSQSAAYAISKFISGVLSDQMSARWLFSSGLCLVGLVNVVFSWSSSVSVFAILWFFNGLAQGLGWPPCGKVLRKWFEPSQFGTWWAVLSTSMNLAGSLGPIIATLVAASYSWRSTLSLSGLICVGASVLCLILIKNEPSDVGLKNIEPGPKKGKQASQSGDETTLKEFLLSPYLWLLCAGYLVVFGVKTCCTDWGQLFLIQDKGQSALIGSSYMSALEVGGLVGSIAAGLLSDRAVAKMGLRNHGNPRHGLLLSMMAGMAVSLYLFRVTVTAGSSKVWILILGAVFGFSSYGPIALFGVIANESAPSNFCGTSHAIVALSANVGGFLAGLPFSTIAKHYGWNTAFQAAEITCLAVTIIFFLLRNIQTKMGRLPKKAD

SEQ ID NO: 55936 - DNA, 1290 bp, Homo sapiens
  CDS (1)..(1290)
atggcagcccagggctatggctattatcgcactgtgatcttctcagccatgtttgggggctacagcctgtattacttcaatcgcaagaccttctcctttgtcatgccatcattggtggaagagatccctttggacaaggatgatttggggttcatcaccagcagccagtcggcagcttatgctatcagcaagtttgtcagtggggtgctgtctgaccagatgagtgctcgctggctcttctcttctgggctgctcctggttggcctggtcaacatattctttgcctggagctccacagtacctgtctttgctgccctctggttccttaatggcctggcccaggggctgggctggcccccatgtgggaaggtcctgcggaagtggtttgagccatctcagtttggcacttggtgggccatcctgtcaaccagcatgaacctggctggagggctgggccctatcctggcaaccatccttgcccagagctacagctggcgcagcacgctggccctatctggggcactgtgtgtggttgtctccttcctctgtctcctgctcatccacaatgaacctgctgatgttggactccgcaacctggaccccatgccctctgagggcaagaagggctccttgaaggaggagagcaccctgcaggagctactgctgtccccttacctgtgggtgctctccactggttaccttgtggtgtttggagtaaagacctgctgtactgactggggccagttcttccttatccaggagaaaggacagtcagcccttgtaggtagctcctacatgagtgccctggaagttgggggccttgtaggcagcatcgcagctggctacctgtcagaccgggccatggcaaaggcgggactgtccaactacgggaaccctcgccatggcctgttgctgttcatgatggctggcatgacagtgtccatgtacctcttccgggtaacagtgaccagtgactcccccaagctctggatcctggtattgggagctgtatttggtttctcctcgtatggccccattgccctgtttggagtcatagccaacgagagtgcccctcccaacttgtgtggcacctcccacgccattgtgggactcatggccaatgtgggcggctttctggctgggctgcccttcagcaccattgccaagcactacagttggagcacagccttctgggtggctgaagtgatttgtgcggccagcacagctgccttcttcctcctacgaaacatccgcaccaagatgggccgagtgtccaagaaggctgattaa

SEQ ID NO: 55937 - protein, 429 aa, Homo sapiens [sequence omitted]

SEQ ID NO: 55938 - DNA, 1365 bp, Escherichia coli
  CDS (1)..(1365): transl_table=11
atgttatcaatatttaaaacggggcaagcggcggatagtgttccggcggagaaaattcaggtgacatatcgtcgctatcgtatgcaggcgttacttagtgtatttctggggtatcttgcatactatatcgtgcgtaataatttcaccttatcgacgccttatcttaaagagcaattagatctcagcgccacacaaattggcgtactgagtagctgtatgcttatcgcctatggtatcagcaaaggagtgatgagtagccttgccgataaagccagtccgaaagtctttatggcgtgtgggctggtgttatgtgccatcgttaacgttggcctgggattcagcaccgcattctggatttttgcggtattggttattctgaatggtcttttccagggaatgggcgttggtccttctttcatcactattgctaactggttccctcgccgggagcgtggtcgggttggtgctttctggaatatctctcataacgtcggtggtggtattgttgcacccattgttggtgccgcttttgccctactcggcagcgagcactggcaaagtgcgagctatatcgttccggcctgcgtggccatcgtttttgcggtaattgtgctgattctcggtaaaggttccccacgtcaggaaggtctaccctctctggaagagatgatgccggaagaaaaagtcgtcctgaatacccgacagacggtaaaagcaccagaaaacatgagtgcctttcagattttctgcacttatgtattacgcaataaaaatgcttggtatgtctcactggttgacgtatttgtatacatggtacgcttcgggatgattagctggttgcctatttatctgctgacggtgaaacatttttctaaagaacaaatgagcgtcgcgtttttattttttgaatgggccgcaatcccttccacgctacttgccggttggttgtcagacaaactgtttaaagggcgtcgtatgccattggcgatgatttgtatggcgctgattttcatttgcctgattggctactggaaaagtgaatcactgtttatggtgacaatttttgctgccattgttggttgtctgatttacgttccacaatttctggcttctgttcagactatggagatcgtgcccagctttgctgttggctccgcggtaggtttacgtggttttatgagctatatcttcggtgcatctctgggcaccagcctgtttggtattatggtcgatcatattggctggcatggcggattttatcttcttggctgcggtattatttgttgcatcattttttgctggttatcacatcgtggtgcaattgaacttgaacgtcacagagccgcatatataaaagaacactga

SEQ ID NO: 55939 - protein, 454 aa, Escherichia coli
MLSIFKTGQAADSVPAEKIQVTYRRYRMQALLSVFLGYLAYYIVRNNFTLSTPYLKEQLDLSATQIGVLSSCMLIAYGISKGVMSSLADKASPKVFMACGLVLCAIVNVGLGFSTAFWIFAVLVILNGLFQGMGVGPSFITIANWFPRRERGRVGAFWNISHNVGGGIVAPIVGAAFALLGSEHWQSASYIVPACVAIVFAVIVLILGKGSPRQEGLPSLEEMMPEEKVVLNTRQTVKAPENMSAFQIFCTYVLRNKNAWYVSLVDVFVYMVRFGMISWLPIYLLTVKHFSKEQMSVAFLFFEWAAIPSTLLAGWLSDKLFKGRRMPLAMICMALIFICLIGYWKSESLFMVTIFAAIVGCLIYVPQFLASVQTMEIVPSFAVGSAVGLRGFMSYIFGASLGTSLFGIMVDHIGWHGGFYLLGCGIICCIIFCWLSHRGAIELERHRAAYIKEH

SEQ ID NO: 55940 - DNA, 1386 bp, Borrelia hermsii
  CDS (1)..(1386): transl_table=11
atggagtattcaattatgaaaaaattattcaattttctaaaaccagcacctcatataaagagagtacacaaagaattagaagaatcattatataaaaaatatagatttcaaatatttatgtcaatatttataggatatgctggattttatttaacgagaaaaatctttgcatttgctatgccagctcttgaaaaagacggttttagcaaagggcaattaggaacaattttatctggggtttcaattgcatatggattttctaaatttattatgggaaacgtctcagatcgaagtaatcccaggtatttcttagcgctagggctatttctaacagcaataattaccattatatttggattattcccgtggaaatcaattgaaagcaccataattgcagcaatattaatgttcattctaatgtttgtaaatggatgggttcaaggcatgggatggcctgcgtgtggacgaactatggttcactggtggtcaagaaaagaaagaggactaactgttgccacatggaatttatctcacaatataggagggggagcagctggaataatatcctcttgggctctgttttattttaaggaatggcaagctatactttatgtaccaacaggactagtaataggaattgcaatatttgttttgcttgcactaagggatacacctcaatctgtaggattaccaccaattgaagaatataaaaatgattatcctgataactatacagaaaaggcagaagaagaacttaatacaaaagatatatttgtaaaatatgtccttaacaataatctgctatggtatatagctattgctaatgcatttatatattttgtaagatacggggtcctagattgggcaccatcatacctcttgcaagtaaaacacttttccataaaaaactcaggatgggcatattcactttatgaattttcagctattcctggaacaatagcttgcggatggatatctgataaaatttttaaaggaagaagatcggagactggaataattttcataaccgccactcttattgcaataattatatattggcaattaccagaaaataatccaacactcacaactgttatcttggcaataataggattcctaatctacggccctgttatgcttattggtcttcatgctcttgatcttgcaccaaaaaaagctgcaggaactgctgcagggtttacaggattatttggatacatagggggttctgttactgctagtgccattacaggaattgtattgcaacactttaattgggacgtctacttctatctattaataactgcatgcatatttgcaataatatttatgagtttaacattaaagaaagagaaaaaaattaatgacactaataaactacaatag

SEQ ID NO: 55941 - protein, 461 aa, Borrelia hermsii
MEYSIMKKLFNFLKPAPHIKRVHKELEESLYKKYRFQIFMSIFIGYAGFYLTRKIFAFAMPALEKDGFSKGQLGTILSGVSIAYGFSKFIMGNVSDRSNPRYFLALGLFLTAIITIIFGLFPWKSIESTIIAAILMFILMFVNGWVQGMGWPACGRTMVHWWSRKERGLTVATWNLSHNIGGGAAGIISSWALFYFKEWQAILYVPTGLVIGIAIFVLLALRDTPQSVGLPPIEEYKNDYPDNYTEKAEEELNTKDIFVKYVLNNNLLWYIAIANAFIYFVRYGVLDWAPSYLLQVKHFSIKNSGWAYSLYEFSAIPGTIACGWISDKIFKGRRSETGIIFITATLIAIIIYWQLPENNPTLTTVILAIIGFLIYGPVMLIGLHALDLAPKKAAGTAAGFTGLFGYIGGSVTASAITGIVLQHFNWDVYFYLLITACIFAIIFMSLTLKKEKKINDTNKLQ

SEQ ID NO: 55942 - DNA, 2945 bp, Mus musculus
  CDS (58)..(1578)
gacgcgcgccggctctgcaccctccatagtctcagcttcgagtgccggcgcctcaagatgcggtcctccctggctcctggtgtctggttccttcgcgccttctctagggacagctggttccgtggcttcatcctgctgctcaccttcctcatttatgcctgttatcacatgtccagaaagcccatcagcatcgtcaagagccgcctgcaccagaactgctcagagatggtcagacctgttaatgacacccacgatctcaatgataccacctggtgcagctggagtccattcgacaaagatgactacaaggagttactaggagctgtggacaatgccttcctagtggcttatgccattggcatgtttattagtggaatctttggggagcggctgcccctgcgttactacctctcggctggaatggtgctaagtggcctattcacctccctctttggcctggggtacttctggaatatccacatgctctggtactttgtgctcatccagatctgcaacgggcttgtgcagactacaggctggccatctgtggtgacctgtgttggcaactggtttgggaagggaaagcggggattcatcatgggcatctggaactctcacacatctgtgggcaacattctgggctctctgattgctggagtctgggtgaaccagcactggggcctgtcattcatcgtgcctggcattatcactgctatcatgggtgtcatcaccttcctctttcttattgaatatccagaagatgtggactgtacccctcctcggcatcatgatgacccggagaaggaacaggacaaccctgaggatcctgtgaatagtccctacagcagcagggagagtaatgtggacattgcagccagctcctccaaggagcagggccctgagcctgaagccatcagtttcctgggggcactcagaattccgggagtgatcgagttctctttatgtctgctctttgccaagttggtcagctatacctttctctactggctgcccttgtacatcttcaatgtggctcactttagtgccaaggaggctggggacctatccacgctttttgatgttggtggcatcataggtggcatcatggcagggctcatcagcgactacaccaatagcagggccaccacttgctgcatcatgctgatcttggctgctcccatgatgttcctgtacaactacattggccagaatgggataaccagttccatagtgatgttaattatctgtggggtcctggtcaatggcccttacgcactcatcacgacagcggtctctgctgacctgggcacacatgagagcctgaagggtaacgccaaggccctctccactgtcacggccattatcgacggcactggttccataggtgcggctctggggcccctactggccgggctcatttccccgacaggctggaacaatgtgttctacatgctcatctctgccgacgtcttggcttgcttgctcctctgcaggttggtgtacaaagagatcctggcctggaagacggcctgcggcagaagcagtggctctagtctggccctaacccacccgcgatagtattttcctcaagtcccatgacttttgtacaaacaaatttgaggcctcaattggaagagcaacatgggccacccctgctgggtacccaacttatgagcaagagaatggaagcttccatcacagggagaggcaaagcctcctgatctaactggtctagccccaagctacattgccactaaggaagggtacagaaaactctatgggaaggggctgctgagcaccaagcatgggaacatggcagacttcaaggcctgagctctgggaactgcaatcagaaggaatgggctgaaagcagaaaggaaggacaggttcagactcttgcttgtttggattccaaggcctggaaaaggtgcatctctccttcccatgttaaattataaacctctgtaattatcctgtacctatgagggatttcaccttgtttcaaaggtgctgggcctctctctctctctgtttctgtctctgtgtctgtctctgtctatgaactattctttctgtatttctccaagtaggaccctgttgatctatcctccactcgatcctgttgataactcagccactttgaagcattagtgctgcctttgcagagtcaaggcttggatggggtacgggagctgtcataagtactaaatgtaggggaacttgctctcgggctcttgaccgtgtccaccctcagagcccagtaccttccttgcctcactcttaagatgcctcagtggatgaagacatcagggtcagtttggtgaagactaaggtgttgtatacaactgcaaatgccagtgtgaattaagcactgggtgctcaagtcatgacagctgtcctttaagaacaaacaggaagtggctatgggaagaacttaaccctgaacataggtgccaagtttagcaagaaatgaagataccactggaaacatctgcgtaactgctactgagcagttgctaggagacaccttgcagccaccctctgcctggtgttctgatgccccttccttccgctcttgagtcctggttcacgacatgccaggctgactcctggcatttccgcctgacctctaagctgcccatcagcaccaatacagatttcctttgccaactgtgccactgcttatccttggtagggcctggcatagcagcagccatggggctcgtgaggggcagtaaagcattgtcacatgaacaacaaagattggtgttctggggctgcgacagctgtctttcccagagggcattgctcatgacattgataacactgtgcaatccagcaggagcctagacccccatacaagatacatccattgcatttactaggatgttgtgtcagtcagtgtgttagctagatacactggcctcagcaataaaatataaagc

SEQ ID NO: 55943 - protein, 506 aa, Mus musculus
MRSSLAPGVWFLRAFSRDSWFRGFILLLTFLIYACYHMSRKPISIVKSRLHQNCSEMVRPVNDTHDLNDTTWCSWSPFDKDDYKELLGAVDNAFLVAYAIGMFISGIFGERLPLRYYLSAGMVLSGLFTSLFGLGYFWNIHMLWYFVLIQICNGLVQTTGWPSVVTCVGNWFGKGKRGFIMGIWNSHTSVGNILGSLIAGVWVNQHWGLSFIVPGIITAIMGVITFLFLIEYPEDVDCTPPRHHDDPEKEQDNPEDPVNSPYSSRESNVDIAASSSKEQGPEPEAISFLGALRIPGVIEFSLCLLFAKLVSYTFLYWLPLYIFNVAHFSAKEAGDLSTLFDVGGIIGGIMAGLISDYTNSRATTCCIMLILAAPMMFLYNYIGQNGITSSIVMLIICGVLVNGPYALITTAVSADLGTHESLKGNAKALSTVTAIIDGTGSIGAALGPLLAGLISPTGWNNVFYMLISADVLACLLLCRLVYKEILAWKTACGRSSGSSLALTHPR

SEQ ID NO: 55944 - DNA, 1578 bp, Oryza sativa
  CDS (1)..(1578)
atggcgaagccaccgccggcgcctcaccgcgcccaccgcgcgccgccgggcctctgcgccctgccggccatctcctacaactcccaccggggcctcgtcctgggcctcaccttcgtcgcctacgcgctctaccacgcctcccgcaagccgcccagcatcgtcaagcgcgcgctctccgaggcgtggccgcccttccacgacccggcgctcctcggcgagaccgacgtcgcgttcctcgccttctactccctcggcatgttcgtcgcgggccacctcggcgaccgcctcgacctccgcctcttcctcgccgtcggcatgatcgggagcggcaccgccgtcgcgctcttcggcgtcgggtacttcctctccctccactccctcgccttctacctcgccgcccaggtgatcgccggattgctccagtccaccggctggccctccgtcgtcgccatcgtcggcaactggttccgtgggcggaggcgcggcctcatcatggggatatggaacgcgcacacctccatcgggaacatcagcggctccctcatcgccgccgccgtgctccgctacgggtgggggtggtcgttcatcgtgccaggcctgctcatcgcgttcggtggcgttctcgtgttcttcttcctcgcgccttacccggaggaccttggcttctctccgacgacgctgcccaaggcagtgagtgaggcgagcaccgacgaggaggacagcagcagcagcgcgagcgccgccggtggcgccgggaaggaggagaggagggacgccgtggggatgtggaaggcgttcgcgattcctggcgtcatcaccttcgcgctctgcctcttcttcgcgaagctggtcgcctacacgttcttgtactggcttcctttctacctgagccagacggctattggaggcaaggaaatgtcagtcacgtctgctgggtatctctcagctttgtttgatgtaggtggaatcattggtggaattcttgcagggttcatatctgatcatctcaatgcaagggccaccacggcagcaatcttcatgtacttggctattccatctctttacgccttccatgcatatggcagtacttcagaagtggcaaacattggcttgatgatgatcagtggcttgtttgttaatggaccttatgctctcataacaactgcagtttctgccgatctgggaacccacaaatctcttaagggggattcccgtgcgttggccaccgtcacatcaattatagatggaacaggatcgcttggtgctgccttaggtccattcattaccggttttatttcaaaacgtggatgggattcagttttcacaatgcttatattttgtgcattagctgccggcgtcttattgtcacgtattgtgaagtctgaaattgttcatatcattcagaatcggagaaatcacacacttgacatgcataacagaactgcaggtgaggacttaaaacacactaatgttgcatctttctccattttggatatgtcaaacaatggtctgctaatgttttccttcctgttcctcatagattctggtgctcaaccacttttagaaggagacacttga

SEQ ID NO: 55945 - protein, 525 aa, Oryza sativa
MAKPPPAPHRAHRAPPGLCALPAISYNSHRGLVLGLTFVAYALYHASRKPPSIVKRALSEAWPPFHDPALLGETDVAFLAFYSLGMFVAGHLGDRLDLRLFLAVGMIGSGTAVALFGVGYFLSLHSLAFYLAAQVIAGLLQSTGWPSVVAIVGNWFRGRRRGLIMGIWNAHTSIGNISGSLIAAAVLRYGWGWSFIVPGLLIAFGGVLVFFFLAPYPEDLGFSPTTLPKAVSEASTDEEDSSSSASAAGGAGKEERRDAVGMWKAFAIPGVITFALCLFFAKLVAYTFLYWLPFYLSQTAIGGKEMSVTSAGYLSALFDVGGIIGGILAGFISDHLNARATTAAIFMYLAIPSLYAFHAYGSTSEVANIGLMMISGLFVNGPYALITTAVSADLGTHKSLKGDSRALATVTSIIDGTGSLGAALGPFITGFISKRGWDSVFTMLIFCALAAGVLLSRIVKSEIVHIIQNRRNHTLDMHNRTAGEDLKHTNVASFSILDMSNNGLLMFSFLFLIDSGAQPLLEGDT

SEQ ID NO: 55946 - DNA, 1290 bp, Mus musculus
  CDS (1)..(1290)
atggcagcccaaggctacggctactatcgcactgtcatatttgcggccatgtttggaggctacagcctgtactatttcaaccgcaaaaccttctcctttgtcatgccctccttggtggatgagatcgctctggacaaggacgatttggggctcatcacaagcagccagtcggcagcctacgccatcagcaagtttgtgagcggggttctgtcagaccagatgagcgcccgctggctcttctcctctgggctgctcctggttggtctggtcaacgtagtcttctcatggagctccacagtgtcagcctttgctgctccttggtttcttaatggtctggcacaggggctgggctggcccccctgtgggaagatcctgaggaagtggtttgagccatcccagtttggcacttggtgggctgtgttgtcaaccagcatgaacctggctggaagtttgggacctatcttggcaacgatcctcgcccagagctacagctggcgcagcacactggccctgtctggggcactgtgtgtggttgtctccttcttctgtctgctgctcatccacaatgaacctgctgatgttggactccgaaatctggaccctctgccctctgagggcaagaagggctccttgaaggaggagagcaccctacaggagctgctgctgtccccctatctctgggtgctgtccactggctaccttgtggtcttcggagtaaagacttgctgtacagactggggccagttcttccttatccaggagagagggcagtccgcccttgtgggtagctcctacatcagtgccctcgaggtcggaggccttgtaggaagcattgcagctggttacctgtcagacagggccatggcgaaggcagggctgtctctgtatgggaaccctcgccacggcctattgctactcatgatggctgggatggcagcatccacgtatctcttccgagtaacggtgaccagtgactcacccaagatctggatcctggttttgggagccgtgtttggtttctcttcttatggtcccattgccttgtttggagtcatagccaatgagagtgcacctcccaacttgtgtggaacctctcatgctattgtgggacttatggccaatgtgggtggatttctggctggcttacccttcagcaccattgccaagcactatagctggagcacagccttctgggtggcagaagtggtttgtggagccagcacagttgtcttcttcttgcttcgaaatatccgcaccaagatgggccgagtatccaagaagggagagtga

SEQ ID NO: 55947 - protein, 429 aa, Mus musculus
MAAQGYGYYRTVIFAAMFGGYSLYYFNRKTFSFVMPSLVDEIALDKDDLGLITSSQSAAYAISKFVSGVLSDQMSARWLFSSGLLLVGLVNVVFSWSSTVSAFAAPWFLNGLAQGLGWPPCGKILRKWFEPSQFGTWWAVLSTSMNLAGSLGPILATILAQSYSWRSTLALSGALCVVVSFFCLLLIHNEPADVGLRNLDPLPSEGKKGSLKEESTLQELLLSPYLWVLSTGYLVVFGVKTCCTDWGQFFLIQERGQSALVGSSYISALEVGGLVGSIAAGYLSDRAMAKAGLSLYGNPRHGLLLLMMAGMAASTYLFRVTVTSDSPKIWILVLGAVFGFSSYGPIALFGVIANESAPPNLCGTSHAIVGLMANVGGFLAGLPFSTIAKHYSWSTAFWVAEVVCGASTVVFFLLRNIRTKMGRVSKKGE

SEQ ID NO: 55948 - DNA, 1335 bp, Bacillus subtilis
  CDS (1)..(1335): transl_table=11
atgcttaatatatttaaaccggctcctcatattgagagactggatgattcaaagatggatgcggcatacaaacggctcagactgcaagtattcattggtattttcattggctacgcaggctactacctgctgcggaaaaactttgcctttgccattccttatctgcaggaacagggattttcgaaaacagaactgggtttggtgctggccgctgtgtccattgcgtacggcttcagcaaattcatcatgggaatggtgtctgaccgctgtaatccgagatattttctggcgacaggcctatttttatcagcaatcgttaatattctattcgtttcaatgccttgggtgacttcgagcgtcaccatcatgtttatttttatgtttatcaacggatggtttcaaggaatgggctggccgccatgcggcaggacgatggcccattggttctccataagtgaacgcggcacaaaaatgtcgatctggaatgtcgcccataacataggcggcggtattcttgctccgcttgtcactcttgggatcgcgatgttcgtcacttggaaaagcgtgtttttcttccctgccatcatcgccattatcatttcatttttaattgttttattggttcgtgatacgcctcaatcctgcggactcccgccaattgaagagtatcggaatgactatccaaaacacgcttttaaaaatcaggaaaaagaattaacaacaaaagaaattctttttcaatatgtgctgaacaacaaatttctttggtacatcgcttttgccaatgtatttgtttatttcgtgcgatacggcgtggttgactgggcgcctacttacttaacagaagccaaaggcttttctcctgaagactcacgctggtcgtattttctttacgaatacgcaggcataccgggaacgatcttgtgcggctggatcagtgaccgattcttcaaaagccgccgggcaccggcaggcgttttgtttatggcgggtgttttcattgccgtattggtgtactggctgaatccggccggcaatccgctcgtggacaatatcgccctgatcagcattggcttcttaatctacggacctgttatgctgatcggccttcaagcaattgacctagcaccgaaaaaagcagccggaactgcagccggtttgaccggatttttcggatacatcggcggatccgccttcgcaaacgccattatgggctttgtcgtggaccgttttaactggaacggcggctttatcatgctgatctcatcctgcattcttgccatcgtcttcttggctttgacgtggaatacaggaaaacgggcagagcatgtttaa

SEQ ID NO: 55949 - protein, 444 aa, Bacillus subtilis
MLNIFKPAPHIERLDDSKMDAAYKRLRLQVFIGIFIGYAGYYLLRKNFAFAIPYLQEQGFSKTELGLVLAAVSIAYGFSKFIMGMVSDRCNPRYFLATGLFLSAIVNILFVSMPWVTSSVTIMFIFMFINGWFQGMGWPPCGRTMAHWFSISERGTKMSIWNVAHNIGGGILAPLVTLGIAMFVTWKSVFFFPAIIAIIISFLIVLLVRDTPQSCGLPPIEEYRNDYPKHAFKNQEKELTTKEILFQYVLNNKFLWYIAFANVFVYFVRYGVVDWAPTYLTEAKGFSPEDSRWSYFLYEYAGIPGTILCGWISDRFFKSRRAPAGVLFMAGVFIAVLVYWLNPAGNPLVDNIALISIGFLIYGPVMLIGLQAIDLAPKKAAGTAAGLTGFFGYIGGSAFANAIMGFVVDRFNWNGGFIMLISSCILAIVFLALTWNTGKRAEHV

SEQ ID NO: 55950 - DNA, 1443 bp, Haemophilus influenzae
  CDS (1)..(1443): transl_table=11
atgtttggaccattcaaacccgctccgcatattgcggaacttccagcggaaaaaattgattccacgtataaacgcttacgttggcaagtgtttgcagggatcttcttcggttatgctgcatattattttgtgcgtgcaaactttgacttagcacaacctggtttaattcaagctggcttgtactcaaaagcggaattaggtgttatcggctcagcggctggtcttgcttacggtttatcaaaattcgttatggcaggtatgtctgaccgttctaaccctcgtgtattcttaccatttggtttattgctctctggtttatgtatgaccttaatgggtttattcccatgggcaacttcaggcattgccattatgtgggtaatgatcttcttaaatggttggttccaaggtatgggttggcctccatgtggtcgtactatggtgcattggtggtctaaatctgaacgcggtactatcgtgtcaatttggaatacggcacataatatcggtggtatggtgcctggtgcaatggtgttattagctagtgcaattttcttcagtactcacggtattgaagcgcaggcgaaagatgtttggcaacaatcattatacttccctggtattgctgcgatgatctttgcaattcctgtgtacttcgtgatgcgtgatactccacaatcttgtggtttaccatcaatcgaaaaatggcgtaatgactacccagatgactataacgaaaaaacttacgaaaacgatttaactgcaaaagaaatcttcgtaacttatgtattaaaaaacaaattgttatggtatatcgcgattgctaatgtgttcgtctatttaatccgctacggtgtattaaaatggtctccagtttacttgagtgaagtgaaacacttcaacatcaaaggtactgcatgggcatacacaatctatgaattagcagcggttccaggtacattattatgtggttgggtatcagataaagtgtttaaaggtaaacgtggtttaactggtttcatctttatgatcttaaccactgcagcggttgttgcgtactggatgaacccagctacaccagaagcagagcttgcaaactactcagcttggtatgaaaacccatatcaattaactgatttcgtattaatgaccttaatcggtttcttaatctacggtcctgtaatgttaatcggtttacatgctcttgagcttgcaccgaaaaaagcagcaggtactgcagcaggtttcactggtttattcggttacttaggtggtactgtatcagcttcagcagttattggttgggcagctcaacattacggatgggacggtggtttctacgtaatgatcggcggtggcgtattagcggtgttattactcttaatcgtaatggttgaagaaggaaaacacaaagcgaaattaggcgatacttacggtactaaataa

SEQ ID NO: 55951 - protein, 480 aa, Haemophilus influenzae
MFGPFKPAPHIAELPAEKIDSTYKRLRWQVFAGIFFGYAAYYFVRANFDLAQPGLIQAGLYSKAELGVIGSAAGLAYGLSKFVMAGMSDRSNPRVFLPFGLLLSGLCMTLMGLFPWATSGIAIMWVMIFLNGWFQGMGWPPCGRTMVHWWSKSERGTIVSIWNTAHNIGGMVPGAMVLLASAIFFSTHGIEAQAKDVWQQSLYFPGIAAMIFAIPVYFVMRDTPQSCGLPSIEKWRNDYPDDYNEKTYENDLTAKEIFVTYVLKNKLLWYIAIANVFVYLIRYGVLKWSPVYLSEVKHFNIKGTAWAYTIYELAAVPGTLLCGWVSDKVFKGKRGLTGFIFMILTTAAVVAYWMNPATPEAELANYSAWYENPYQLTDFVLMTLIGFLIYGPVMLIGLHALELAPKKAAGTAAGFTGLFGYLGGTVSASAVIGWAAQHYGWDGGFYVMIGGGVLAVLLLLIVMVEEGKHKAKLGDTYGTK

SEQ ID NO: 55952 - DNA, 1392 bp, Salmonella typhimurium
  CDS (1)..(1392): transl_table=11
atgttaacaatattaaaaacagggcaatcggcgcataaagtcccaccggaaaaagtccaggccacatatggtcgatatcgtatacaggcattgttaagtgtatttctgggatatctcgcttactatatagtcagaaacaacttcacattatcgacgccttatttaaaagagcaattggatctcagcgctacgcaaatcggcctgctgagtagctgtatgcttattgcttacggaatcagtaaaggcgtaatgagcagtctggcggataaagccagcccaaaagtcttcatggcgtgcggtctggtactctgcgcgattgttaacgttgggctgggattcagtagcgcattctggatatttgccgctctggtggtcttcaatggcctttttcagggcatgggcgtcggcccctcgtttattactattgcaaactggttccctcgtcgggagcgcggacgcgtaggcgccttctggaatatctcgcataacgttggcggcgggatcgtcgcgcctatcgtcggtgcggcttttgcgatattgggcagcgaacactggcaaagcgccagttatatcgttccggcctgcgtcgccgtcatttttgccttaattgttctggtcttgggaaaaggttcgccgcgcaaagaaggtcttccctccctggaacagatgatgccggaagaaaaagtcgtactgaaaacgaagaatacggcaaaagcgccggaaaatatgagcgcatggcaaatcttctgtacttatgtgctgcgcaataaaaatgcctggtatatttcgctggtggatgtcttcgtctatatggtgcggtttggcatgattagctggttgcctatctatctgttgacagtaaaacacttttcaaaagaacagatgagcgtcgcgtttctctttttcgagtgggcggcgattccctccacgctactggcaggctggctgtcagataaactgtttaagggccgcagaatgccgttagccatgatttgcatggcgctgatttttgtctgtctgatcggatactggaaaagtgaatctttgctgatggtaacgattttcgccgccattgtaggttgtctgatttacgtcccgcagttcctcgcgtccgtacagacaatggaaatagtccccagctttgccgtaggttccgccgtcggtttacgtgggttcatgagctatattttcggcgcctcgttgggcaccagcctgtttggtgtaatggtggataaacttggctggtacggcggattttatcttctgatgggcggcatcgtgtgctgcattctattctgttacctctcccatcgcggcgcgctggaactggaacgccagcgccagaatgcgttacataatcaggactcactgcagcttgcggacgcgcaataa

SEQ ID NO: 55953 - protein, 463 aa, Salmonella typhimurium
MLTILKTGQSAHKVPPEKVQATYGRYRIQALLSVFLGYLAYYIVRNNFTLSTPYLKEQLDLSATQIGLLSSCMLIAYGISKGVMSSLADKASPKVFMACGLVLCAIVNVGLGFSSAFWIFAALVVFNGLFQGMGVGPSFITIANWFPRRERGRVGAFWNISHNVGGGIVAPIVGAAFAILGSEHWQSASYIVPACVAVIFALIVLVLGKGSPRKEGLPSLEQMMPEEKVVLKTKNTAKAPENMSAWQIFCTYVLRNKNAWYISLVDVFVYMVRFGMISWLPIYLLTVKHFSKEQMSVAFLFFEWAAIPSTLLAGWLSDKLFKGRRMPLAMICMALIFVCLIGYWKSESLLMVTIFAAIVGCLIYVPQFLASVQTMEIVPSFAVGSAVGLRGFMSYIFGASLGTSLFGVMVDKLGWYGGFYLLMGGIVCCILFCYLSHRGALELERQRQNALHNQDSLQLADAQ

SEQ ID NO: 55954 - DNA, 1371 bp, Chlamydia muridarum
  CDS (1)..(1371): transl_table=11
atgaatctatggaccaaaatttttcagcctcctcgccacattaaagaaatcagtgatccggagttggttaaaaagcaatataaatactggagagtgcgtatcttttacagcatgttttttggttacgtgttcttctattttacaaggaaaagctttacctttgctatgccaactctaattgcagatcttggatttgataaggcgcaactagggattattggcagtacactctacattacttacggcattagtaaatttgtaagcggtgtgatgtcagaccaatccaaccctcgctatttcatggcgaccggattaattattactggcctctctaatatcttctttggcctatcgtctaccgtgcctttgtttgtgctgttttggggaattaatggttggttccaaggatggggctggcctccttgtgcacgtctactgactcactggtattctaaatcagaaagaggaacttggtggagcgtctggagtacttctcacaatattggaggagctttaatccctgttttgactggaatcgctatcgattatgcaggatggcgaggagctatgtttatcccaggaattatttgcattatcatgggatttatcttaattgaccgtttgcgagacactccacaatcgctagggcttccggctatagaaaagtttaaaaaagaagacctttctcatccgcatgaggaaactaccgcggatattttggaagaggaggccgaaagagagctttccactaaagaaattttatttacttacgtgttatcaaataaatggttatggttcctatccttcgcttccttcttcatttacgtagtccgcatggcagtgaacgattggagcgctctttatctcattgagacaaagaattattccacagtaaaagcgaatctctgcgtatctttgtttgaaattggcggattatttggtatgctattagcgggctggttatccgacaccatttctaaaggaaagcgagggccaatgaatgtagtcttctcgctgggattactattctctatcttgggattatggggaactcatgatcgttctatatggtgggcagatggagcatttctatttatcatcggctttttcctttttggaccacaaatgatgatcggattagcagccgcagaattatcacataaaaaagccgctggaacggccagtggttttacaggatggttcgcctatttcggagctgcttttgctggatatcctctaggaaaagttgcccaagattggggatggcatggattctttgttgctctcttagcctgtgctttgattgcactcctgttcttcttgccaacatggaatgcatccgagcagagtttaagaaaacatagtcactaa

SEQ ID NO: 55955 - protein, 456 aa, Chlamydia muridarum
MNLWTKIFQPPRHIKEISDPELVKKQYKYWRVRIFYSMFFGYVFFYFTRKSFTFAMPTLIADLGFDKAQLGIIGSTLYITYGISKFVSGVMSDQSNPRYFMATGLIITGLSNIFFGLSSTVPLFVLFWGINGWFQGWGWPPCARLLTHWYSKSERGTWWSVWSTSHNIGGALIPVLTGIAIDYAGWRGAMFIPGIICIIMGFILIDRLRDTPQSLGLPAIEKFKKEDLSHPHEETTADILEEEAERELSTKEILFTYVLSNKWLWFLSFASFFIYVVRMAVNDWSALYLIETKNYSTVKANLCVSLFEIGGLFGMLLAGWLSDTISKGKRGPMNVVFSLGLLFSILGLWGTHDRSIWWADGAFLFIIGFFLFGPQMMIGLAAAELSHKKAAGTASGFTGWFAYFGAAFAGYPLGKVAQDWGWHGFFVALLACALIALLFFLPTWNASEQSLRKHSH

SEQ ID NO: 55956 - DNA, 1368 bp, Chlamydia pneumoniae
  CDS (1)..(1368): transl_table=11
atgaacgtttggactaaatttttccaacctccaaagcacattaaagaaattgaagaccaagaagtggtcaagaaaaaatacaaatactggcgtattcgtattttctatagcatgttcatcggctacattttctattatttcacaagaaaaagctttacctttgcgatgcccacgctaattgctgatttgggttttgataaagcgcaattagggatcataggaagtaccttatatttttcttatggaatcagtaagtttgttagcggagtcatgtccgaccaatccaatcctagatatttcatggctataggattgatgattacagggctcactaacatctttttcgggatgtcatcctctattgtattatttgctctttggtggggactaaacggatggttccaagggtggggctggcctccatgtgctcgtctactcacccactggtatgcgaaatcagaacggggcacttggtggagtgtgtggagtacctcccacaatattgggggagcacttattcctattctcacaggattcattattgattatagtggatggcggggagccatgtatgttccaggcattctttgtattggaatgggtttagttttaattaatcgtttacgagacacgcctcagtccttagggctacctcctatagagaagtacaagcgtgatccccatcacgcacatcacgagggcaaatcagcctcagaaggaactgaggaaatcgaacgcgagctatccactagagaaattctttttacctatgtccttacaaatcagtggctttggtttttagctgctgcctcgttctttatttatatagtacgaatggcagtcaacgattggagcgctttattccttattgagacaaaacattatgcggcagtgaaagccaatttttgcgtatctctatttgagattggtggtttattcggcatgctagttgctggttggttatctgataagatttctaagggcaatcgtgggcctatgaacgtcctcttctctttaggtttgctgtttgctattttaggcatgtggttttcacgtagtcataatcagtggtgggtggacggaaccttacttttcgttattggttttttcttatacggccctcaaatgatgatcggtctagcagcagcagaactctctcataaaaaagctgctggtactgctagcggatttactggatggttcgcttattttggagctacctttgcagggtatcctttaggaaaggttactgatgtttgggggtggaaagggtttttcattgctctcttagcctgtgcatccatagctttattgctctttttaccaacttggaacgctacggagaaaaacactcgtagtaaagcctag

SEQ ID NO: 55957 - protein, 455 aa, Chlamydia pneumoniae
MNVWTKFFQPPKHIKEIEDQEVVKKKYKYWRIRIFYSMFIGYIFYYFTRKSFTFAMPTLIADLGFDKAQLGIIGSTLYFSYGISKFVSGVMSDQSNPRYFMAIGLMITGLTNIFFGMSSSIVLFALWWGLNGWFQGWGWPPCARLLTHWYAKSERGTWWSVWSTSHNIGGALIPILTGFIIDYSGWRGAMYVPGILCIGMGLVLINRLRDTPQSLGLPPIEKYKRDPHHAHHEGKSASEGTEEIERELSTREILFTYVLTNQWLWFLAAASFFIYIVRMAVNDWSALFLIETKHYAAVKANFCVSLFEIGGLFGMLVAGWLSDKISKGNRGPMNVLFSLGLLFAILGMWFSRSHNQWWVDGTLLFVIGFFLYGPQMMIGLAAAELSHKKAAGTASGFTGWFAYFGATFAGYPLGKVTDVWGWKGFFIALLACASIALLLFLPTWNATEKNTRSKA

SEQ ID NO: 55958 - DNA, 1371 bp, Chlamydia trachomatis
  CDS (1)..(1371): transl_table=11
atgaatctatggaccaaaatttttcagcctccttgccacattaaagaaatcagtgacccggagttggttaaaaagcagtacaagtactggagaatgcgtatcttctacagcatgttcttggggtacgtgttcttctactttacaaggaaaagctttacttttgccatgccaaccttgatcgctgatctcgggtttgataaagctcagctagggattatcggtagtactctctatatcacttacggcattagtaaatttgtaagcggtgtcatgtctgaccagtccaatcctcgctatttcatggctattggattgattattactggtatctctaacatcttctttggtctctcttctacaatccctctgtttgtattgttctggggaattaacggttggttccaaggatggggatggcctccatgcgcacgattgttaactcactggtattccaaatcagagagaggaacctggtggagcgtttggagcacttctcataatatagggggagcgttgatccctgttcttaccggagttgctattgactacacggggtggcgcggcgctatgtttatcccagggattatttgcattatcatgggatttatcttaatcgatcgtttgcgagacactccgcaatcactcgggctccccgctatagaaaaatttagaaaagaagaggatgcgcatccacatgaagaaacaactgcagatatcttagaggaagaggcagaaagagagctctctacaaaagaaatcttgtttacttacgtactatctaataaatggctatggtttctgtcttttgcctccttctttatttatgtggttcgcatggcagtaaatgattggagcgctctctatctaatcgaaacaaaagattattccacagtaaaagcaaatctctgcgtatctttgtttgaaattggcggattatttggtatgctattagcgggctggctatccgacacgatttccaaaggaaaacgtggaccaatgaacgtagtcttctcgctaggattattagtttccatcttgggattatggggtactcgcgattacttcgtttggtggatagatggaacattcctatttatcattggttttttcctttttggaccacaaatgatgattggattggcagctgcagaattgtctcataaaaaagcagctggaacggccagcggctttacaggatggttcgcctacttcggagcagctttcgccggatatcctttagggaaggtggctcaggattggggctggcacggattctttgttgcgctcttagcttgtgctttgattgcgctgatccttttcttgccaacatggaatgcatccgaacagagtttgagaaaacatagtcactaa

SEQ ID NO: 55959 - protein, 456 aa, Chlamydia trachomatis
MNLWTKIFQPPCHIKEISDPELVKKQYKYWRMRIFYSMFLGYVFFYFTRKSFTFAMPTLIADLGFDKAQLGIIGSTLYITYGISKFVSGVMSDQSNPRYFMAIGLIITGISNIFFGLSSTIPLFVLFWGINGWFQGWGWPPCARLLTHWYSKSERGTWWSVWSTSHNIGGALIPVLTGVAIDYTGWRGAMFIPGIICIIMGFILIDRLRDTPQSLGLPAIEKFRKEEDAHPHEETTADILEEEAERELSTKEILFTYVLSNKWLWFLSFASFFIYVVRMAVNDWSALYLIETKDYSTVKANLCVSLFEIGGLFGMLLAGWLSDTISKGKRGPMNVVFSLGLLVSILGLWGTRDYFVWWIDGTFLFIIGFFLFGPQMMIGLAAAELSHKKAAGTASGFTGWFAYFGAAFAGYPLGKVAQDWGWHGFFVALLACALIALILFLPTWNASEQSLRKHSH

SEQ ID NO: 55960 - DNA, 1392 bp, Escherichia coli
  CDS (1)..(1392): transl_table=11
atgctggctttcctaaaccaagttcgcaagccgaccctggaccttccgctcgaagtgcggcgcaaaatgtggttcaaaccgttcatgcaatcctacctggtggtctttatcggctacctgacgatgtacctgattcgcaagaactttaacatcgcgcagaacgatatgatttcgacctacgggttgagcatgacgcagctggggatgatcggcctgggtttctccatcacttatggcgtgggtaaaacgttggtttcatactacgccgacggcaaaaacaccaaacaattcctgccgttcatgcttatcctctctgccatttgtatgctgggcttcagtgccagtatgggcagcggctcggttagcctgttcctgatgattgccttctacgccttaagcggctttttccagagtaccggcggttcgtgcagttactccaccatcaccaaatggacgccgcgtcgtaaacgcgggacattcctcggtttctggaatatttctcacaaccttggcggtgcaggcgcagcaggtgtggcgctgttcggggcaaattacctgttcgatggccatgtcatcggcatgtttatcttcccgtcgattatcgcgctgattgtcggttttatcggcctgcgttacggcagcgactccccggaatcttatggcctcggcaaagctgaagaactgttcggcgaggagatcagcgaagaggacaaagagacagaatctaccgatatgaccaagtggcagatctttgttgagtatgtgctgaaaaacaaagtgatctggctgctgtgcttcgccaacattttcctctatgtggtacgtattggtatcgaccagtggtcaaccgtatacgcgttccaggaactgaaactctctaaagcggtggcgattcagggctttacgctgtttgaagctggtgcgctggtcggtacgctgctgtggggctggctctctgacctggcgaacggtcgccgtggcctggtggcctgcatcgcgctggcgctgattatcgccacgctcggtgtgtatcaacatgccagtaacgaatatatctatctggcttctctctttgcgttgggtttcctggtctttggcccgcaattgttgattggtgtggctgctgttggctttgtacctaaaaaagcgattggcgctgccgatggtattaaaggcacctttgcttacctgattggtgacagctttgccaagttaggtctgggaatgattgccgatgggacgccggtattcggccttaccggctgggcaggcaccttcgccgcgctggatatcgccgcgattggttgtatctgcctgatggcgatagtggcggtaatggaagaacgcaaaatccgccgcgagaaaaaaattcagcagttgacagtggcataa

SEQ ID NO: 55961 - protein, 463 aa, Escherichia coli
MLAFLNQVRKPTLDLPLEVRRKMWFKPFMQSYLVVFIGYLTMYLIRKNFNIAQNDMISTYGLSMTQLGMIGLGFSITYGVGKTLVSYYADGKNTKQFLPFMLILSAICMLGFSASMGSGSVSLFLMIAFYALSGFFQSTGGSCSYSTITKWTPRRKRGTFLGFWNISHNLGGAGAAGVALFGANYLFDGHVIGMFIFPSIIALIVGFIGLRYGSDSPESYGLGKAEELFGEEISEEDKETESTDMTKWQIFVEYVLKNKVIWLLCFANIFLYVVRIGIDQWSTVYAFQELKLSKAVAIQGFTLFEAGALVGTLLWGWLSDLANGRRGLVACIALALIIATLGVYQHASNEYIYLASLFALGFLVFGPQLLIGVAAVGFVPKKAIGAADGIKGTFAYLIGDSFAKLGLGMIADGTPVFGLTGWAGTFAALDIAAIGCICLMAIVAVMEERKIRREKKIQQLTVA

SEQ ID NO: 55962 - DNA, 1392 bp, Salmonella typhimurium
  CDS (1)..(1392): transl_table=11
atgctggccttcttaaaccaggtgcgcaagccgaccctggatctgccgctcgatgtgcggcgtaaaatgtggttcaagccgttcatgcagtcctatctggtggtttttatcggctacctgaccatgtacctgatccgcaaaaactttaacatcgcgcagaacgacatgatctctacctacgggttgagcatgaccgagctggggatgattggcctgggcttctcgatcacctatggcgtggggaaaacgctggtttcctactacgctgacggtaaaaataccaagcagtttctaccgtttatgttgatcctctccgctatctgtatgctcggcttcagcgccagcatgggcgcggggtcaaccagtctgtttctgatgatcgctttctatgccctgagcggtttcttccagagtaccggcggatcgtgcagctactcgaccatcaccaaatggactccgcgtcgtaaacgcggcacctttctcggcttctggaatatctcccacaacctcggcggcgcgggcgcggcaggtgtggcgctgttcggcgccaactacctgttcgacggtcacgtcatcggcatgtttatcttcccgtcgattatcgcgctgattgttggctttatcggtctgcgtttcggcagcgactccccggaatcttacggtctgggtaaagctgaagaactgttcggcgaagagatcagcgaagaggataaagagactgaagaaaacgaaatgaccaagtggcagatctttgttgaatatgtgttgaaaaacaaagtgatctggctgctgtgtttctccaatatcttcctgtatgtggtacgtattggtatcgaccagtggtcaaccgtctacgccttccaggagctgaaactttctaaagaggtggcgattcagggctttaccttgtttgaagtgggcgcgctggtcggcacgttgctgtggggctggctctctgacctggcgaacggtcgtcgtgcgctggtagcctgtgtggcgctggcgttaatcatcgccaccctcggcgtctaccagcacgccagcaaccagtatgtctatctggcctcgctgttcgcgctcggtttcctggtgtttgggccgcagctattaattggcgtggcggctgtcggtttcgtaccgaaaaaagccatcggcgctgcggacggtatcaagggcaccttcgcttatcttatcggcgatagctttgccaagctgggtctgggcatgattgccgacggcacccccgtttttggtctgaccggctgggcgggcacgttcgccgcgctggacgccgccgcgatcggctgtatctgcctgatggcgatggtcgccgtgatggaagagcgcaaaatccgccgtgagaaaaaaattcagcaagtcaatatcgcttaa

SEQ ID NO: 55963 - protein, 463 aa, Salmonella typhimurium
MLAFLNQVRKPTLDLPLDVRRKMWFKPFMQSYLVVFIGYLTMYLIRKNFNIAQNDMISTYGLSMTELGMIGLGFSITYGVGKTLVSYYADGKNTKQFLPFMLILSAICMLGFSASMGAGSTSLFLMIAFYALSGFFQSTGGSCSYSTITKWTPRRKRGTFLGFWNISHNLGGAGAAGVALFGANYLFDGHVIGMFIFPSIIALIVGFIGLRFGSDSPESYGLGKAEELFGEEISEEDKETEENEMTKWQIFVEYVLKNKVIWLLCFSNIFLYVVRIGIDQWSTVYAFQELKLSKEVAIQGFTLFEVGALVGTLLWGWLSDLANGRRALVACVALALIIATLGVYQHASNQYVYLASLFALGFLVFGPQLLIGVAAVGFVPKKAIGAADGIKGTFAYLIGDSFAKLGLGMIADGTPVFGLTGWAGTFAALDAAAIGCICLMAMVAVMEERKIRREKKIQQVNIA

SEQ ID NO: 55964 - DNA, 25 bp, Artificial sequence
  Primer sequence
atgttgagtatttttaaaccagcgc

SEQ ID NO: 55965 - DNA, 22 bp, Artificial sequence
  Primer sequence
ttagcctccgttgcgttcttgc

SEQ ID NO: 55966 - protein, 542 aa, Artificial sequence
  Consensus
  Variant (2)..(11): Xaa in position 2 to 11 is any amino acid
  Variant (14)..(14): Xaa in position 14 is any amino acid
  Variant (17)..(18): Xaa in position 17 to 18 is any amino acid
  Variant (21)..(22): Xaa in position 21 to 22 is any amino acid
  Variant (24)..(25): Xaa in position 24 to 25 is any amino acid
  Variant (27)..(32): Xaa in position 27 to 32 is any amino acid
  Variant (34)..(39): Xaa in position 34 to 39 is any amino acid
  Variant (40)..(90): Xaa in position 40 to 90 is any or no amino acid
  Variant (93)..(99): Xaa in position 93 to 99 is any amino acid
  Variant (101)..(101): Xaa in position 101 is any amino acid
  Variant (105)..(105): Xaa in position 105 is any amino acid
  Variant (109)..(109): Xaa in position 109 is any amino acid
  Variant (111)..(111): Xaa in position 111 is any amino acid
  Variant (113)..(113): Xaa in position 113 is any amino acid
  Variant (115)..(118): Xaa in position 115 to 118 is any amino acid
  Variant (119)..(119): Xaa in position 119 is any or no amino acid
  Variant (121)..(122): Xaa in position 121 to 122 is any amino acid
  Variant (124)..(125): Xaa in position 124 to 125 is any amino acid
  Variant (128)..(129): Xaa in position 128 to 129 is any amino acid
  Variant (133)..(137): Xaa in position 133 to 137 is any amino acid
  Variant (139)..(151): Xaa in position 139 to 151 is any amino acid
  Variant (152)..(160): Xaa in position 152 to 160 is any or no amino acid
  Variant (162)..(162): Xaa in position 162 is any amino acid
  Variant (164)..(165): Xaa in position 164 to 165 is any amino acid
  Variant (167)..(168): Xaa in position 167 to 168 is any amino acid
  Variant (170)..(170): Xaa in position 170 is any or no amino acid
  Variant (172)..(175): Xaa in position 172 to 175 is any amino acid
  Variant (176)..(176): Xaa in position 176 is any or no amino acid
  Variant (178)..(179): Xaa in position 178 to 179 is any amino acid
  Variant (182)..(185): Xaa in position 182 to 185 is any amino acid
  Variant (187)..(192): Xaa in position 187 to 192 is any or no amino acid
  Variant (194)..(197): Xaa in position 194 to 197 is any amino acid
  Variant (200)..(201): Xaa in position 200 to 201 is any amino acid
  Variant (203)..(203): Xaa in position 203 is any amino acid
  Variant (208)..(208): Xaa in position 208 is any amino acid
  Variant (210)..(212): Xaa in position 210 to 212 is any amino acid
  Variant (214)..(229): Xaa in position 214 to 229 is any amino acid
  Variant (230)..(242): Xaa in position 230 to 242 is any or no amino acid
  Variant (244)..(244): Xaa in position 244 is any amino acid
  Variant (246)..(246): Xaa in position 246 is any amino acid
  Variant (249)..(249): Xaa in position 249 is any amino acid
  Variant (252)..(260): Xaa in position 252 to 260 is any amino acid
  Variant (262)..(264): Xaa in position 262 to 264 is any amino acid
  Variant (267)..(268): Xaa in position 267 to 268 is any amino acid
  Variant (270)..(275): Xaa in position 270 to 275 is any amino acid
  Variant (276)..(317): Xaa in position 276 to 317 is any or no amino acid
  Variant (319)..(319): Xaa in position 319 is any amino acid
  Variant (320)..(322): Xaa in position 320 to 322 is any or no amino acid
  Variant (324)..(325): Xaa in position 324 to 325 is any amino acid
  Variant (327)..(328): Xaa in position 327 to 328 is any amino acid
  Variant (331)..(331): Xaa in position 331 is any amino acid
  Variant (333)..(338): Xaa in position 333 to 338 is any amino acid
  Variant (341)..(341): Xaa in position 341 is any amino acid
  Variant (344)..(344): Xaa in position 344 is any amino acid
  Variant (347)..(348): Xaa in position 347 to 348 is any amino acid
  Variant (350)..(352): Xaa in position 350 to 352 is any amino acid
  Variant (355)..(370): Xaa in position 355 to 370 is any amino acid
  Variant (371)..(376): Xaa in position 371 to 376 is any or no amino acid
  Variant (379)..(379): Xaa in position 379 is any amino acid
  Variant (383)..(383): Xaa in position 383 is any amino acid
  Variant (385)..(385): Xaa in position 385 is any amino acid
  Variant (388)..(388): Xaa in position 388 is any amino acid
  Variant (391)..(391): Xaa in position 391 is any amino acid
  Variant (394)..(397): Xaa in position 394 to 397 is any amino acid
  Variant (398)..(407): Xaa in position 398 to 407 is any or no amino acid
  Variant (409)..(422): Xaa in position 409 to 422 is any amino acid
  Variant (424)..(441): Xaa in position 424 to 441 is any amino acid
  Variant (442)..(467): Xaa in position 442 to 467 is any or no amino acid
  Variant (470)..(471): Xaa in position 470 to 471 is any amino acid
  Variant (476)..(477): Xaa in position 476 to 477 is any amino acid
  Variant (481)..(481): Xaa in position 481 is any or no amino acid
  Variant (483)..(483): Xaa in position 483 is any amino acid
  Variant (485)..(485): Xaa in position 485 is any amino acid
  Variant (487)..(493): Xaa in position 487 to 493 is any amino acid
  Variant (494)..(494): Xaa in position 494 is any or no amino acid
  Variant (496)..(496): Xaa in position 496 is any amino acid
  Variant (498)..(498): Xaa in position 498 is any amino acid
  Variant (500)..(501): Xaa in position 500 to 501 is any amino acid
  Variant (503)..(504): Xaa in position 503 to 504 is any amino acid
  Variant (508)..(508): Xaa in position 508 is any amino acid
  Variant (509)..(512): Xaa in position 509 to 512 is any or no amino acid
  Variant (514)..(515): Xaa in position 514 to 515 is any amino acid
  Variant (516)..(516): Xaa in position 516 is any or no amino acid
  Variant (519)..(525): Xaa in position 519 to 525 is any amino acid
  Variant (526)..(537): Xaa in position 526 to 537 is any or no amino acid
  Variant (539)..(541): Xaa in position 539 to 541 is any amino acid
YXXXXXXXXXXIFXGYXXYYXXRXXFXXXXXXLXXXXXXXXXXXXXXXXXXXXXXXXXXXXXXXXXXXXXXXXXXXXXXXXXXXXXXXXXLGXXXXXXXIXYGLXKFVXGXLXDXXXXXRXXLXXGLXXSGIXXXXXGXXXXXXXXXXXXXXXXXXXXXXLXGXXQXXGXPXXXXXLXXWFXXXXRXXXXXXGXXXXIWXXSXNVGGXLXXXLXXXXXXXXXXXXXXXXXXXXXXXXXXXXXGXIXILXAIXXXXXXXXXPXXXGLXXIXXXXXXXXXXXXXXXXXXXXXXXXXXXXXXXXXXXXXXXXXXXXXXXXIXXXXVXXNXXLWXLXXXXXXVYXVRXGIXXWXXXYLXXXXXXXXXXXXXXXXXXXXXXFEXGGIXGXLLXGWXSDXXXXXXXXXXXXXXRXXXXXXXXXXXXXXLXXXXXXXXXXXXXXXXXXXXXXXXXXXXXXXXXXXXXXXXXXXXIGXXIYGPXXLIGXLXAXEXXXXXXXXGXAXGXXGXXGYLXXXXXAXXXLGXXXXXXXXXXXXXXXXXXXWXXXF

SEQ ID NO: 55967 - protein, 11 aa, Artificial sequence
  Consensus
  Variant (3)..(5): Xaa in position 3 to 5 is any or no amino acid
  Variant (7)..(7): Xaa in position 7 is Phe, Ile, Leu or Val
  Variant (8)..(8): Xaa in position 8 is any amino acid
  Variant (10)..(10): Xaa in position 10 is any amino acid
  Variant (11)..(11): Xaa in position 11 is Asn, Ser or Thr
GYXXXYXXRXX

SEQ ID NO: 55968 - protein, 45 aa, Artificial sequence
  Consensus
  Variant (2)..(10): Xaa in position 2 to 10 is any amino acid
  Variant (12)..(12): Xaa in position 12 is Ala or Gly
  Variant (13)..(13): Xaa in position 13 is any amino acid
  Variant (14)..(14): Xaa in position 14 is Gly or Ser
  Variant (16)..(18): Xaa in position 16 to 18 is any amino acid
  Variant (19)..(19): Xaa in position 19 is Ala, Gly or Ser
  Variant (20)..(22): Xaa in position 20 to 22 is any amino acid
  Variant (24)..(29): Xaa in position 24 to 29 is any amino acid
  Variant (30)..(30): Xaa in position 30 is Phe, Ile, Leu or Met
  Variant (31)..(31): Xaa in position 31 is Phe, Ile, Leu, Met or Val
  Variant (32)..(34): Xaa in position 32 to 34 is any amino acid
  Variant (36)..(37): Xaa in position 36 to 37 is any amino acid
  Variant (38)..(38): Xaa in position 38 is Ala, Cys, Ser, Thr or Val
  Variant (39)..(39): Xaa in position 39 is Ala, Asp, Gly, Ser or Val
  Variant (40)..(44): Xaa in position 40 to 44 is any amino acid
  Variant (45)..(45): Xaa in position 45 is Phe, Ile, Leu, Met or Val
GXXXXXXXXXYXXXKXXXXXXXDXXXXXXXXXXXLXXXXXXXXXX

SEQ ID NO: 55969 - protein, 36 aa, Artificial sequence
  Consensus
  Variant (2)..(2): Xaa in position 2 is Ala, Gly, Ser or Thr
  Variant (3)..(3): Xaa in position 3 is any amino acid
  Variant (5)..(11): Xaa in position 5 to 11 is any amino acid
  Variant (12)..(14): Xaa in position 12 to 14 is any or no amino acid
  Variant (16)..(20): Xaa in position 16 to 20 is any amino acid
  Variant (22)..(22): Xaa in position 22 is Gly or Ile
  Variant (23)..(25): Xaa in position 23 to 25 is any amino acid
  Variant (26)..(26): Xaa in position 26 is Ala, Gly, Ser or Thr
  Variant (27)..(27): Xaa in position 27 is any amino acid
  Variant (29)..(29): Xaa in position 29 is Ala, Gly, Asn or Ser
  Variant (30)..(32): Xaa in position 30 to 32 is any amino acid
  Variant (33)..(33): Xaa in position 33 is Asn, Pro or Ser
  Variant (34)..(34): Xaa in position 34 is any amino acid
  Variant (36)..(36): Xaa in position 36 is Ala, Glu, Gly or Asn
QXXGXXXXXXXXXXWXXXXXRXXXXXXWXXXXXXGX

SEQ ID NO: 55970 - protein, 20 aa, Artificial sequence
  Consensus
  Variant (2)..(2): Xaa in position 2 is any amino acid
  Variant (3)..(3): Xaa in position 3 is Ile, Leu or Val
  Variant (4)..(4): Xaa in position 4 is Ala, Cys, Gly or Ser
  Variant (5)..(15): Xaa in position 5 to 15 is any amino acid
  Variant (16)..(16): Xaa in position 16 is Ala, Cys, Asp or Gly
  Variant (17)..(19): Xaa in position 17 to 19 is any amino acid
WXXXXXXXXXXXXXXXXXXW

SEQ ID NO: 55971 - protein, 16 aa, Artificial sequence
  Consensus
  Variant (2)..(3): Xaa in position 2 to 3 is any amino acid
  Variant (4)..(4): Xaa in position 4 is Ala or Gly
  Variant (5)..(5): Xaa in position 5 is Phe, Ile, Leu or Val
  Variant (6)..(6): Xaa in position 6 is any amino acid
  Variant (7)..(7): Xaa in position 7 is Ala, Gly or Ser
  Variant (8)..(8): Xaa in position 8 is any amino acid
  Variant (9)..(9): Xaa in position 9 is Ile, Leu or Val
  Variant (10)..(11): Xaa in position 10 to 11 is any amino acid
  Variant (13)..(14): Xaa in position 13 to 14 is any amino acid
EXXXXXXXXXXGXXSD

SEQ ID NO: 55972 - protein, 38 aa, Artificial sequence
  Consensus
  Variant (2)..(5): Xaa in position 2 to 5 is any amino acid
  Variant (8)..(11): Xaa in position 8 to 11 is any amino acid
  Variant (12)..(19): Xaa in position 12 to 19 is any or no amino acid
  Variant (21)..(26): Xaa in position 21 to 26 is any amino acid
  Variant (27)..(27): Xaa in position 27 is Ala, Gly, Ser or Val
  Variant (28)..(32): Xaa in position 28 to 32 is any amino acid
  Variant (33)..(33): Xaa in position 33 is Ala, Gly or Ser
  Variant (34)..(35): Xaa in position 34 to 35 is Ala, Ser, Thr or Val
  Variant (36)..(36): Xaa in position 36 is any amino acid
  Variant (37)..(37): Xaa in position 37 is Ala or Gly
  Variant (38)..(38): Xaa in position 38 is Phe, Ile, Leu, Met or Val
GXXXXGPXXXXXXXXXXXXGXXXXXXXXXXXXXXXXXX

SEQ ID NO: 55973 - DNA, 1338 bp, Escherichia coli; identical to SEQ ID NO: 39076
  CDS (1)..(1338)

SEQ ID NO: 55974 - protein, 445 aa, Escherichia coli; identical to SEQ ID NO: 39077

SEQ ID NO: 55975 - DNA, 1479 bp, Danio rerio; identical to SEQ ID NO: 39078
  CDS (1)..(1479)

SEQ ID NO: 55976 - protein, 492 aa, Danio rerio; identical to SEQ ID NO: 39079

SEQ ID NO: 55977 - DNA, 1395 bp, Rattus norvegicus; identical to SEQ ID NO: 39080
  CDS (1)..(1395)

SEQ ID NO: 55978 - protein, 464 aa, Rattus norvegicus; identical to SEQ ID NO: 39081

SEQ ID NO: 55979 - DNA, 1407 bp, Xenopus tropicalis; identical to SEQ ID NO: 39082
  CDS (1)..(1407)

SEQ ID NO: 55980 - protein, 468 aa, Xenopus tropicalis; identical to SEQ ID NO: 39083

SEQ ID NO: 55981 - DNA, 1380 bp, Gallus gallus; identical to SEQ ID NO: 39084
  CDS (1)..(1380)

SEQ ID NO: 55982 - protein, 459 aa, Gallus gallus; identical to SEQ ID NO: 39085

SEQ ID NO: 55983 - DNA, 1305 bp, Mesorhizobium loti MAFF303099; identical to SEQ ID NO: 39086
  CDS (1)..(1305): transl_table=11

SEQ ID NO: 55984 - protein, 434 aa, Mesorhizobium loti MAFF303099; identical to SEQ ID NO: 39087

SEQ ID NO: 55985 - DNA, 1557 bp, Mesorhizobium loti MAFF303099; identical to SEQ ID NO: 39088
  CDS (1)..(1557): transl_table=11

SEQ ID NO: 55986 - protein, 518 aa, Mesorhizobium loti MAFF303099; identical to SEQ ID NO: 39089

SEQ ID NO: 55987 - DNA, 1461 bp, Arabidopsis thaliana; identical to SEQ ID NO: 39090
  CDS (1)..(1461)

SEQ ID NO: 55988 - protein, 486 aa, Arabidopsis thaliana; identical to SEQ ID NO: 39091

SEQ ID NO: 55989 - DNA, 1824 bp, Thermotoga maritima MSB8; identical to SEQ ID NO: 39092
  CDS (1)..(1824): transl_table=11

SEQ ID NO: 55990 - protein, 607 aa, Thermotoga maritima MSB8; identical to SEQ ID NO: 39093

SEQ ID NO: 55991 - DNA, 1638 bp, Thermotoga maritima MSB8; identical to SEQ ID NO: 39094
  CDS (1)..(1638): transl_table=11

SEQ ID NO: 55992 - protein, 545 aa, Thermotoga maritima MSB8; identical to SEQ ID NO: 39095

SEQ ID NO: 55993 - DNA, 1881 bp, Thermotoga maritima MSB8; identical to SEQ ID NO: 39096
  CDS (1)..(1881): transl_table=11

SEQ ID NO: 55994 - protein, 626 aa, Thermotoga maritima MSB8; identical to SEQ ID NO: 39097

SEQ ID NO: 55995 - DNA, 1347 bp, Pseudomonas aeruginosa PAO1; identical to SEQ ID NO: 39098
  CDS (1)..(1347): transl_table=11

SEQ ID NO: 55996 - protein, 448 aa, Pseudomonas aeruginosa PAO1; identical to SEQ ID NO: 39099

SEQ ID NO: 55997 - DNA, 1893 bp, Methanothermobacter thermautotrophicus str. Delta H; identical to SEQ ID NO: 39100
  CDS (1)..(1893): transl_table=11

SEQ ID NO: 55998 - protein, 630 aa, Methanothermobacter thermautotrophicus str. Delta H; identical to SEQ ID NO: 39101

SEQ ID NO: 55999 - DNA, 1335 bp, Deinococcus radiodurans R1; identical to SEQ ID NO: 39102
  CDS (1)..(1335): transl_table=11

SEQ ID NO: 56000 - protein, 444 aa, Deinococcus radiodurans R1; identical to SEQ ID NO: 39103

SEQ ID NO: 56001 - DNA, 1335 bp, Xylella fastidiosa 9a5c; identical to SEQ ID NO: 39104
  CDS (1)..(1335): transl_table=11

SEQ ID NO: 56002 - protein, 444 aa, Xylella fastidiosa 9a5c; identical to SEQ ID NO: 39105

SEQ ID NO: 56003 - DNA, 1557 bp, Sinorhizobium meliloti 1021; identical to SEQ ID NO: 39106
  CDS (1)..(1557): transl_table=11

SEQ ID NO: 56004 - protein, 518 aa, Sinorhizobium meliloti 1021; identical to SEQ ID NO: 39107

SEQ ID NO: 56005 - DNA, 1320 bp, Caulobacter crescentus CB15; identical to SEQ ID NO: 39108
  CDS (1)..(1320): transl_table=11

SEQ ID NO: 56006 - protein, 439 aa, Caulobacter crescentus CB15; identical to SEQ ID NO: 39109

SEQ ID NO: 56007 - DNA, 1602 bp, Synechocystis sp. PCC 6803; identical to SEQ ID NO: 39110
  CDS (1)..(1602): transl_table=11

SEQ ID NO: 56008 - protein, 533 aa, Synechocystis sp. PCC 6803; identical to SEQ ID NO: 39111

SEQ ID NO: 56009 - DNA, 1635 bp, Nostoc sp. PCC 7120; identical to SEQ ID NO: 39112
  CDS (1)..(1635): transl_table=11

SEQ ID NO: 56010 - protein, 544 aa, Nostoc sp. PCC 7120; identical to SEQ ID NO: 39113

SEQ ID NO: 56011 - DNA, 1440 bp, Caenorhabditis elegans; identical to SEQ ID NO: 39114
  CDS (1)..(1440)

SEQ ID NO: 56012 - protein, 479 aa, Caenorhabditis elegans; identical to SEQ ID NO: 39115

SEQ ID NO: 56013 - DNA, 1296 bp, Ralstonia solanacearum GMI1000; identical to SEQ ID NO: 39116
  CDS (1)..(1296): transl_table=11

SEQ ID NO: 56014 - protein, 431 aa, Ralstonia solanacearum GMI1000; identical to SEQ ID NO: 39117

SEQ ID NO: 56015 - DNA, 1305 bp, Agrobacterium tumefaciens str. C58; identical to SEQ ID NO: 39118
  CDS (1)..(1305): transl_table=11

SEQ ID NO: 56016 - protein, 434 aa, Agrobacterium tumefaciens str. C58; identical to SEQ ID NO: 39119

SEQ ID NO: 56017 - DNA, 1557 bp, Agrobacterium tumefaciens str. C58; identical to SEQ ID NO: 39120
  CDS (1)..(1557): transl_table=11

SEQ ID NO: 56018 - protein, 518 aa, Agrobacterium tumefaciens str. C58; identical to SEQ ID NO: 39121

SEQ ID NO: 56019 - DNA, 1425 bp, Drosophila melanogaster; identical to SEQ ID NO: 39122
  CDS (1)..(1425)

SEQ ID NO: 56020 - protein, 474 aa, Drosophila melanogaster; identical to SEQ ID NO: 39123

SEQ ID NO: 56021 - DNA, 2109 bp, Drosophila melanogaster; identical to SEQ ID NO: 39124
  CDS (1)..(2109)

SEQ ID NO: 56022 - protein, 702 aa, Drosophila melanogaster; identical to SEQ ID NO: 39125

SEQ ID NO: 56023 - DNA, 1791 bp, Thermoanaerobacter tengcongensis MB4; identical to SEQ ID NO: 39126
  CDS (1)..(1791): transl_table=11

SEQ ID NO: 56024 - protein, 596 aa, Thermoanaerobacter tengcongensis MB4; identical to SEQ ID NO: 39127

SEQ ID NO: 56025 - DNA, 1941 bp, Streptomyces coelicolor A3(2); identical to SEQ ID NO: 39128
  CDS (1)..(1941): transl_table=11

SEQ ID NO: 56026 - protein, 646 aa, Streptomyces coelicolor A3(2); identical to SEQ ID NO: 39129

SEQ ID NO: 56027 - DNA, 1335 bp, Xanthomonas axonopodis pv. citri str. 306; identical to SEQ ID NO: 39130
  CDS (1)..(1335): transl_table=11

SEQ ID NO: 56028 - protein, 444 aa, Xanthomonas axonopodis pv. citri str. 306; identical to SEQ ID NO: 39131

SEQ ID NO: 56029 - DNA, 1386 bp, Yersinia pestis KIM; identical to SEQ ID NO: 39132
  CDS (1)..(1386): transl_table=11

SEQ ID NO: 56030 - protein, 461 aa, Yersinia pestis KIM; identical to SEQ ID NO: 39133

SEQ ID NO: 56031 - DNA, 1308 bp, Brucella suis 1330; identical to SEQ ID NO: 39134
  CDS (1)..(1308): transl_table=11

SEQ ID NO: 56032 - protein, 435 aa, Brucella suis 1330; identical to SEQ ID NO: 39135

SEQ ID NO: 56033 - DNA, 1332 bp, Leptospira interrogans serovar Lai str. 56601; identical to SEQ ID NO: 39136
  CDS (1)..(1332): transl_table=11

SEQ ID NO: 56034 - protein, 443 aa, Leptospira interrogans serovar Lai str. 56601; identical to SEQ ID NO: 39137

SEQ ID NO: 56035 - DNA, 1386 bp, Shewanella oneidensis MR-1; identical to SEQ ID NO: 39138
  CDS (1)..(1386): transl_table=11

SEQ ID NO: 56036 - protein, 461 aa, Shewanella oneidensis MR-1; identical to SEQ ID NO: 39139

SEQ ID NO: 56037 - DNA, 1446 bp, Drosophila melanogaster; identical to SEQ ID NO: 39140
  CDS (1)..(1446)

SEQ ID NO: 56038 - protein, 481 aa, Drosophila melanogaster; identical to SEQ ID NO: 39141

SEQ ID NO: 56039 - DNA, 1578 bp, Pseudomonas putida KT2440; identical to SEQ ID NO: 39142
  CDS (1)..(1578): transl_table=11

SEQ ID NO: 56040 - protein, 525 aa, Pseudomonas putida KT2440; identical to SEQ ID NO: 39143

SEQ ID NO: 56041 - DNA, 1362 bp, Pseudomonas putida KT2440; identical to SEQ ID NO: 39144
  CDS (1)..(1362): transl_table=11

SEQ ID NO: 56042 - protein, 453 aa, Pseudomonas putida KT2440; identical to SEQ ID NO: 39145

SEQ ID NO: 56043 - DNA, 1704 bp, Bradyrhizobium japonicum USDA 110; identical to SEQ ID NO: 39146
  CDS (1)..(1704): transl_table=11

SEQ ID NO: 56044 - protein, 567 aa, Bradyrhizobium japonicum USDA 110; identical to SEQ ID NO: 39147

SEQ ID NO: 56045 - DNA, 1557 bp, Bradyrhizobium japonicum USDA 110; identical to SEQ ID NO: 39148
  CDS (1)..(1557): transl_table=11

SEQ ID NO: 56046 - protein, 518 aa, Bradyrhizobium japonicum USDA 110; identical to SEQ ID NO: 39149

SEQ ID NO: 56047 - DNA, 1326 bp, Bradyrhizobium japonicum USDA 110; identical to SEQ ID NO: 39150
  CDS (1)..(1326): transl_table=11

SEQ ID NO: 56048 - protein, 441 aa, Bradyrhizobium japonicum USDA 110; identical to SEQ ID NO: 39151

SEQ ID NO: 56049 - DNA, 1395 bp, Bos taurus; identical to SEQ ID NO: 39152
  CDS (1)..(1395)

SEQ ID NO: 56050 - protein, 464 aa, Bos taurus; identical to SEQ ID NO: 39153

SEQ ID NO: 56051 - DNA, 1335 bp, Xylella fastidiosa Temecula1; identical to SEQ ID NO: 39154
  CDS (1)..(1335): transl_table=11

SEQ ID NO: 56052 - protein, 444 aa, Xylella fastidiosa Temecula1; identical to SEQ ID NO: 39155

SEQ ID NO: 56053 - DNA, 1359 bp, Pseudomonas syringae pv. tomato str. DC3000; identical to SEQ ID NO: 39156
  CDS (1)..(1359): transl_table=11

SEQ ID NO: 56054 - protein, 452 aa, Pseudomonas syringae pv. tomato str. DC3000; identical to SEQ ID NO: 39157

SEQ ID NO: 56055 - DNA, 1908 bp, Bacteroides thetaiotaomicron VPI-5482; identical to SEQ ID NO: 39158
  CDS (1)..(1908): transl_table=11

SEQ ID NO: 56056 - protein, 635 aa, Bacteroides thetaiotaomicron VPI-5482; identical to SEQ ID NO: 39159

SEQ ID NO: 56057 - DNA, 1254 bp, Enterococcus faecalis V583; identical to SEQ ID NO: 39160
  CDS (1)..(1254): transl_table=11

SEQ ID NO: 56058 - protein, 417 aa, Enterococcus faecalis V583; identical to SEQ ID NO: 39161

SEQ ID NO: 56059 - DNA, 1269 bp, Coxiella burnetii RSA 493; identical to SEQ ID NO: 39162
  CDS (1)..(1269): transl_table=11

SEQ ID NO: 56060 - protein, 422 aa, Coxiella burnetii RSA 493; identical to SEQ ID NO: 39163

SEQ ID NO: 56061 - DNA, 1824 bp, Streptomyces avermitilis MA-4680; identical to SEQ ID NO: 39164
  CDS (1)..(1824): transl_table=11

SEQ ID NO: 56062 - protein, 607 aa, Streptomyces avermitilis MA-4680; identical to SEQ ID NO: 39165

SEQ ID NO: 56063 - DNA, 1350 bp, Streptomyces avermitilis MA-4680; identical to SEQ ID NO: 39166
  CDS (1)..(1350): transl_table=11

SEQ ID NO: 56064 - protein, 449 aa, Streptomyces avermitilis MA-4680; identical to SEQ ID NO: 39167

SEQ ID NO: 56065 - DNA, 1278 bp, Nitrosomonas europaea ATCC 19718; identical to SEQ ID NO: 39168
  CDS (1)..(1278): transl_table=11

SEQ ID NO: 56066 - protein, 425 aa, Nitrosomonas europaea ATCC 19718; identical to SEQ ID NO: 39169

SEQ ID NO: 56067 - DNA, 1338 bp, Candidatus Blochmannia floridanus; identical to SEQ ID NO: 39170
  CDS (1)..(1338): transl_table=11

SEQ ID NO: 56068 - protein, 445 aa, Candidatus Blochmannia floridanus; identical to SEQ ID NO: 39171

SEQ ID NO: 56069 - DNA, 1368 bp, Bordetella parapertussis 12822; identical to SEQ ID NO: 39172
  CDS (1)..(1368): transl_table=11

SEQ ID NO: 56070 - protein, 455 aa, Bordetella parapertussis 12822; identical to SEQ ID NO: 39173

SEQ ID NO: 56071 - DNA, 1581 bp, Bordetella bronchiseptica RB50; identical to SEQ ID NO: 39174
  CDS (1)..(1581): transl_table=11

SEQ ID NO: 56072 - protein, 526 aa, Bordetella bronchiseptica RB50; identical to SEQ ID NO: 39175

SEQ ID NO: 56073 - DNA, 1368 bp, Bordetella bronchiseptica RB50; identical to SEQ ID NO: 39176
  CDS (1)..(1368): transl_table=11

SEQ ID NO: 56074 - protein, 455 aa, Bordetella bronchiseptica RB50; identical to SEQ ID NO: 39177

SEQ ID NO: 56075 - DNA, 1296 bp, Chromobacterium violaceum ATCC 12472; identical to SEQ ID NO: 39178
  CDS (1)..(1296): transl_table=11

SEQ ID NO: 56076 - protein, 431 aa, Chromobacterium violaceum ATCC 12472; identical to SEQ ID NO: 39179

SEQ ID NO: 56077 - DNA, 1365 bp, Photorhabdus luminescens subsp. laumondii TTO1; identical to SEQ ID NO: 39180
  CDS (1)..(1365): transl_table=11

SEQ ID NO: 56078 - protein, 454 aa, Photorhabdus luminescens subsp. laumondii TTO1; identical to SEQ ID NO: 39181

SEQ ID NO: 56079 - DNA, 1557 bp, Rhodopseudomonas palustris CGA009; identical to SEQ ID NO: 39182
  CDS (1)..(1557): transl_table=11

SEQ ID NO: 56080 - protein, 518 aa, Rhodopseudomonas palustris CGA009; identical to SEQ ID NO: 39183

SEQ ID NO: 56081 - DNA, 1326 bp, Rhodopseudomonas palustris CGA009; identical to SEQ ID NO: 39184
  CDS (1)..(1326): transl_table=11

SEQ ID NO: 56082 - protein, 441 aa, Rhodopseudomonas palustris CGA009; identical to SEQ ID NO: 39185

SEQ ID NO: 56083 - DNA, 1287 bp, Rhodopseudomonas palustris CGA009; identical to SEQ ID NO: 39186
  CDS (1)..(1287): transl_table=11

SEQ ID NO: 56084 - protein, 428 aa, Rhodopseudomonas palustris CGA009; identical to SEQ ID NO: 39187

SEQ ID NO: 56085 - DNA, 1776 bp, Geobacter sulfurreducens PCA; identical to SEQ ID NO: 39188
  CDS (1)..(1776): transl_table=11

SEQ ID NO: 56086 - protein, 591 aa, Geobacter sulfurreducens PCA; identical to SEQ ID NO: 39189

SEQ ID NO: 56087 - DNA, 1713 bp, Geobacter sulfurreducens PCA; identical to SEQ ID NO: 39190
  CDS (1)..(1713): transl_table=11

SEQ ID NO: 56088 - protein, 570 aa, Geobacter sulfurreducens PCA; identical to SEQ ID NO: 39191

SEQ ID NO: 56089 - DNA, 1272 bp, Geobacter sulfurreducens PCA; identical to SEQ ID NO: 39192
  CDS (1)..(1272): transl_table=11

SEQ ID NO: 56090 - protein, 423 aa, Geobacter sulfurreducens PCA; identical to SEQ ID NO: 39193

SEQ ID NO: 56091 - DNA, 1362 bp, Mycobacterium avium subsp. paratuberculosis K-10; identical to SEQ ID NO: 39194
  CDS (1)..(1362): transl_table=11

SEQ ID NO: 56092 - protein, 453 aa, Mycobacterium avium subsp. paratuberculosis K-10; identical to SEQ ID NO: 39195

SEQ ID NO: 56093 - DNA, 1254 bp, Wolbachia endosymbiont of Drosophila melanogaster; identical to SEQ ID NO: 39196
  CDS (1)..(1254): transl_table=11

SEQ ID NO: 56094 - protein, 417 aa, Wolbachia endosymbiont of Drosophila melanogaster; identical to SEQ ID NO: 39197

SEQ ID NO: 56095 - DNA, 1293 bp, Bdellovibrio bacteriovorus HD100; identical to SEQ ID NO: 39198
  CDS (1)..(1293): transl_table=11

SEQ ID NO: 56096 - protein, 430 aa, Bdellovibrio bacteriovorus HD100; identical to SEQ ID NO: 39199

SEQ ID NO: 56097 - DNA, 1473 bp, Candida albicans SC5314; identical to SEQ ID NO: 39200
  CDS (1)..(1473): transl_table=12

SEQ ID NO: 56098 - protein, 490 aa, Candida albicans SC5314; identical to SEQ ID NO: 39201

SEQ ID NO: 56099 - DNA, 1332 bp, Leptospira interrogans serovar Copenhageni str. Fiocruz L1-130; identical to SEQ ID NO: 39202
  CDS (1)..(1332): transl_table=11

SEQ ID NO: 56100 - protein, 443 aa, Leptospira interrogans serovar Copenhageni str. Fiocruz L1-130; identical to SEQ ID NO: 39203

SEQ ID NO: 56101 - DNA, 1317 bp, Thermus thermophilus HB27; identical to SEQ ID NO: 39204
  CDS (1)..(1317): transl_table=11

SEQ ID NO: 56102 - protein, 438 aa, Thermus thermophilus HB27; identical to SEQ ID NO: 39205

SEQ ID NO: 56103 - DNA, 1299 bp, Parachlamydia sp. UWE25; identical to SEQ ID NO: 39206
  CDS (1)..(1299): transl_table=11

SEQ ID NO: 56104 - protein, 432 aa, Parachlamydia sp. UWE25; identical to SEQ ID NO: 39207

SEQ ID NO: 56105 - DNA, 1308 bp, Bartonella quintana str. Toulouse; identical to SEQ ID NO: 39208
  CDS (1)..(1308): transl_table=11

SEQ ID NO: 56106 - protein, 435 aa, Bartonella quintana str. Toulouse; identical to SEQ ID NO: 39209

SEQ ID NO: 56107 - DNA, 1308 bp, Bartonella henselae str. Houston-1; identical to SEQ ID NO: 39210
  CDS (1)..(1308): transl_table=11

SEQ ID NO: 56108 - protein, 435 aa, Bartonella henselae str. Houston-1; identical to SEQ ID NO: 39211

SEQ ID NO: 56109 - DNA, 1332 bp, Acinetobacter sp. ADP1; identical to SEQ ID NO: 39212
  CDS (1)..(1332): transl_table=11

SEQ ID NO: 56110 - protein, 443 aa, Acinetobacter sp. ADP1; identical to SEQ ID NO: 39213

SEQ ID NO: 56111 - DNA, 1350 bp, Erwinia carotovora subsp. atroseptica SCRI1043; identical to SEQ ID NO: 39214
  CDS (1)..(1350): transl_table=11

SEQ ID NO: 56112 - protein, 449 aa, Erwinia carotovora subsp. atroseptica SCRI1043; identical to SEQ ID NO: 39215

SEQ ID NO: 56113 - DNA, 1335 bp, Propionibacterium acnes KPA171202; identical to SEQ ID NO: 39216
  CDS (1)..(1335): transl_table=11

SEQ ID NO: 56114 - protein, 444 aa, Propionibacterium acnes KPA171202; identical to SEQ ID NO: 39217

SEQ ID NO: 56115 - DNA, 1905 bp, Desulfotalea psychrophila LSv54; identical to SEQ ID NO: 39218
  CDS (1)..(1905): transl_table=11

SEQ ID NO: 56116 - protein, 634 aa, Desulfotalea psychrophila LSv54; identical to SEQ ID NO: 39219

SEQ ID NO: 56117 - DNA, 1653 bp, Desulfotalea psychrophila LSv54; identical to SEQ ID NO: 39220
  CDS (1)..(1653): transl_table=11

SEQ ID NO: 56118 - protein, 550 aa, Desulfotalea psychrophila LSv54; identical to SEQ ID NO: 39221

SEQ ID NO: 56119 - DNA, 1266 bp, Rickettsia typhi str. Wilmington; identical to SEQ ID NO: 39222
  CDS (1)..(1266): transl_table=11

SEQ ID NO: 56120 - protein, 421 aa, Rickettsia typhi str. Wilmington; identical to SEQ ID NO: 39223

SEQ ID NO: 56121 - DNA, 1278 bp, Symbiobacterium thermophilum IAM 14863; identical to SEQ ID NO: 39224
  CDS (1)..(1278): transl_table=11

SEQ ID NO: 56122 - protein, 425 aa, Symbiobacterium thermophilum IAM 14863; identical to SEQ ID NO: 39225

SEQ ID NO: 56123 - DNA, 1857 bp, Symbiobacterium thermophilum IAM 14863; identical to SEQ ID NO: 39226
  CDS (1)..(1857): transl_table=11

SEQ ID NO: 56124 - protein, 618 aa, Symbiobacterium thermophilum IAM 14863; identical to SEQ ID NO: 39227

SEQ ID NO: 56125 - DNA, 1287 bp, Legionella pneumophila subsp. pneumophila str. Philadelphia 1; identical to SEQ ID NO: 39228
  CDS (1)..(1287): transl_table=11

SEQ ID NO: 56126 - protein, 428 aa, Legionella pneumophila subsp. pneumophila str. Philadelphia 1; identical to SEQ ID NO: 39229

SEQ ID NO: 56127 - DNA, 1566 bp, Burkholderia mallei ATCC 23344; identical to SEQ ID NO: 39230
  CDS (1)..(1566): transl_table=11

SEQ ID NO: 56128 - protein, 521 aa, Burkholderia mallei ATCC 23344; identical to SEQ ID NO: 39231

SEQ ID NO: 56129 - DNA, 1311 bp, Burkholderia mallei ATCC 23344; identical to SEQ ID NO: 39232
  CDS (1)..(1311): transl_table=11

SEQ ID NO: 56130 - protein, 436 aa, Burkholderia mallei ATCC 23344; identical to SEQ ID NO: 39233

SEQ ID NO: 56131 - DNA, 1311 bp, Burkholderia pseudomallei K96243; identical to SEQ ID NO: 39234
  CDS (1)..(1311): transl_table=11

SEQ ID NO: 56132 - protein, 436 aa, Burkholderia pseudomallei K96243; identical to SEQ ID NO: 39235

SEQ ID NO: 56133 - DNA, 1284 bp, Methylococcus capsulatus str. Bath; identical to SEQ ID NO: 39236
  CDS (1)..(1284): transl_table=11

SEQ ID NO: 56134 - protein, 427 aa, Methylococcus capsulatus str. Bath; identical to SEQ ID NO: 39237

SEQ ID NO: 56135 - DNA, 1551 bp, Methylococcus capsulatus str. Bath; identical to SEQ ID NO: 39238
  CDS (1)..(1551): transl_table=11

SEQ ID NO: 56136 - protein, 516 aa, Methylococcus capsulatus str. Bath; identical to SEQ ID NO: 39239

SEQ ID NO: 56137 - DNA, 1686 bp, Methylococcus capsulatus str. Bath; identical to SEQ ID NO: 39240
  CDS (1)..(1686): transl_table=11

SEQ ID NO: 56138 - protein, 561 aa, Methylococcus capsulatus str. Bath; identical to SEQ ID NO: 39241

SEQ ID NO: 56139 - DNA, 1833 bp, Methylococcus capsulatus str. Bath; identical to SEQ ID NO: 39242
  CDS (1)..(1833): transl_table=11

SEQ ID NO: 56140 - protein, 610 aa, Methylococcus capsulatus str. Bath; identical to SEQ ID NO: 39243

SEQ ID NO: 56141 - DNA, 1326 bp, Nocardia farcinica IFM 10152; identical to SEQ ID NO: 39244
  CDS (1)..(1326): transl_table=11

SEQ ID NO: 56142 - protein, 441 aa, Nocardia farcinica IFM 10152; identical to SEQ ID NO: 39245

SEQ ID NO: 56143 - DNA, 1278 bp, Legionella pneumophila str. Lens; identical to SEQ ID NO: 39246
  CDS (1)..(1278): transl_table=11

SEQ ID NO: 56144 - protein, 425 aa, Legionella pneumophila str. Lens; identical to SEQ ID NO: 39247

SEQ ID NO: 56145 - DNA, 1293 bp, Anaplasma marginale str. St. Maries; identical to SEQ ID NO: 39248
  CDS (1)..(1293): transl_table=11

SEQ ID NO: 56146 - protein, 430 aa, Anaplasma marginale str. St. Maries; identical to SEQ ID NO: 39249

SEQ ID NO: 56147 - DNA, 1758 bp, Azoarcus sp. EbN1; identical to SEQ ID NO: 39250
  CDS (1)..(1758): transl_table=11

SEQ ID NO: 56148 - protein, 585 aa, Azoarcus sp. EbN1; identical to SEQ ID NO: 39251

SEQ ID NO: 56149 - DNA, 1314 bp, Azoarcus sp. EbN1; identical to SEQ ID NO: 39252
  CDS (1)..(1314): transl_table=11

SEQ ID NO: 56150 - protein, 437 aa, Azoarcus sp. EbN1; identical to SEQ ID NO: 39253

SEQ ID NO: 56151 - DNA, 1704 bp, Silicibacter pomeroyi DSS-3; identical to SEQ ID NO: 39254
  CDS (1)..(1704): transl_table=11

SEQ ID NO: 56152 - protein, 567 aa, Silicibacter pomeroyi DSS-3; identical to SEQ ID NO: 39255

SEQ ID NO: 56153 - DNA, 1683 bp, Silicibacter pomeroyi DSS-3; identical to SEQ ID NO: 39256
  CDS (1)..(1683): transl_table=11

SEQ ID NO: 56154 - protein, 560 aa, Silicibacter pomeroyi DSS-3; identical to SEQ ID NO: 39257

SEQ ID NO: 56155 - DNA, 1299 bp, Silicibacter pomeroyi DSS-3; identical to SEQ ID NO: 39258
  CDS (1)..(1299): transl_table=11

SEQ ID NO: 56156 - protein, 432 aa, Silicibacter pomeroyi DSS-3; identical to SEQ ID NO: 39259

SEQ ID NO: 56157 - DNA, 1275 bp, Francisella tularensis subsp. tularensis SCHU S4; identical to SEQ ID NO: 39260
  CDS (1)..(1275): transl_table=11

SEQ ID NO: 56158 - protein, 424 aa, Francisella tularensis subsp. tularensis SCHU S4; identical to SEQ ID NO: 39261

SEQ ID NO: 56159 - DNA, 1605 bp, Synechococcus elongatus PCC 6301; identical to SEQ ID NO: 39262
  CDS (1)..(1605): transl_table=11

SEQ ID NO: 56160 - protein, 534 aa, Synechococcus elongatus PCC 6301; identical to SEQ ID NO: 39263

SEQ ID NO: 56161 - DNA, 1278 bp, Ehrlichia ruminantium str. Welgevonden; identical to SEQ ID NO: 39264
  CDS (1)..(1278): transl_table=11

SEQ ID NO: 56162 - protein, 425 aa, Ehrlichia ruminantium str. Welgevonden; identical to SEQ ID NO: 39265

SEQ ID NO: 56163 - DNA, 1254 bp, Dehalococcoides ethenogenes 195; identical to SEQ ID NO: 39266
  CDS (1)..(1254): transl_table=11

SEQ ID NO: 56164 - protein, 417 aa, Dehalococcoides ethenogenes 195; identical to SEQ ID NO: 39267

SEQ ID NO: 56165 - DNA, 1872 bp, Dehalococcoides ethenogenes 195; identical to SEQ ID NO: 39268
  CDS (1)..(1872): transl_table=11

SEQ ID NO: 56166 - protein, 623 aa, Dehalococcoides ethenogenes 195; identical to SEQ ID NO: 39269

SEQ ID NO: 56167 - DNA, 1923 bp, Dehalococcoides ethenogenes 195; identical to SEQ ID NO: 39270
  CDS (1)..(1923): transl_table=11

SEQ ID NO: 56168 - protein, 640 aa, Dehalococcoides ethenogenes 195; identical to SEQ ID NO: 39271

SEQ ID NO: 56169 - DNA, 1803 bp, Thermococcus kodakarensis KOD1; identical to SEQ ID NO: 39272
  CDS (1)..(1803): transl_table=11

SEQ ID NO: 56170 - protein, 600 aa, Thermococcus kodakarensis KOD1; identical to SEQ ID NO: 39273

SEQ ID NO: 56171 - DNA, 1278 bp, Ehrlichia ruminantium str. Gardel; identical to SEQ ID NO: 39274
  CDS (1)..(1278): transl_table=11

SEQ ID NO: 56172 - protein, 425 aa, Ehrlichia ruminantium str. Gardel; identical to SEQ ID NO: 39275

SEQ ID NO: 56173 - DNA, 1278 bp, Ehrlichia ruminantium str. Welgevonden; identical to SEQ ID NO: 39276
  CDS (1)..(1278): transl_table=11

SEQ ID NO: 56174 - protein, 425 aa, Ehrlichia ruminantium str. Welgevonden; identical to SEQ ID NO: 39277

SEQ ID NO: 56175 - DNA, 1275 bp, Wolbachia endosymbiont strain TRS of Brugia malayi; identical to SEQ ID NO: 39278
  CDS (1)..(1275): transl_table=11

SEQ ID NO: 56176 - protein, 424 aa, Wolbachia endosymbiont strain TRS of Brugia malayi; identical to SEQ ID NO: 39279

SEQ ID NO: 56177 - DNA, 1335 bp, Xanthomonas oryzae pv. oryzae KACC10331; identical to SEQ ID NO: 39280
  CDS (1)..(1335): transl_table=11

SEQ ID NO: 56178 - protein, 444 aa, Xanthomonas oryzae pv. oryzae KACC10331; identical to SEQ ID NO: 39281

SEQ ID NO: 56179 - DNA, 1302 bp, Neisseria gonorrhoeae FA 1090; identical to SEQ ID NO: 39282
  CDS (1)..(1302): transl_table=11

SEQ ID NO: 56180 - protein, 433 aa, Neisseria gonorrhoeae FA 1090; identical to SEQ ID NO: 39283

SEQ ID NO: 56181 - DNA, 1308 bp, Brucella abortus biovar 1 str. 9-941; identical to SEQ ID NO: 39284
  CDS (1)..(1308): transl_table=11

SEQ ID NO: 56182 - protein, 435 aa, Brucella abortus biovar 1 str. 9-941; identical to SEQ ID NO: 39285

SEQ ID NO: 56183 - DNA, 1359 bp, Pseudomonas syringae pv. syringae B728a; identical to SEQ ID NO: 39286
  CDS (1)..(1359): transl_table=11

SEQ ID NO: 56184 - protein, 452 aa, Pseudomonas syringae pv. syringae B728a; identical to SEQ ID NO: 39287

SEQ ID NO: 56185 - DNA, 1335 bp, Xanthomonas campestris pv. campestris str. 8004; identical to SEQ ID NO: 39288
  CDS (1)..(1335): transl_table=11

SEQ ID NO: 56186 - protein, 444 aa, Xanthomonas campestris pv. campestris str. 8004; identical to SEQ ID NO: 39289

SEQ ID NO: 56187 - DNA, 1269 bp, Rickettsia felis URRWXCal2; identical to SEQ ID NO: 39290
  CDS (1)..(1269): transl_table=11

SEQ ID NO: 56188 - protein, 422 aa, Rickettsia felis URRWXCal2; identical to SEQ ID NO: 39291

SEQ ID NO: 56189 - DNA, 1560 bp, Pseudomonas fluorescens Pf-5; identical to SEQ ID NO: 39292
  CDS (1)..(1560): transl_table=11

SEQ ID NO: 56190 - protein, 519 aa, Pseudomonas fluorescens Pf-5; identical to SEQ ID NO: 39293

SEQ ID NO: 56191 - DNA, 1356 bp, Pseudomonas fluorescens Pf-5; identical to SEQ ID NO: 39294
  CDS (1)..(1356): transl_table=11

SEQ ID NO: 56192 - protein, 451 aa, Pseudomonas fluorescens Pf-5; identical to SEQ ID NO: 39295

SEQ ID NO: 56193 - DNA, 1425 bp, Psychrobacter arcticum 273-4; identical to SEQ ID NO: 39296
  CDS (1)..(1425): transl_table=11

SEQ ID NO: 56194 - protein, 474 aa, Psychrobacter arcticum 273-4; identical to SEQ ID NO: 39297

SEQ ID NO: 56195 - DNA, 1530 bp, Candidatus Pelagibacter ubique HTCC1062; identical to SEQ ID NO: 39298
  CDS (1)..(1530): transl_table=11

SEQ ID NO: 56196 - protein, 509 aa, Candidatus Pelagibacter ubique HTCC1062; identical to SEQ ID NO: 39299

SEQ ID NO: 56197 - DNA, 1332 bp, Candidatus Pelagibacter ubique HTCC1062; identical to SEQ ID NO: 39300
  CDS (1)..(1332): transl_table=11

SEQ ID NO: 56198 - protein, 443 aa, Candidatus Pelagibacter ubique HTCC1062; identical to SEQ ID NO: 39301

SEQ ID NO: 56199 - DNA, 1605 bp, Colwellia psychrerythraea 34H; identical to SEQ ID NO: 39302
  CDS (1)..(1605): transl_table=11

SEQ ID NO: 56200 - protein, 534 aa, Colwellia psychrerythraea 34H; identical to SEQ ID NO: 39303

SEQ ID NO: 56201 - DNA, 1614 bp, Colwellia psychrerythraea 34H; identical to SEQ ID NO: 39304
  CDS (1)..(1614): transl_table=11

SEQ ID NO: 56202 - protein, 537 aa, Colwellia psychrerythraea 34H; identical to SEQ ID NO: 39305

SEQ ID NO: 56203 - DNA, 1359 bp, Pseudomonas syringae pv. phaseolicola 1448A; identical to SEQ ID NO: 39306
  CDS (1)..(1359): transl_table=11

SEQ ID NO: 56204 - protein, 452 aa, Pseudomonas syringae pv. phaseolicola 1448A; identical to SEQ ID NO: 39307

SEQ ID NO: 56205 - DNA, 1332 bp, Candidatus Blochmannia pennsylvanicus str. BPEN; identical to SEQ ID NO: 39308
  CDS (1)..(1332): transl_table=11

SEQ ID NO: 56206 - protein, 443 aa, Candidatus Blochmannia pennsylvanicus str. BPEN; identical to SEQ ID NO: 39309

SEQ ID NO: 56207 - DNA, 1329 bp, Dechloromonas aromatica RCB; identical to SEQ ID NO: 39310
  CDS (1)..(1329): transl_table=11

SEQ ID NO: 56208 - protein, 442 aa, Dechloromonas aromatica RCB; identical to SEQ ID NO: 39311

SEQ ID NO: 56209 - DNA, 1899 bp, Dechloromonas aromatica RCB; identical to SEQ ID NO: 39312
  CDS (1)..(1899): transl_table=11

SEQ ID NO: 56210 - protein, 632 aa, Dechloromonas aromatica RCB; identical to SEQ ID NO: 39313

SEQ ID NO: 56211 - DNA, 1317 bp, Thermobifida fusca YX; identical to SEQ ID NO: 39314
  CDS (1)..(1317): transl_table=11

SEQ ID NO: 56212 - protein, 438 aa, Thermobifida fusca YX; identical to SEQ ID NO: 39315

SEQ ID NO: 56213 - DNA, 1566 bp, Ralstonia eutropha JMP134; identical to SEQ ID NO: 39316
  CDS (1)..(1566): transl_table=11

SEQ ID NO: 56214 - protein, 521 aa, Ralstonia eutropha JMP134; identical to SEQ ID NO: 39317

SEQ ID NO: 56215 - DNA, 1296 bp, Ralstonia eutropha JMP134; identical to SEQ ID NO: 39318
  CDS (1)..(1296): transl_table=11

SEQ ID NO: 56216 - protein, 431 aa, Ralstonia eutropha JMP134; identical to SEQ ID NO: 39319

SEQ ID NO: 56217 - DNA, 1245 bp, Ralstonia eutropha JMP134; identical to SEQ ID NO: 39320
  CDS (1)..(1245): transl_table=11

SEQ ID NO: 56218 - protein, 414 aa, Ralstonia eutropha JMP134; identical to SEQ ID NO: 39321

SEQ ID NO: 56219 - DNA, 1743 bp, Ralstonia eutropha JMP134; identical to SEQ ID NO: 39322
  CDS (1)..(1743): transl_table=11

SEQ ID NO: 56220 - protein, 580 aa, Ralstonia eutropha JMP134; identical to SEQ ID NO: 39323

SEQ ID NO: 56221 - DNA, 1284 bp, Ehrlichia canis str. Jake; identical to SEQ ID NO: 39324
  CDS (1)..(1284): transl_table=11

SEQ ID NO: 56222 - protein, 427 aa, Ehrlichia canis str. Jake; identical to SEQ ID NO: 39325

SEQ ID NO: 56223 - DNA, 1254 bp, Dehalococcoides sp. CBDB1; identical to SEQ ID NO: 39326
  CDS (1)..(1254): transl_table=11

SEQ ID NO: 56224 - protein, 417 aa, Dehalococcoides sp. CBDB1; identical to SEQ ID NO: 39327

SEQ ID NO: 56225 - DNA, 1872 bp, Dehalococcoides sp. CBDB1; identical to SEQ ID NO: 39328
  CDS (1)..(1872): transl_table=11

SEQ ID NO: 56226 - protein, 623 aa, Dehalococcoides sp. CBDB1; identical to SEQ ID NO: 39329

SEQ ID NO: 56227 - DNA, 1923 bp, Dehalococcoides sp. CBDB1; identical to SEQ ID NO: 39330
  CDS (1)..(1923): transl_table=11

SEQ ID NO: 56228 - protein, 640 aa, Dehalococcoides sp. CBDB1; identical to SEQ ID NO: 39331

SEQ ID NO: 56229 - DNA, 1281 bp, Thiobacillus denitrificans ATCC 25259; identical to SEQ ID NO: 39332
  CDS (1)..(1281): transl_table=11

SEQ ID NO: 56230 - protein, 426 aa, Thiobacillus denitrificans ATCC 25259; identical to SEQ ID NO: 39333

SEQ ID NO: 56231 - DNA, 1326 bp, Anaeromyxobacter dehalogenans 2CP-C; identical to SEQ ID NO: 39334
  CDS (1)..(1326): transl_table=11

SEQ ID NO: 56232 - protein, 441 aa, Anaeromyxobacter dehalogenans 2CP-C; identical to SEQ ID NO: 39335

SEQ ID NO: 56233 - DNA, 1719 bp, Syntrophobacter fumaroxidans MPOB; identical to SEQ ID NO: 39336
  CDS (1)..(1719): transl_table=11

SEQ ID NO: 56234 - protein, 572 aa, Syntrophobacter fumaroxidans MPOB; identical to SEQ ID NO: 39337

SEQ ID NO: 56235 - DNA, 1563 bp, Alcaligenes eutrophus; identical to SEQ ID NO: 39338
  CDS (1)..(1563): transl_table=11

SEQ ID NO: 56236 - protein, 520 aa, Alcaligenes eutrophus; identical to SEQ ID NO: 39339

SEQ ID NO: 56237 - DNA, 1815 bp, Rhodococcus opacus; identical to SEQ ID NO: 39340
  CDS (1)..(1815): transl_table=11

SEQ ID NO: 56238 - protein, 604 aa, Rhodococcus opacus; identical to SEQ ID NO: 39341

SEQ ID NO: 56239 - DNA, 1440 bp, Dictyostelium discoideum; identical to SEQ ID NO: 39342
  CDS (1)..(1440)

SEQ ID NO: 56240 - protein, 479 aa, Dictyostelium discoideum; identical to SEQ ID NO: 39343

SEQ ID NO: 56241 - DNA, 1464 bp, Solanum tuberosum; identical to SEQ ID NO: 39344
  CDS (1)..(1464)

SEQ ID NO: 56242 - protein, 487 aa, Solanum tuberosum; identical to SEQ ID NO: 39345

SEQ ID NO: 56243 - DNA, 1473 bp, Desulfovibrio fructosovorans; identical to SEQ ID NO: 39346
  CDS (1)..(1473): transl_table=11

SEQ ID NO: 56244 - protein, 490 aa, Desulfovibrio fructosovorans; identical to SEQ ID NO: 39347

SEQ ID NO: 56245 - DNA, 1332 bp, Rhodothermus marinus; identical to SEQ ID NO: 39348
  CDS (1)..(1332): transl_table=11

SEQ ID NO: 56246 - protein, 443 aa, Rhodothermus marinus; identical to SEQ ID NO: 39349

SEQ ID NO: 56247 - DNA, 1395 bp, Homo sapiens; identical to SEQ ID NO: 39350
  CDS (1)..(1395)

SEQ ID NO: 56248 - protein, 464 aa, Homo sapiens; identical to SEQ ID NO: 39351

SEQ ID NO: 56249 - DNA, 1425 bp, Nyctotherus ovalis; identical to SEQ ID NO: 39352
  CDS (1)..(1425): transl_table=10

SEQ ID NO: 56250 - protein, 474 aa, Nyctotherus ovalis; identical to SEQ ID NO: 39353

SEQ ID NO: 56251 - DNA, 1875 bp, Clostridium saccharoperbutylacetonicum; identical to SEQ ID NO: 39354
  CDS (1)..(1875): transl_table=11

SEQ ID NO: 56252 - protein, 624 aa, Clostridium saccharoperbutylacetonicum; identical to SEQ ID NO: 39355

SEQ ID NO: 56253 - DNA, 1290 bp, Trichomonas vaginalis; identical to SEQ ID NO: 39356
  CDS (1)..(1290)

SEQ ID NO: 56254 - protein, 429 aa, Trichomonas vaginalis; identical to SEQ ID NO: 39357

SEQ ID NO: 56255 - DNA, 2109 bp, Drosophila melanogaster; identical to SEQ ID NO: 39358
  CDS (1)..(2109)

SEQ ID NO: 56256 - protein, 702 aa, Drosophila melanogaster; identical to SEQ ID NO: 39359

SEQ ID NO: 56257 - DNA, 1389 bp, Nilaparvata lugens; identical to SEQ ID NO: 39360
  CDS (1)..(1389)

SEQ ID NO: 56258 - protein, 462 aa, Nilaparvata lugens; identical to SEQ ID NO: 39361

SEQ ID NO: 56259 - DNA, 1296 bp, uncultured bacterium 463; identical to SEQ ID NO: 39362
  CDS (1)..(1296)

SEQ ID NO: 56260 - protein, 431 aa, uncultured bacterium 463; identical to SEQ ID NO: 39363

SEQ ID NO: 56261 - DNA, 1455 bp, Chlamydomonas reinhardtii; identical to SEQ ID NO: 39364
  CDS (1)..(1455)

SEQ ID NO: 56262 - protein, 484 aa, Chlamydomonas reinhardtii; identical to SEQ ID NO: 39365

SEQ ID NO: 56263 - DNA, 1611 bp, Thiocapsa roseopersicina; identical to SEQ ID NO: 39366
  CDS (1)..(1611): transl_table=11

SEQ ID NO: 56264 - protein, 536 aa, Thiocapsa roseopersicina; identical to SEQ ID NO: 39367

SEQ ID NO: 56265 - DNA, 1854 bp, Leptospirillum ferrooxidans; identical to SEQ ID NO: 39368
  CDS (1)..(1854)

SEQ ID NO: 56266 - protein, 617 aa, Leptospirillum ferrooxidans; identical to SEQ ID NO: 39369

SEQ ID NO: 56267 - DNA, 1560 bp, Methylobacterium extorquens; identical to SEQ ID NO: 39370
  CDS (1)..(1560): transl_table=11

SEQ ID NO: 56268 - protein, 519 aa, Methylobacterium extorquens; identical to SEQ ID NO: 39371

SEQ ID NO: 56269 - DNA, 1416 bp, Xenopus laevis; identical to SEQ ID NO: 39372
  CDS (1)..(1416)

SEQ ID NO: 56270 - protein, 471 aa, Xenopus laevis; identical to SEQ ID NO: 39373

SEQ ID NO: 56271 - DNA, 1719 bp, Methylobacterium extorquens; identical to SEQ ID NO: 39374
  CDS (1)..(1719): transl_table=11

SEQ ID NO: 56272 - protein, 572 aa, Methylobacterium extorquens; identical to SEQ ID NO: 39375

SEQ ID NO: 56273 - DNA, 1605 bp, Synechococcus sp; identical to SEQ ID NO: 39376
  CDS (1)..(1605): transl_table=11

SEQ ID NO: 56274 - protein, 534 aa, Synechococcus sp; identical to SEQ ID NO: 39377

SEQ ID NO: 56275 - DNA, 1461 bp, Arabidopsis thaliana; identical to SEQ ID NO: 39378
  CDS (1)..(1461): Xaa of translated CDS can stand for any naturally occuring amino acid which can be translated from respective CDS-codon

SEQ ID NO: 56276 - protein, 486 aa, Arabidopsis thaliana; identical to SEQ ID NO: 39379
  misc_feature (303)..(303): Xaa can be any naturally occuring amino acid

SEQ ID NO: 56277 - DNA, 1389 bp, Drosophila melanogaster; identical to SEQ ID NO: 39380
  CDS (1)..(1389)

SEQ ID NO: 56278 - protein, 462 aa, Drosophila melanogaster; identical to SEQ ID NO: 39381

SEQ ID NO: 56279 - DNA, 1794 bp, Eubacterium acidaminophilum; identical to SEQ ID NO: 39382
  CDS (1)..(1794): transl_table=11

SEQ ID NO: 56280 - protein, 597 aa, Eubacterium acidaminophilum; identical to SEQ ID NO: 39383

SEQ ID NO: 56281 - DNA, 1068 bp, Homo sapiens; identical to SEQ ID NO: 39384
  CDS (1)..(1068)

SEQ ID NO: 56282 - protein, 355 aa, Homo sapiens; identical to SEQ ID NO: 39385

SEQ ID NO: 56283 - DNA, 1470 bp, Candida tropicalis; identical to SEQ ID NO: 39386
  misc_feature (1398)..(1398): n is a, c, g, or t
  misc_feature (1407)..(1407): n is a, c, g, or t
  CDS (1)..(1470): transl_table=12

SEQ ID NO: 56284 - protein, 489 aa, Candida tropicalis; identical to SEQ ID NO: 39387

SEQ ID NO: 56285 - DNA, 1626 bp, Anabaena variabilis; identical to SEQ ID NO: 39388
  CDS (1)..(1626): transl_table=11

SEQ ID NO: 56286 - protein, 541 aa, Anabaena variabilis; identical to SEQ ID NO: 39389

SEQ ID NO: 56287 - DNA, 1356 bp, Pseudomonas fluorescens; identical to SEQ ID NO: 39390
  CDS (1)..(1356): transl_table=11

SEQ ID NO: 56288 - protein, 451 aa, Pseudomonas fluorescens; identical to SEQ ID NO: 39391

SEQ ID NO: 56289 - DNA, 1143 bp, Yarrowia lipolytica; identical to SEQ ID NO: 39392
  CDS (1)..(1143)

SEQ ID NO: 56290 - protein, 380 aa, Yarrowia lipolytica; identical to SEQ ID NO: 39393

SEQ ID NO: 56291 - DNA, 1296 bp, Paracoccus denitrificans; identical to SEQ ID NO: 39394
  CDS (1)..(1296): transl_table=11

SEQ ID NO: 56292 - protein, 431 aa, Paracoccus denitrificans; identical to SEQ ID NO: 39395

SEQ ID NO: 56293 - DNA, 1317 bp, Thermus thermophilus; identical to SEQ ID NO: 39396
  CDS (1)..(1317): transl_table=11

SEQ ID NO: 56294 - protein, 438 aa, Thermus thermophilus; identical to SEQ ID NO: 39397

SEQ ID NO: 56295 - DNA, 1535 bp, Bos taurus; identical to SEQ ID NO: 39398
  CDS (79)..(1473)

SEQ ID NO: 56296 - protein, 464 aa, Bos taurus; identical to SEQ ID NO: 39399

SEQ ID NO: 56297 - DNA, 1395 bp, Homo sapiens; identical to SEQ ID NO: 39400
  CDS (1)..(1395)

SEQ ID NO: 56298 - protein, 464 aa, Homo sapiens; identical to SEQ ID NO: 39401

SEQ ID NO: 56299 - DNA, 1395 bp, Macaca fascicularis; identical to SEQ ID NO: 39402
  CDS (1)..(1395)

SEQ ID NO: 56300 - protein, 464 aa, Macaca fascicularis; identical to SEQ ID NO: 39403

SEQ ID NO: 56301 - DNA, 1395 bp, Mus musculus; identical to SEQ ID NO: 39404
  CDS (1)..(1395)

SEQ ID NO: 56302 - protein, 464 aa, Mus musculus; identical to SEQ ID NO: 39405

SEQ ID NO: 56303 - DNA, 1482 bp, Neurospora crassa; identical to SEQ ID NO: 39406
  CDS (1)..(1482)

SEQ ID NO: 56304 - protein, 493 aa, Neurospora crassa; identical to SEQ ID NO: 39407

SEQ ID NO: 56305 - DNA, 1305 bp, Rhizobium meliloti; identical to SEQ ID NO: 39408
  CDS (1)..(1305): transl_table=11

SEQ ID NO: 56306 - protein, 434 aa, Rhizobium meliloti; identical to SEQ ID NO: 39409

SEQ ID NO: 56307 - DNA, 1266 bp, Rhizobium meliloti; identical to SEQ ID NO: 39410
  CDS (1)..(1266): transl_table=11

SEQ ID NO: 56308 - protein, 421 aa, Rhizobium meliloti; identical to SEQ ID NO: 39411

SEQ ID NO: 56309 - DNA, 1281 bp, Aquifex aeolicus; identical to SEQ ID NO: 39412
  CDS (1)..(1281): transl_table=11

SEQ ID NO: 56310 - protein, 426 aa, Aquifex aeolicus; identical to SEQ ID NO: 39413

SEQ ID NO: 56311 - DNA, 1335 bp, Buchnera aphidicola subsp; identical to SEQ ID NO: 39414
  CDS (1)..(1335): transl_table=11

SEQ ID NO: 56312 - protein, 444 aa, Buchnera aphidicola subsp; identical to SEQ ID NO: 39415

SEQ ID NO: 56313 - DNA, 1344 bp, Buchnera aphidicola subsp; identical to SEQ ID NO: 39416
  CDS (1)..(1344): transl_table=11

SEQ ID NO: 56314 - protein, 447 aa, Buchnera aphidicola subsp; identical to SEQ ID NO: 39417

SEQ ID NO: 56315 - DNA, 1335 bp, Buchnera aphidicola subsp; identical to SEQ ID NO: 39418
  CDS (1)..(1335): transl_table=11

SEQ ID NO: 56316 - protein, 444 aa, Buchnera aphidicola subsp; identical to SEQ ID NO: 39419

SEQ ID NO: 56317 - DNA, 1338 bp, Mycobacterium bovis; identical to SEQ ID NO: 39420
  CDS (1)..(1338): transl_table=11

SEQ ID NO: 56318 - protein, 445 aa, Mycobacterium bovis; identical to SEQ ID NO: 39421

SEQ ID NO: 56319 - DNA, 1296 bp, Rhodobacter capsulatus; identical to SEQ ID NO: 39422
  CDS (1)..(1296): transl_table=11

SEQ ID NO: 56320 - protein, 431 aa, Rhodobacter capsulatus; identical to SEQ ID NO: 39423

SEQ ID NO: 56321 - DNA, 1266 bp, Rickettsia conorii; identical to SEQ ID NO: 39424
  CDS (1)..(1266): transl_table=11

SEQ ID NO: 56322 - protein, 421 aa, Rickettsia conorii; identical to SEQ ID NO: 39425

SEQ ID NO: 56323 - DNA, 1266 bp, Rickettsia prowazekii; identical to SEQ ID NO: 39426
  CDS (1)..(1266): transl_table=11

SEQ ID NO: 56324 - protein, 421 aa, Rickettsia prowazekii; identical to SEQ ID NO: 39427

SEQ ID NO: 56325 - DNA, 1350 bp, Streptomyces coelicolor; identical to SEQ ID NO: 39428
  CDS (1)..(1350): transl_table=11

SEQ ID NO: 56326 - protein, 449 aa, Streptomyces coelicolor; identical to SEQ ID NO: 39429

SEQ ID NO: 56327 - DNA, 25 bp, Artificial sequence
  Primer sequence
atgaaaaacattatccgtactcccg

SEQ ID NO: 56328 - DNA, 21 bp, Artificial sequence
  Primer sequence
ttaccagcgctctttcagcag

SEQ ID NO: 56329 - protein, 478 aa, Artificial sequence; identical to SEQ ID NO: 39432
  Consensus
  Variant (2)..(9): Xaa in position 2 to 9 is any amino acid
  Variant (10)..(62): Xaa in position 10 to 62 is any or no amino acid
  Variant (64)..(69): Xaa in position 64 to 69 is any amino acid
  Variant (71)..(72): Xaa in position 71 to 72 is any amino acid
  Variant (73)..(80): Xaa in position 73 to 80 is any or no amino acid
  Variant (83)..(84): Xaa in position 83 to 84 is any or no amino acid
  Variant (86)..(87): Xaa in position 86 to 87 is any or no amino acid
  Variant (89)..(89): Xaa in position 89 is any or no amino acid
  Variant (105)..(106): Xaa in position 105 to 106 is any amino acid
  Variant (108)..(114): Xaa in position 108 to 114 is any amino acid
  Variant (115)..(128): Xaa in position 115 to 128 is any or no amino acid
  Variant (132)..(132): Xaa in position 132 is any amino acid
  Variant (137)..(137): Xaa in position 137 is any amino acid
  Variant (142)..(143): Xaa in position 142 to 143 is any amino acid
  Variant (146)..(146): Xaa in position 146 is any amino acid
  Variant (149)..(151): Xaa in position 149 to 151 is any amino acid
  Variant (154)..(154): Xaa in position 154 is any amino acid
  Variant (159)..(160): Xaa in position 159 to 160 is any amino acid
  Variant (164)..(164): Xaa in position 164 is any amino acid
  Variant (167)..(168): Xaa in position 167 to 168 is any or no amino acid
  Variant (170)..(171): Xaa in position 170 to 171 is any amino acid
  Variant (181)..(183): Xaa in position 181 to 183 is any amino acid
  Variant (184)..(187): Xaa in position 184 to 187 is any or no amino acid
  Variant (189)..(190): Xaa in position 189 to 190 is any or no amino acid
  Variant (193)..(194): Xaa in position 193 to 194 is any or no amino acid
  Variant (196)..(196): Xaa in position 196 is any amino acid
  Variant (197)..(198): Xaa in position 197 to 198 is any or no amino acid
  Variant (200)..(200): Xaa in position 200 is any amino acid
  Variant (203)..(206): Xaa in position 203 to 206 is any amino acid
  Variant (207)..(207): Xaa in position 207 is any or no amino acid
  Variant (209)..(214): Xaa in position 209 to 214 is any or no amino acid
  Variant (216)..(216): Xaa in position 216 is any or no amino acid
  Variant (218)..(219): Xaa in position 218 to 219 is any amino acid
  Variant (234)..(234): Xaa in position 234 is any amino acid
  Variant (240)..(240): Xaa in position 240 is any amino acid
  Variant (242)..(242): Xaa in position 242 is any amino acid
  Variant (245)..(245): Xaa in position 245 is any amino acid
  Variant (248)..(248): Xaa in position 248 is any or no amino acid
  Variant (253)..(254): Xaa in position 253 to 254 is any amino acid
  Variant (259)..(259): Xaa in position 259 is any amino acid
  Variant (262)..(262): Xaa in position 262 is any amino acid
  Variant (264)..(264): Xaa in position 264 is any amino acid
  Variant (269)..(269): Xaa in position 269 is any amino acid
  Variant (271)..(274): Xaa in position 271 to 274 is any amino acid
  Variant (277)..(278): Xaa in position 277 to 278 is any amino acid
  Variant (280)..(281): Xaa in position 280 to 281 is any amino acid
  Variant (284)..(286): Xaa in position 284 to 286 is any amino acid
  Variant (288)..(292): Xaa in position 288 to 292 is any amino acid
  Variant (293)..(296): Xaa in position 293 to 296 is any or no amino acid
  Variant (302)..(302): Xaa in position 302 is any amino acid
  Variant (306)..(306): Xaa in position 306 is any amino acid
  Variant (308)..(313): Xaa in position 308 to 313 is any amino acid
  Variant (315)..(322): Xaa in position 315 to 322 is any amino acid
  Variant (326)..(327): Xaa in position 326 to 327 is any amino acid
  Variant (328)..(329): Xaa in position 328 to 329 is any or no amino acid
  Variant (333)..(335): Xaa in position 333 to 335 is any amino acid
  Variant (336)..(340): Xaa in position 336 to 340 is any or no amino acid
  Variant (342)..(344): Xaa in position 342 to 344 is any amino acid
  Variant (347)..(347): Xaa in position 347 is any amino acid
  Variant (349)..(351): Xaa in position 349 to 351 is any amino acid
  Variant (353)..(360): Xaa in position 353 to 360 is any amino acid
  Variant (361)..(362): Xaa in position 361 to 362 is any or no amino acid
  Variant (367)..(367): Xaa in position 367 is any amino acid
  Variant (369)..(371): Xaa in position 369 to 371 is any amino acid
  Variant (372)..(374): Xaa in position 372 to 374 is any or no amino acid
  Variant (384)..(388): Xaa in position 384 to 388 is any amino acid
  Variant (391)..(398): Xaa in position 391 to 398 is any amino acid
  Variant (400)..(402): Xaa in position 400 to 402 is any amino acid
  Variant (407)..(407): Xaa in position 407 is any amino acid
  Variant (413)..(413): Xaa in position 413 is any amino acid
  Variant (415)..(418): Xaa in position 415 to 418 is any amino acid
  Variant (419)..(423): Xaa in position 419 to 423 is any or no amino acid
  Variant (426)..(426): Xaa in position 426 is any amino acid
  Variant (427)..(430): Xaa in position 427 to 430 is any or no amino acid
  Variant (432)..(432): Xaa in position 432 is any or no amino acid
  Variant (434)..(436): Xaa in position 434 to 436 is any or no amino acid
  Variant (439)..(440): Xaa in position 439 to 440 is any amino acid
  Variant (442)..(443): Xaa in position 442 to 443 is any amino acid
  Variant (445)..(447): Xaa in position 445 to 447 is any amino acid
  Variant (449)..(450): Xaa in position 449 to 450 is any amino acid
  Variant (451)..(455): Xaa in position 451 to 455 is any or no amino acid
  Variant (457)..(457): Xaa in position 457 is any amino acid
  Variant (462)..(463): Xaa in position 462 to 463 is any amino acid
  Variant (465)..(466): Xaa in position 465 to 466 is any amino acid
  Variant (469)..(471): Xaa in position 469 to 471 is any amino acid
  Variant (474)..(474): Xaa in position 474 is any amino acid
  Variant (476)..(477): Xaa in position 476 to 477 is any amino acid

SEQ ID NO: 56330 - protein, 12 aa, Artificial sequence
  Consensus
  Variant (4)..(5): Xaa in position 4 to 5 is Ala or Gly
  Variant (7)..(7): Xaa in position 7 is Pro or Ser
  Variant (8)..(8): Xaa in position 8 is Ala, Ser or Thr
  Variant (10)..(10): Xaa in position 10 is any amino acid
RGGXXFXXGXKW

SEQ ID NO: 56331 - protein, 50 aa, Artificial sequence; identical to SEQ ID NO: 39434
  Consensus
  Variant (2)..(4): Xaa in position 2 to 4 is any amino acid
  Variant (6)..(6): Xaa in position 6 is Ala, Cys, Gly, Ser or Thr
  Variant (9)..(9): Xaa in position 9 is any amino acid
  Variant (10)..(10): Xaa in position 10 is Asp or Glu
  Variant (11)..(11): Xaa in position 11 is Pro or Ser
  Variant (12)..(12): Xaa in position 12 is Ala, Gly or Asn
  Variant (13)..(13): Xaa in position 13 is Ala, Ser or Thr
  Variant (14)..(15): Xaa in position 14 to 15 is any amino acid
  Variant (18)..(19): Xaa in position 18 to 19 is any amino acid
  Variant (20)..(20): Xaa in position 20 is Ile, Leu or Met
  Variant (21)..(23): Xaa in position 21 to 23 is any amino acid
  Variant (25)..(26): Xaa in position 25 to 26 is any amino acid
  Variant (27)..(27): Xaa in position 27 is Phe, Ile, Leu, Met or Val
  Variant (28)..(28): Xaa in position 28 is Phe, Ile, Leu or Val
  Variant (29)..(29): Xaa in position 29 is any amino acid
  Variant (30)..(30): Xaa in position 30 is Ala or Gly
  Variant (31)..(32): Xaa in position 31 to 32 is any amino acid
  Variant (33)..(33): Xaa in position 33 is Ile, Leu, Met or Val
  Variant (34)..(34): Xaa in position 34 is Ala, Cys, Gly, Ser, Thr or Val
  Variant (35)..(35): Xaa in position 35 is Ala, Cys, Gly, Ser or Thr
  Variant (36)..(36): Xaa in position 36 is any amino acid
  Variant (37)..(37): Xaa in position 37 is Ala, Gly, Ser, Thr or Val
  Variant (38)..(49): Xaa in position 38 to 49 is any amino acid
  Variant (50)..(50): Xaa in position 50 is Ala, Glu or Gly

SEQ ID NO: 56332 - protein, 45 aa, Artificial sequence; identical to SEQ ID NO: 39435
  Consensus
  Variant (3)..(4): Xaa in position 3 to 4 is any or no amino acid
  Variant (6)..(6): Xaa in position 6 is Ile or Val
  Variant (7)..(7): Xaa in position 7 is Ala or Cys
  Variant (11)..(11): Xaa in position 11 is Ser or Thr
  Variant (12)..(12): Xaa in position 12 is Ala or Ser
  Variant (13)..(13): Xaa in position 13 is any amino acid
  Variant (14)..(14): Xaa in position 14 is Phe, Ile, Leu or Met
  Variant (15)..(15): Xaa in position 15 is Ala, Asp, Glu, Gly, Asn or Ser
  Variant (17)..(17): Xaa in position 17 is Ile, Leu or Val
  Variant (20)..(21): Xaa in position 20 to 21 is any amino acid
  Variant (22)..(22): Xaa in position 22 is Ala or Gly
  Variant (23)..(23): Xaa in position 23 is any amino acid
  Variant (24)..(24): Xaa in position 24 is Pro or Val
  Variant (25)..(26): Xaa in position 25 to 26 is any amino acid
  Variant (27)..(27): Xaa in position 27 is Lys or Arg
  Variant (30)..(30): Xaa in position 30 is any amino acid
  Variant (31)..(31): Xaa in position 31 is Pro or Val
  Variant (32)..(34): Xaa in position 32 to 34 is any amino acid
  Variant (36)..(39): Xaa in position 36 to 39 is any amino acid
  Variant (41)..(41): Xaa in position 41 is Ser or Thr
  Variant (42)..(44): Xaa in position 42 to 44 is any amino acid

SEQ ID NO: 56333 - protein, 16 aa, Artificial sequence
  Consensus
  Variant (2)..(4): Xaa in position 2 to 4 is any amino acid
  Variant (9)..(9): Xaa in position 9 is any amino acid
  Variant (15)..(15): Xaa in position 15 is any amino acid
FXXXESCGXCTPCRXG

SEQ ID NO: 56334 - DNA, 2374 bp, Escherichia coli K12; identical to SEQ ID NO: 1805
  CDS (86)..(2281)

SEQ ID NO: 56335 - protein, 731 aa, Escherichia coli K12; identical to SEQ ID NO: 1806

SEQ ID NO: 56336 - DNA, 2961 bp, Hafnia alvei; identical to SEQ ID NO: 1807
  CDS (185)..(2404)

SEQ ID NO: 56337 - protein, 739 aa, Hafnia alvei; identical to SEQ ID NO: 1808

SEQ ID NO: 56338 - DNA, 4341 bp, Escherichia coli; identical to SEQ ID NO: 1809
  CDS (660)..(2858)

SEQ ID NO: 56339 - protein, 732 aa, Escherichia coli; identical to SEQ ID NO: 1810

SEQ ID NO: 56340 - DNA, 1850 bp, Bacillus subtilis; identical to SEQ ID NO: 1811
  CDS (312)..(1784)

SEQ ID NO: 56341 - protein, 490 aa, Bacillus subtilis; identical to SEQ ID NO: 1812

SEQ ID NO: 56342 - DNA, 3091 bp, Lactobacillus sp; identical to SEQ ID NO: 1813
  CDS (572)..(2767)

SEQ ID NO: 56343 - protein, 731 aa, Lactobacillus sp; identical to SEQ ID NO: 1814

SEQ ID NO: 56344 - DNA, 1449 bp, Bacillus halodurans; identical to SEQ ID NO: 1815
  CDS (1)..(1449)

SEQ ID NO: 56345 - protein, 482 aa, Bacillus halodurans; identical to SEQ ID NO: 1816

SEQ ID NO: 56346 - DNA, 2196 bp, Sinorhizobium meliloti; identical to SEQ ID NO: 1817
  CDS (1)..(2196)

SEQ ID NO: 56347 - protein, 731 aa, Sinorhizobium meliloti; identical to SEQ ID NO: 1818

SEQ ID NO: 56348 - DNA, 1380 bp, Listeria innocua; identical to SEQ ID NO: 1819
  CDS (1)..(1380)

SEQ ID NO: 56349 - protein, 459 aa, Listeria innocua; identical to SEQ ID NO: 1820

SEQ ID NO: 56350 - DNA, 2307 bp, Yersinia pestis; identical to SEQ ID NO: 1821
  CDS (1)..(2307)

SEQ ID NO: 56351 - protein, 768 aa, Yersinia pestis; identical to SEQ ID NO: 1822

SEQ ID NO: 56352 - DNA, 2145 bp, Salmonella enterica subsp. enterica serovar Typhi; identical to SEQ ID NO: 1823
  CDS (1)..(2145)

SEQ ID NO: 56353 - protein, 714 aa, Salmonella enterica subsp. enterica serovar Typhi; identical to SEQ ID NO: 1824

SEQ ID NO: 56354 - DNA, 1467 bp, Nostoc sp. PCC 7120; identical to SEQ ID NO: 1825
  CDS (1)..(1467)

SEQ ID NO: 56355 - protein, 488 aa, Nostoc sp. PCC 7120; identical to SEQ ID NO: 1826

SEQ ID NO: 56356 - DNA, 2163 bp, Yersinia pestis; identical to SEQ ID NO: 1827
  CDS (1)..(2163)

SEQ ID NO: 56357 - protein, 720 aa, Yersinia pestis; identical to SEQ ID NO: 1828

SEQ ID NO: 56358 - DNA, 2271 bp, Salmonella enterica subsp. enterica serovar Typhi; identical to SEQ ID NO: 1829
  CDS (1)..(2271)

SEQ ID NO: 56359 - protein, 756 aa, Salmonella enterica subsp. enterica serovar Typhi; identical to SEQ ID NO: 1830

SEQ ID NO: 56360 - DNA, 2148 bp, Escherichia coli; identical to SEQ ID NO: 1831
  CDS (1)..(2148)

SEQ ID NO: 56361 - protein, 715 aa, Escherichia coli; identical to SEQ ID NO: 1832

SEQ ID NO: 56362 - DNA, 2835 bp, Escherichia coli; identical to SEQ ID NO: 1833
  CDS (571)..(2712)

SEQ ID NO: 56363 - protein, 713 aa, Escherichia coli; identical to SEQ ID NO: 1834

SEQ ID NO: 56364 - DNA, 1446 bp, Clostridium acetobutylicum; identical to SEQ ID NO: 1835
  CDS (1)..(1446)

SEQ ID NO: 56365 - protein, 481 aa, Clostridium acetobutylicum; identical to SEQ ID NO: 1836

SEQ ID NO: 56366 - DNA, 1464 bp, Clostridium acetobutylicum; identical to SEQ ID NO: 1837
  CDS (1)..(1464)

SEQ ID NO: 56367 - protein, 487 aa, Clostridium acetobutylicum; identical to SEQ ID NO: 1838

SEQ ID NO: 56368 - DNA, 2256 bp, Pseudomonas aeruginosa; identical to SEQ ID NO: 1839
  CDS (1)..(2256)

SEQ ID NO: 56369 - protein, 751 aa, Pseudomonas aeruginosa; identical to SEQ ID NO: 1840

SEQ ID NO: 56370 - DNA, 2853 bp, Mycobacterium leprae; identical to SEQ ID NO: 1841
  CDS (1)..(2853)

SEQ ID NO: 56371 - protein, 950 aa, Mycobacterium leprae; identical to SEQ ID NO: 1842

SEQ ID NO: 56372 - DNA, 2202 bp, Vibrio cholerae; identical to SEQ ID NO: 1843
  CDS (1)..(2202)

SEQ ID NO: 56373 - protein, 733 aa, Vibrio cholerae; identical to SEQ ID NO: 1844

SEQ ID NO: 56374 - DNA, 2163 bp, Vibrio cholerae; identical to SEQ ID NO: 1845
  CDS (1)..(2163)

SEQ ID NO: 56375 - protein, 720 aa, Vibrio cholerae; identical to SEQ ID NO: 1846

SEQ ID NO: 56376 - DNA, 2163 bp, Haemophilus influenzae; identical to SEQ ID NO: 1847
  CDS (1)..(2163)

SEQ ID NO: 56377 - protein, 720 aa, Haemophilus influenzae; identical to SEQ ID NO: 1848

SEQ ID NO: 56378 - DNA, 2844 bp, Mycobacterium tuberculosis; identical to SEQ ID NO: 1849
  CDS (1)..(2844)

SEQ ID NO: 56379 - protein, 947 aa, Mycobacterium tuberculosis; identical to SEQ ID NO: 1850

SEQ ID NO: 56380 - DNA, 1476 bp, Streptococcus pneumoniae; identical to SEQ ID NO: 1851
  CDS (1)..(1476)

SEQ ID NO: 56381 - protein, 491 aa, Streptococcus pneumoniae; identical to SEQ ID NO: 1852

SEQ ID NO: 56382 - DNA, 1476 bp, Bacillus halodurans; identical to SEQ ID NO: 1853
  CDS (1)..(1476)

SEQ ID NO: 56383 - protein, 491 aa, Bacillus halodurans; identical to SEQ ID NO: 1854

SEQ ID NO: 56384 - DNA, 2349 bp, Sinorhizobium meliloti; identical to SEQ ID NO: 1855
  CDS (1)..(2349)

SEQ ID NO: 56385 - protein, 782 aa, Sinorhizobium meliloti; identical to SEQ ID NO: 1856

SEQ ID NO: 56386 - DNA, 1476 bp, Streptococcus pneumoniae; identical to SEQ ID NO: 1857
  CDS (1)..(1476)

SEQ ID NO: 56387 - protein, 491 aa, Streptococcus pneumoniae; identical to SEQ ID NO: 1858

SEQ ID NO: 56388 - DNA, 2271 bp, Escherichia coli; identical to SEQ ID NO: 1859
  CDS (1)..(2271)

SEQ ID NO: 56389 - protein, 756 aa, Escherichia coli; identical to SEQ ID NO: 1860

SEQ ID NO: 56390 - DNA, 1443 bp, Bacillus subtilis; identical to SEQ ID NO: 1861
  CDS (1)..(1443)

SEQ ID NO: 56391 - protein, 480 aa, Bacillus subtilis; identical to SEQ ID NO: 1862

SEQ ID NO: 56392 - DNA, 1452 bp, Synechocystis sp; identical to SEQ ID NO: 1863
  CDS (1)..(1452)

SEQ ID NO: 56393 - protein, 483 aa, Synechocystis sp; identical to SEQ ID NO: 1864

SEQ ID NO: 56394 - DNA, 2307 bp, Yersinia pseudotuberculosis IP 32953; identical to SEQ ID NO: 1865
  CDS (1)..(2307)

SEQ ID NO: 56395 - protein, 768 aa, Yersinia pseudotuberculosis IP 32953; identical to SEQ ID NO: 1866

SEQ ID NO: 56396 - DNA, 1467 bp, Symbiobacterium thermophilum; identical to SEQ ID NO: 1867
  CDS (1)..(1467)

SEQ ID NO: 56397 - protein, 488 aa, Symbiobacterium thermophilum; identical to SEQ ID NO: 1868

SEQ ID NO: 56398 - DNA, 1410 bp, Symbiobacterium thermophilum; identical to SEQ ID NO: 1869
  CDS (1)..(1410)

SEQ ID NO: 56399 - protein, 469 aa, Symbiobacterium thermophilum; identical to SEQ ID NO: 1870

SEQ ID NO: 56400 - DNA, 2154 bp, Erwinia carotovora; identical to SEQ ID NO: 1871
  CDS (1)..(2154)

SEQ ID NO: 56401 - protein, 717 aa, Erwinia carotovora; identical to SEQ ID NO: 1872

SEQ ID NO: 56402 - DNA, 2790 bp, Acinetobacter sp; identical to SEQ ID NO: 1873
  CDS (1)..(2790)

SEQ ID NO: 56403 - protein, 929 aa, Acinetobacter sp; identical to SEQ ID NO: 1874

SEQ ID NO: 56404 - DNA, 1482 bp, Bacillus thuringiensis; identical to SEQ ID NO: 1875
  CDS (1)..(1482)

SEQ ID NO: 56405 - protein, 493 aa, Bacillus thuringiensis; identical to SEQ ID NO: 1876

SEQ ID NO: 56406 - DNA, 1422 bp, Bacillus thuringiensis; identical to SEQ ID NO: 1877
  CDS (1)..(1422)

SEQ ID NO: 56407 - protein, 473 aa, Bacillus thuringiensis; identical to SEQ ID NO: 1878

SEQ ID NO: 56408 - DNA, 2358 bp, Rhodopseudomonas palustris; identical to SEQ ID NO: 1879
  CDS (1)..(2358)

SEQ ID NO: 56409 - protein, 785 aa, Rhodopseudomonas palustris; identical to SEQ ID NO: 1880

SEQ ID NO: 56410 - DNA, 2837 bp, Shigella boydii; identical to SEQ ID NO: 1881
  CDS (165)..(2435)

SEQ ID NO: 56411 - protein, 756 aa, Shigella boydii; identical to SEQ ID NO: 1882

SEQ ID NO: 56412 - DNA, 1380 bp, Listeria monocytogenes; identical to SEQ ID NO: 1883
  CDS (1)..(1380)

SEQ ID NO: 56413 - protein, 459 aa, Listeria monocytogenes; identical to SEQ ID NO: 1884

SEQ ID NO: 56414 - DNA, 1482 bp, Bacillus cereus; identical to SEQ ID NO: 1885
  CDS (1)..(1482)

SEQ ID NO: 56415 - protein, 493 aa, Bacillus cereus; identical to SEQ ID NO: 1886

SEQ ID NO: 56416 - DNA, 1422 bp, Bacillus cereus; identical to SEQ ID NO: 1887
  CDS (1)..(1422)

SEQ ID NO: 56417 - protein, 473 aa, Bacillus cereus; identical to SEQ ID NO: 1888

SEQ ID NO: 56418 - DNA, 1458 bp, Mycobacterium paratuberculosis; identical to SEQ ID NO: 1889
  CDS (1)..(1458)

SEQ ID NO: 56419 - protein, 485 aa, Mycobacterium paratuberculosis; identical to SEQ ID NO: 1890

SEQ ID NO: 56420 - DNA, 2853 bp, Mycobacterium paratuberculosis; identical to SEQ ID NO: 1891
  CDS (1)..(2853)

SEQ ID NO: 56421 - protein, 950 aa, Mycobacterium paratuberculosis; identical to SEQ ID NO: 1892

SEQ ID NO: 56422 - DNA, 2100 bp, Lactobacillus johnsonii; identical to SEQ ID NO: 1893
  CDS (1)..(2100)

SEQ ID NO: 56423 - protein, 699 aa, Lactobacillus johnsonii; identical to SEQ ID NO: 1894

SEQ ID NO: 56424 - DNA, 3625 bp, Vibrio parahaemolyticus; identical to SEQ ID NO: 1895
  CDS (1451)..(3625)

SEQ ID NO: 56425 - protein, 724 aa, Vibrio parahaemolyticus; identical to SEQ ID NO: 1896

SEQ ID NO: 56426 - DNA, 2142 bp, Shigella flexneri; identical to SEQ ID NO: 1897
  CDS (1)..(2142)

SEQ ID NO: 56427 - protein, 713 aa, Shigella flexneri; identical to SEQ ID NO: 1898

SEQ ID NO: 56428 - DNA, 2181 bp, Vibrio vulnificus; identical to SEQ ID NO: 1899
  CDS (1)..(2181)

SEQ ID NO: 56429 - protein, 726 aa, Vibrio vulnificus; identical to SEQ ID NO: 1900

SEQ ID NO: 56430 - DNA, 2307 bp, Photorhabdus luminescens; identical to SEQ ID NO: 1901
  CDS (1)..(2307)

SEQ ID NO: 56431 - protein, 768 aa, Photorhabdus luminescens; identical to SEQ ID NO: 1902

SEQ ID NO: 56432 - DNA, 1404 bp, Gloeobacter violaceus; identical to SEQ ID NO: 1903
  CDS (1)..(1404)

SEQ ID NO: 56433 - protein, 467 aa, Gloeobacter violaceus; identical to SEQ ID NO: 1904

SEQ ID NO: 56434 - DNA, 2259 bp, Chromobacterium violaceum; identical to SEQ ID NO: 1905
  CDS (1)..(2259)

SEQ ID NO: 56435 - protein, 752 aa, Chromobacterium violaceum; identical to SEQ ID NO: 1906

SEQ ID NO: 56436 - DNA, 1251 bp, Chromobacterium violaceum; identical to SEQ ID NO: 1907
  CDS (1)..(1251)

SEQ ID NO: 56437 - protein, 416 aa, Chromobacterium violaceum; identical to SEQ ID NO: 1908

SEQ ID NO: 56438 - DNA, 2352 bp, Fusobacterium nucleatum subsp; identical to SEQ ID NO: 1909
  CDS (1)..(2352)

SEQ ID NO: 56439 - protein, 783 aa, Fusobacterium nucleatum subsp; identical to SEQ ID NO: 1910

SEQ ID NO: 56440 - DNA, 2196 bp, Shigella flexneri; identical to SEQ ID NO: 1911
  CDS (1)..(2196)

SEQ ID NO: 56441 - protein, 731 aa, Shigella flexneri; identical to SEQ ID NO: 1912

SEQ ID NO: 56442 - DNA, 2271 bp, Bordetella pertussis; identical to SEQ ID NO: 1913
  CDS (1)..(2271)

SEQ ID NO: 56443 - protein, 756 aa, Bordetella pertussis; identical to SEQ ID NO: 1914

SEQ ID NO: 56444 - DNA, 2271 bp, Bordetella parapertussis; identical to SEQ ID NO: 1915
  CDS (1)..(2271)

SEQ ID NO: 56445 - protein, 756 aa, Bordetella parapertussis; identical to SEQ ID NO: 1916

SEQ ID NO: 56446 - DNA, 1422 bp, Bacillus cereus; identical to SEQ ID NO: 1917
  CDS (1)..(1422)

SEQ ID NO: 56447 - protein, 473 aa, Bacillus cereus; identical to SEQ ID NO: 1918

SEQ ID NO: 56448 - DNA, 1422 bp, Bacillus anthracis; identical to SEQ ID NO: 1919
  CDS (1)..(1422)

SEQ ID NO: 56449 - protein, 473 aa, Bacillus anthracis; identical to SEQ ID NO: 1920

SEQ ID NO: 56450 - DNA, 2271 bp, Shigella flexneri; identical to SEQ ID NO: 1921
  CDS (1)..(2271)

SEQ ID NO: 56451 - protein, 756 aa, Shigella flexneri; identical to SEQ ID NO: 1922

SEQ ID NO: 56452 - DNA, 2136 bp, Shigella flexneri; identical to SEQ ID NO: 1923
  CDS (1)..(2136)

SEQ ID NO: 56453 - protein, 711 aa, Shigella flexneri; identical to SEQ ID NO: 1924

SEQ ID NO: 56454 - DNA, 2127 bp, Escherichia coli; identical to SEQ ID NO: 1925
  CDS (1)..(2127)

SEQ ID NO: 56455 - protein, 708 aa, Escherichia coli; identical to SEQ ID NO: 1926

SEQ ID NO: 56456 - DNA, 1563 bp, Oryza sativa; identical to SEQ ID NO: 1927
  CDS (1)..(1563)

SEQ ID NO: 56457 - protein, 520 aa, Oryza sativa; identical to SEQ ID NO: 1928

SEQ ID NO: 56458 - DNA, 2181 bp, Vibrio parahaemolyticus; identical to SEQ ID NO: 1929
  CDS (1)..(2181)

SEQ ID NO: 56459 - protein, 726 aa, Vibrio parahaemolyticus; identical to SEQ ID NO: 1930

SEQ ID NO: 56460 - DNA, 4026 bp, Vibrio parahaemolyticus; identical to SEQ ID NO: 1931
  CDS (1779)..(3914)

SEQ ID NO: 56461 - protein, 711 aa, Vibrio parahaemolyticus; identical to SEQ ID NO: 1932

SEQ ID NO: 56462 - DNA, 1461 bp, Clostridium tetani; identical to SEQ ID NO: 1933
  CDS (1)..(1461)

SEQ ID NO: 56463 - protein, 486 aa, Clostridium tetani; identical to SEQ ID NO: 1934

SEQ ID NO: 56464 - DNA, 1416 bp, Clostridium tetani; identical to SEQ ID NO: 1935
  CDS (1)..(1416)

SEQ ID NO: 56465 - protein, 471 aa, Clostridium tetani; identical to SEQ ID NO: 1936

SEQ ID NO: 56466 - DNA, 2766 bp, Bradyrhizobium japonicum; identical to SEQ ID NO: 1937
  CDS (1)..(2766)

SEQ ID NO: 56467 - protein, 921 aa, Bradyrhizobium japonicum; identical to SEQ ID NO: 1938

SEQ ID NO: 56468 - DNA, 2517 bp, Bradyrhizobium japonicum; identical to SEQ ID NO: 1939
  CDS (1)..(2517)

SEQ ID NO: 56469 - protein, 838 aa, Bradyrhizobium japonicum; identical to SEQ ID NO: 1940

SEQ ID NO: 56470 - DNA, 2181 bp, Vibrio vulnificus; identical to SEQ ID NO: 1941
  CDS (1)..(2181)

SEQ ID NO: 56471 - protein, 726 aa, Vibrio vulnificus; identical to SEQ ID NO: 1942

SEQ ID NO: 56472 - DNA, 2109 bp, Vibrio vulnificus; identical to SEQ ID NO: 1943
  CDS (1)..(2109)

SEQ ID NO: 56473 - protein, 702 aa, Vibrio vulnificus; identical to SEQ ID NO: 1944

SEQ ID NO: 56474 - DNA, 2163 bp, Shewanella oneidensis; identical to SEQ ID NO: 1945
  CDS (1)..(2163)

SEQ ID NO: 56475 - protein, 720 aa, Shewanella oneidensis; identical to SEQ ID NO: 1946

SEQ ID NO: 56476 - DNA, 1419 bp, Oceanobacillus iheyensis; identical to SEQ ID NO: 1947
  CDS (1)..(1419)

SEQ ID NO: 56477 - protein, 472 aa, Oceanobacillus iheyensis; identical to SEQ ID NO: 1948

SEQ ID NO: 56478 - DNA, 2154 bp, Escherichia coli O6; identical to SEQ ID NO: 1949
  CDS (1)..(2154)

SEQ ID NO: 56479 - protein, 717 aa, Escherichia coli O6; identical to SEQ ID NO: 1950

SEQ ID NO: 56480 - DNA, 2271 bp, Escherichia coli O6; identical to SEQ ID NO: 1951
  CDS (1)..(2271)

SEQ ID NO: 56481 - protein, 756 aa, Escherichia coli O6; identical to SEQ ID NO: 1952

SEQ ID NO: 56482 - DNA, 2370 bp, Escherichia coli O6; identical to SEQ ID NO: 1953
  CDS (1)..(2370)

SEQ ID NO: 56483 - protein, 789 aa, Escherichia coli O6; identical to SEQ ID NO: 1954

SEQ ID NO: 56484 - DNA, 2136 bp, Escherichia coli O6; identical to SEQ ID NO: 1955
  CDS (1)..(2136)

SEQ ID NO: 56485 - protein, 711 aa, Escherichia coli O6; identical to SEQ ID NO: 1956

SEQ ID NO: 56486 - DNA, 2208 bp, Escherichia coli O6; identical to SEQ ID NO: 1957
  CDS (1)..(2208)

SEQ ID NO: 56487 - protein, 735 aa, Escherichia coli O6; identical to SEQ ID NO: 1958

SEQ ID NO: 56488 - DNA, 2142 bp, Escherichia coli O6; identical to SEQ ID NO: 1959
  CDS (1)..(2142)

SEQ ID NO: 56489 - protein, 713 aa, Escherichia coli O6; identical to SEQ ID NO: 1960

SEQ ID NO: 56490 - DNA, 1488 bp, Thermoanaerobacter tengcongensis; identical to SEQ ID NO: 1961
  CDS (1)..(1488)

SEQ ID NO: 56491 - protein, 495 aa, Thermoanaerobacter tengcongensis; identical to SEQ ID NO: 1962

SEQ ID NO: 56492 - DNA, 1419 bp, Thermoanaerobacter tengcongensis; identical to SEQ ID NO: 1963
  CDS (1)..(1419)

SEQ ID NO: 56493 - protein, 472 aa, Thermoanaerobacter tengcongensis; identical to SEQ ID NO: 1964

SEQ ID NO: 56494 - DNA, 2352 bp, Fusobacterium nucleatum; identical to SEQ ID NO: 1965
  CDS (1)..(2352)

SEQ ID NO: 56495 - protein, 783 aa, Fusobacterium nucleatum; identical to SEQ ID NO: 1966

SEQ ID NO: 56496 - DNA, 1431 bp, Clostridium perfringens; identical to SEQ ID NO: 1967
  CDS (1)..(1431)

SEQ ID NO: 56497 - protein, 476 aa, Clostridium perfringens; identical to SEQ ID NO: 1968

SEQ ID NO: 56498 - DNA, 1455 bp, Clostridium perfringens; identical to SEQ ID NO: 1969
  CDS (1)..(1455)

SEQ ID NO: 56499 - protein, 484 aa, Clostridium perfringens; identical to SEQ ID NO: 1970

SEQ ID NO: 56500 - DNA, 2280 bp, Ralstonia solanacearum; identical to SEQ ID NO: 1971
  CDS (1)..(2280)

SEQ ID NO: 56501 - protein, 759 aa, Ralstonia solanacearum; identical to SEQ ID NO: 1972

SEQ ID NO: 56502 - DNA, 2271 bp, Salmonella typhimurium; identical to SEQ ID NO: 1973
  CDS (1)..(2271)

SEQ ID NO: 56503 - protein, 756 aa, Salmonella typhimurium; identical to SEQ ID NO: 1974

SEQ ID NO: 56504 - DNA, 2136 bp, Salmonella typhimurium; identical to SEQ ID NO: 1975
  CDS (1)..(2136)

SEQ ID NO: 56505 - protein, 711 aa, Salmonella typhimurium; identical to SEQ ID NO: 1976

SEQ ID NO: 56506 - DNA, 2199 bp, Salmonella typhimurium; identical to SEQ ID NO: 1977
  CDS (1)..(2199)

SEQ ID NO: 56507 - protein, 732 aa, Salmonella typhimurium; identical to SEQ ID NO: 1978

SEQ ID NO: 56508 - DNA, 2142 bp, Salmonella typhimurium; identical to SEQ ID NO: 1979
  CDS (1)..(2142)

SEQ ID NO: 56509 - protein, 713 aa, Salmonella typhimurium; identical to SEQ ID NO: 1980

SEQ ID NO: 56510 - DNA, 2136 bp, Vibrio vulnificus; identical to SEQ ID NO: 1981
  CDS (1)..(2136)

SEQ ID NO: 56511 - protein, 711 aa, Vibrio vulnificus; identical to SEQ ID NO: 1982

SEQ ID NO: 56512 - DNA, 2163 bp, Pasteurella multocida; identical to SEQ ID NO: 1983
  CDS (1)..(2163)

SEQ ID NO: 56513 - protein, 720 aa, Pasteurella multocida; identical to SEQ ID NO: 1984

SEQ ID NO: 56514 - DNA, 2139 bp, Moritella japonica; identical to SEQ ID NO: 1985
  CDS (1)..(2139)

SEQ ID NO: 56515 - protein, 712 aa, Moritella japonica; identical to SEQ ID NO: 1986

SEQ ID NO: 56516 - DNA, 1479 bp, Streptomyces coelicolor; identical to SEQ ID NO: 1987
  CDS (1)..(1479)

SEQ ID NO: 56517 - protein, 492 aa, Streptomyces coelicolor; identical to SEQ ID NO: 1988

SEQ ID NO: 56518 - DNA, 2130 bp, Eikenella corrodens; identical to SEQ ID NO: 1989
  CDS (1)..(2130)

SEQ ID NO: 56519 - protein, 709 aa, Eikenella corrodens; identical to SEQ ID NO: 1990

SEQ ID NO: 56520 - DNA, 2271 bp, Escherichia coli; identical to SEQ ID NO: 1859
  CDS (4)..(2271)

SEQ ID NO: 56521 - protein, 755 aa, Escherichia coli; identical to SEQ ID NO: 1992

SEQ ID NO: 56522 - DNA, 2196 bp, Lactobacillus sp; identical to SEQ ID NO: 1993
  CDS (1)..(2196)

SEQ ID NO: 56523 - protein, 731 aa, Lactobacillus sp; identical to SEQ ID NO: 1814

SEQ ID NO: 56524 - DNA, 1482 bp, Bacillus anthracis; identical to SEQ ID NO: 1995
  CDS (1)..(1482)

SEQ ID NO: 56525 - protein, 493 aa, Bacillus anthracis; identical to SEQ ID NO: 1996

SEQ ID NO: 56526 - DNA, 1383 bp, Bacillus cereus; identical to SEQ ID NO: 1997
  CDS (1)..(1383)

SEQ ID NO: 56527 - protein, 460 aa, Bacillus cereus; identical to SEQ ID NO: 1998

SEQ ID NO: 56528 - DNA, 20 bp, Artificial sequence
  Primer sequence
atggggcagggttttccacc

SEQ ID NO: 56529 - DNA, 25 bp, Artificial sequence
  Primer sequence
ttacttcaacacataaccgtacaac

SEQ ID NO: 56530 - protein, 642 aa, Artificial sequence; identical to SEQ ID NO: 2902
  Consensus
  Variant (2)..(5): Xaa in position 2 to 5 is any amino acid
  Variant (7)..(58): Xaa in position 7 to 58 is any amino acid
  Variant (60)..(61): Xaa in position 60 to 61 is any amino acid
  Variant (63)..(66): Xaa in position 63 to 66 is any amino acid
  Variant (68)..(71): Xaa in position 68 to 71 is any amino acid
  Variant (73)..(76): Xaa in position 73 to 76 is any amino acid
  Variant (78)..(90): Xaa in position 78 to 90 is any amino acid
  Variant (92)..(92): Xaa in position 92 is any amino acid
  Variant (94)..(113): Xaa in position 94 to 113 is any amino acid
  Variant (116)..(116): Xaa in position 116 is any amino acid
  Variant (120)..(131): Xaa in position 120 to 131 is any amino acid
  Variant (133)..(188): Xaa in position 133 to 188 is any amino acid
  Variant (191)..(191): Xaa in position 191 is any amino acid
  Variant (193)..(215): Xaa in position 193 to 215 is any amino acid
  Variant (217)..(217): Xaa in position 217 is any amino acid
  Variant (219)..(224): Xaa in position 219 to 224 is any amino acid
  Variant (226)..(290): Xaa in position 226 to 290 is any amino acid
  Variant (292)..(292): Xaa in position 292 is any amino acid
  Variant (295)..(300): Xaa in position 295 to 300 is any amino acid
  Variant (302)..(302): Xaa in position 302 is any amino acid
  Variant (304)..(305): Xaa in position 304 to 305 is any amino acid
  Variant (307)..(333): Xaa in position 307 to 333 is any amino acid
  Variant (337)..(337): Xaa in position 337 is any amino acid
  Variant (339)..(341): Xaa in position 339 to 341 is any amino acid
  Variant (343)..(355): Xaa in position 343 to 355 is any amino acid
  Variant (357)..(370): Xaa in position 357 to 370 is any amino acid
  Variant (372)..(457): Xaa in position 372 to 457 is any amino acid
  Variant (460)..(460): Xaa in position 460 is any amino acid
  Variant (462)..(494): Xaa in position 462 to 494 is any amino acid
  Variant (496)..(497): Xaa in position 496 to 497 is any amino acid
  Variant (499)..(505): Xaa in position 499 to 505 is any amino acid
  Variant (507)..(520): Xaa in position 507 to 520 is any amino acid
  Variant (522)..(524): Xaa in position 522 to 524 is any amino acid
  Variant (526)..(620): Xaa in position 526 to 620 is any amino acid
  Variant (622)..(624): Xaa in position 622 to 624 is any amino acid
  Variant (626)..(630): Xaa in position 626 to 630 is any amino acid
  Variant (635)..(640): Xaa in position 635 to 640 is any amino acid

SEQ ID NO: 56531 - protein, 101 aa, Artificial sequence; identical to SEQ ID NO: 1322
  Consensus
  Variant (2)..(23): Xaa in position 2 to 23 is any amino acid
  Variant (24)..(30): Xaa in position 24 to 30 is any or no amino acid
  Variant (32)..(32): Xaa in position 32 is any amino acid
  Variant (37)..(39): Xaa in position 37 to 39 is any amino acid
  Variant (41)..(55): Xaa in position 41 to 55 is any amino acid
  Variant (56)..(57): Xaa in position 56 to 57 is any or no amino acid
  Variant (59)..(62): Xaa in position 59 to 62 is any amino acid
  Variant (64)..(64): Xaa in position 64 is any amino acid
  Variant (67)..(70): Xaa in position 67 to 70 is any amino acid
  Variant (72)..(72): Xaa in position 72 is any amino acid
  Variant (75)..(77): Xaa in position 75 to 77 is any amino acid
  Variant (79)..(85): Xaa in position 79 to 85 is any amino acid
  Variant (87)..(90): Xaa in position 87 to 90 is any amino acid
  Variant (92)..(93): Xaa in position 92 to 93 is any amino acid
  Variant (97)..(97): Xaa in position 97 is any amino acid
  Variant (100)..(100): Xaa in position 100 is any amino acid

SEQ ID NO: 56532 - protein, 76 aa, Artificial sequence; identical to SEQ ID NO: 2897
  Consensus
  Variant (1)..(1): Xaa in position 1 is Leu, Met or Val
  Variant (2)..(2): Xaa in position 2 is Gly or Asp
  Variant (3)..(3): Xaa in position 3 is Asp, Ser, Asn, Gln or Gly
  Variant (4)..(4): Xaa in position 4 is Leu or Arg
  Variant (5)..(6): Xaa in position 5 to 6 is any amino acid
  Variant (7)..(7): Xaa in position 7 is His or Pro
  Variant (8)..(8): Xaa in position 8 is any amino acid
  Variant (9)..(9): Xaa in position 9 is Gly, Ser, Glu or Asp
  Variant (10)..(13): Xaa in position 10 to 13 is any amino acid
  Variant (14)..(14): Xaa in position 14 is Ala or Ser
  Variant (15)..(15): Xaa in position 15 is Gln, Glu or Met
  Variant (16)..(18): Xaa in position 16 to 18 is any amino acid
  Variant (19)..(19): Xaa in position 19 is Ala or Ser
  Variant (20)..(21): Xaa in position 20 to 21 is any amino acid
  Variant (22)..(22): Xaa in position 22 is Phe, Tyr, Trp or Val
  Variant (23)..(23): Xaa in position 23 is any amino acid
  Variant (24)..(24): Xaa in position 24 is Ala, Ser or Val
  Variant (25)..(27): Xaa in position 25 to 27 is any amino acid
  Variant (28)..(28): Xaa in position 28 is Tyr, Phe or Trp
  Variant (29)..(30): Xaa in position 29 to 30 is any amino acid
  Variant (31)..(31): Xaa in position 31 is Val, Thr, Leu or Ile
  Variant (32)..(32): Xaa in position 32 is any amino acid
  Variant (34)..(34): Xaa in position 34 is Thr or Ser
  Variant (35)..(35): Xaa in position 35 is Ser or Thr
  Variant (36)..(36): Xaa in position 36 is any amino acid
  Variant (37)..(37): Xaa in position 37 is Ser, Ala or Gly
  Variant (38)..(38): Xaa in position 38 is Asn, Ile, Val or Ser
  Variant (39)..(51): Xaa in position 39 to 51 is any amino acid
  Variant (52)..(52): Xaa in position 52 is Val, Ile, Leu or Ala
  Variant (53)..(53): Xaa in position 53 is Leu, Ile, Val or Met
  Variant (54)..(55): Xaa in position 54 to 55 is any amino acid
  Variant (57)..(57): Xaa in position 57 is Asn or Asp
  Variant (58)..(58): Xaa in position 58 is any amino acid
  Variant (60)..(60): Xaa in position 60 is Lys, Gln or Arg
  Variant (61)..(61): Xaa in position 61 is Ser or Ala
  Variant (62)..(65): Xaa in position 62 to 65 is any amino acid
  Variant (66)..(66): Xaa in position 66 is any or no amino acid
  Variant (67)..(67): Xaa in position 67 is Leu, Ile, Met or Val
  Variant (68)..(73): Xaa in position 68 to 73 is any amino acid
  Variant (74)..(74): Xaa in position 74 is Pro or Ala
  Variant (75)..(75): Xaa in position 75 is any amino acid
  Variant (76)..(76): Xaa in position 76 is Tyr, Phe or Trp

SEQ ID NO: 56533 - protein, 39 aa, Artificial sequence; identical to SEQ ID NO: 2898
  Consensus
  Variant (1)..(1): Xaa in position 1 is Val, Ile, Leu, Phe or Thr
  Variant (2)..(2): Xaa in position 2 is Ile, Val, Leu, Phe or Ala
  Variant (3)..(5): Xaa in position 3 to 5 is any amino acid
  Variant (6)..(6): Xaa in position 6 is Thr, Asn or Ser
  Variant (7)..(7): Xaa in position 7 is Tyr, Phe or Pro
  Variant (8)..(8): Xaa in position 8 is Asp, Tyr, Phe or His
  Variant (10)..(12): Xaa in position 10 to 12 is any amino acid
  Variant (13)..(13): Xaa in position 13 is Asn, Asp or Ser
  Variant (14)..(25): Xaa in position 14 to 25 is any amino acid
  Variant (26)..(29): Xaa in position 26 to 29 is any or no amino acid
  Variant (30)..(30): Xaa in position 30 is Ile, Val, Leu or Phe
  Variant (31)..(31): Xaa in position 31 is any amino acid
  Variant (32)..(32): Xaa in position 32 is Phe, Val, Trp or Ile
  Variant (34)..(34): Xaa in position 34 is Glu, Ser or Cys
  Variant (36)..(36): Xaa in position 36 is Trp or His
  Variant (37)..(37): Xaa in position 37 is any amino acid
  Variant (38)..(38): Xaa in position 38 is Ala, Gly, Pro or Val
  Variant (39)..(39): Xaa in position 39 is Tyr, His or Phe

SEQ ID NO: 56534 - protein, 84 aa, Artificial sequence; identical to SEQ ID NO: 2899
  Consensus
  Variant (1)..(1): Xaa in position 1 is Ser or Leu
  Variant (2)..(2): Xaa in position 2 is any amino acid
  Variant (5)..(7): Xaa in position 5 to 7 is any amino acid
  Variant (8)..(8): Xaa in position 8 is Ala, Gly or Ser
  Variant (9)..(9): Xaa in position 9 is Leu, Phe, Met or Ile
  Variant (10)..(10): Xaa in position 10 is Ser, Thr, Arg or Glu
  Variant (11)..(11): Xaa in position 11 is Gln or Met
  Variant (12)..(12): Xaa in position 12 is any amino acid
  Variant (13)..(13): Xaa in position 13 is Ser or Ala
  Variant (14)..(14): Xaa in position 14 is any amino acid
  Variant (15)..(15): Xaa in position 15 is Ile, Leu, Met, Val or Phe
  Variant (16)..(16): Xaa in position 16 is His, Asn, Leu or Ile
  Variant (17)..(25): Xaa in position 17 to 25 is any amino acid
  Variant (26)..(33): Xaa in position 26 to 33 is any or no amino acid
  Variant (34)..(34): Xaa in position 34 is Phe, Val, Leu, Met or Ile
  Variant (35)..(42): Xaa in position 35 to 42 is any amino acid
  Variant (43)..(43): Xaa in position 43 is Ser or Thr
  Variant (44)..(44): Xaa in position 44 is Thr or Ser
  Variant (46)..(47): Xaa in position 46 to 47 is any amino acid
  Variant (48)..(48): Xaa in position 48 is Tyr, Gln or Val
  Variant (49)..(49): Xaa in position 49 is any amino acid
  Variant (50)..(50): Xaa in position 50 is Leu, Ile, Phe or Met
  Variant (51)..(51): Xaa in position 51 is any amino acid
  Variant (52)..(52): Xaa in position 52 is Ala or Ser
  Variant (53)..(53): Xaa in position 53 is Ser, Ala or Thr
  Variant (54)..(54): Xaa in position 54 is any amino acid
  Variant (55)..(55): Xaa in position 55 is Asp or Glu
  Variant (56)..(63): Xaa in position 56 to 63 is any amino acid
  Variant (64)..(65): Xaa in position 64 to 65 is any or no amino acid
  Variant (66)..(66): Xaa in position 66 is Gly, Ala, Lys or Asn
  Variant (67)..(73): Xaa in position 67 to 73 is any amino acid
  Variant (74)..(74): Xaa in position 74 is Ile, Val, Leu, Tyr or Phe
  Variant (75)..(80): Xaa in position 75 to 80 is any amino acid
  Variant (81)..(81): Xaa in position 81 is Arg or Lys
  Variant (82)..(83): Xaa in position 82 to 83 is any amino acid
  Variant (84)..(84): Xaa in position 84 is Ile, Leu, Val, Met, Phe, Ala or Thr

SEQ ID NO: 56535 - protein, 31 aa, Artificial sequence; identical to SEQ ID NO: 2900
  Consensus
  Variant (1)..(1): Xaa in position 1 is Val, Ile, Leu, Cys or Arg
  Variant (2)..(5): Xaa in position 2 to 5 is any amino acid
  Variant (6)..(9): Xaa in position 6 to 9 is any or no amino acid
  Variant (10)..(10): Xaa in position 10 is Gly, Thr, Asp or Asn
  Variant (11)..(11): Xaa in position 11 is any amino acid
  Variant (12)..(12): Xaa in position 12 is Ile, Val or Thr
  Variant (13)..(13): Xaa in position 13 is any amino acid
  Variant (14)..(14): Xaa in position 14 is Ala, Gly, Thr or Leu
  Variant (15)..(16): Xaa in position 15 to 16 is any amino acid
  Variant (17)..(17): Xaa in position 17 is Val, Ile, Ala, Leu or Phe
  Variant (18)..(19): Xaa in position 18 to 19 is any amino acid
  Variant (24)..(24): Xaa in position 24 is Ile, Val or Phe
  Variant (25)..(26): Xaa in position 25 to 26 is any amino acid
  Variant (27)..(27): Xaa in position 27 is Val, Leu, Ile, Phe or Met
  Variant (28)..(29): Xaa in position 28 to 29 is any amino acid
  Variant (31)..(31): Xaa in position 31 is Glu or Gln

SEQ ID NO: 56536 - DNA, 504 bp, Escherichia coli
  CDS (1)..(504)
atgctaattcgagtagaaattcccattgatgcgccgggtattgatgccctgctgcgtcgttcattcgaaagtgatgcggaagcgaagctggttcacgatctgcgtgaagatggctttctgacgctggggctggtggcracagatgacgaaggtcaggtcattggctatgtggcatttagtccggttgatgtgcagggcgaagacctgcaatgggtcggcatggcaccgctggcggtagatgaaaaataccgtggacaggggctggcacgccaactggtctatgaaggactcgattcgcttaatgagttcggctatgccgcagtggtgacgctgggcgatccggcgctatacagccgtttcggctttgaactggcggcgcatcacgatctgcgttgccgctggccgggcactgaaagcgccttccaggtacatcgtttagcggatgacgcgttgaatggcgtaactggtctggttgagtatcacgagcatttcaatcgcttttaa

SEQ ID NO: 56537 - protein, 167 aa, Escherichia coli
MLIRVEIPIDAPGIDALLRRSFESDAEAKLVHDLREDGFLTLGLVATDDEGQVIGYVAFSPVDVQGEDLQWVGMAPLAVDEKYRGQGLARQLVYEGLDSLNEFGYAAVVTLGDPALYSRFGFELAAHHDLRCRWPGTESAFQVHRLADDALNGVTGLVEYHEHFNRF

SEQ ID NO: 56538 - DNA, 516 bp, Francisella tularensis subsp. tularensis
  CDS (1)..(516)
atgcatgtaaaaatccgctatgaaaaattaaaagatcaagagttaatctataaattgatctctgaagcttttgatactagtaatgaagagaaactagttagacttttgcatactgatcatcaaagcttgatatcgctagttgccgaaactgatgatagcagcataataggtcaggcgattatctcaaaaatgactgctgagaaagatgaaacgctaaaaatatatgctcttgcaccaatgtctgtggcaccaaaatatcaacatcaaggaattggttctaagcttatagaagcaatcattaaggaagccaaaaaaaataatattgatgcaatatttgtcttaggtcatccaagttattatccaaaatttggtttcaaaccagccacagaatatcagataaaatgtgaatatgatgtcccagcggatgtttttatggtactagatttgtcagctaaactagctagtttaaaaggacaaactgtctactatgccgaagagtttggcaaaattttttag

SEQ ID NO: 56539 - protein, 171 aa, Francisella tularensis subsp. tularensis
MHVKIRYEKLKDQELIYKLISEAFDTSNEEKLVRLLHTDHQSLISLVAETDDSSIIGQAIISKMTAEKDETLKIYALAPMSVAPKYQHQGIGSKLIEAIIKEAKKNNIDAIFVLGHPSYYPKFGFKPATEYQIKCEYDVPADVFMVLDLSAKLASLKGQTVYYAEEFGKIF

SEQ ID NO: 56540 - DNA, 507 bp, Mesorhizobium loti MAFF303099
  CDS (1)..(507): transl_table=11
atgagcatgatgtcgatacgcgcggcgacgccgcgggatcgcgaggccattcgcctcgtcgaggaacacgccttcggccagcaggcggaggccgggctggtcgacgcgctggtcaccggcggcgacgccgtcgtcgaactggtggcggaagaagacggccaggcggtcggccacatcctgttttcccggctgttcgtccagactggcggcaggagcttcgcggcggtggcgctggcgccgctggcggtggaaccttcgttccatggcagcggcataggcggcgcgctgatccgcgaggcgcatatccggctgaaggatgccggcgagacgctggcggtggtgctgggcgacccggcctattatggccgtttcggctacagccatgcgcgggccgagaagttcgagagcgaataccagggcgaggcgctgcaggcgctggcctggggcgacgctccggaggccggcaggctggtctacgcttccgccttcaccgctctcgccgcgtag

SEQ ID NO: 56541 - protein, 168 aa, Mesorhizobium loti MAFF303099
MSMMSIRAATPRDREAIRLVEEHAFGQQAEAGLVDALVTGGDAVVELVAEEDGQAVGHILFSRLFVQTGGRSFAAVALAPLAVEPSFHGSGIGGALIREAHIRLKDAGETLAVVLGDPAYYGRFGYSHARAEKFESEYQGEALQALAWGDAPEAGRLVYASAFTALAA

SEQ ID NO: 56542 - DNA, 552 bp, Vibrio cholerae O1 biovar eltor str. N16961
  CDS (1)..(552): transl_table=11
ttgtgcataaagggatgcaaacgccgaattcatcccacgaggttattaatgcttattcgaactgaagcgcctgctgatattttggtggtcgatcaactgttgaaaaacgtctttgctactgaggcagaggcggatttagtgatggcgctgcgtgaaaatggccagcgcactttgtcactggtggcttgcgatgatgaaggtgagattgttgggcatgtgatgttcagtcctgtcacgttagaaggcgaggatctcaactggcaaggtcttgcacctctcgcggtaaaagaagaataccgtcgccaaggcattggtgccgagttagtcaaagaagggttaagctcgcttggggagcttggctatcctgcttgtgtggtgcttggcgatccggcctactactcacgttttggctttgaagatgccgcgcgttattcgctgcgttgtgcttgggatgtaccgcagggagcatttcaagtggtggcgctatgggagcgtgagttagatggtcgatgtggagtgattgaatacagccaagagtttgcggctttataa

SEQ ID NO: 56543 - protein, 183 aa, Vibrio cholerae O1 biovar eltor str. N16961
MCIKGCKRRIHPTRLLMLIRTEAPADILVVDQLLKNVFATEAEADLVMALRENGQRTLSLVACDDEGEIVGHVMFSPVTLEGEDLNWQGLAPLAVKEEYRRQGIGAELVKEGLSSLGELGYPACVVLGDPAYYSRFGFEDAARYSLRCAWDVPQGAFQVVALWERELDGRCGVIEYSQEFAAL

SEQ ID NO: 56544 - DNA, 507 bp, Pseudomonas aeruginosa PAO1
  CDS (1)..(507): transl_table=11
atgaatatttccatccgtgcggagacgcccggcgacatcgacgccatcgcccacctgaccgaagccgcgttccgcaacgaaacgcacagcagccataccgagcagtacatcgtcgatgccctgcgccgtgctggcgcgctgacgctttcgctggtggccgaagcgaatggccaggtgatcggccatatcgcagcctcgccagtgaccatcgatggcgaagcgggcgactggtacggcctcgcgccgctatcggtggcgcccgggcgacagcgccagggtctcggttcgcagttggtccggcgcctgctcaccgagctgcgactgctgcccgcgggtggctgcgtggtactgggcgaaccgacctactactcgcgcttcggctttcgggtggaaagcggcctggcgttgcccggcgttcccgccgaatacttccaggcacagtccttcagcgggcgcatggcgcaaggaatagtggccttccacgccgcattcgacgccagcggctga

SEQ ID NO: 56545 - protein, 168 aa, Pseudomonas aeruginosa PAO1
MNISIRAETPGDIDAIAHLTEAAFRNETHSSHTEQYIVDALRRAGALTLSLVAEANGQVIGHIAASPVTIDGEAGDWYGLAPLSVAPGRQRQGLGSQLVRRLLTELRLLPAGGCVVLGEPTYYSRFGFRVESGLALPGVPAEYFQAQSFSGRMAQGIVAFHAAFDASG

SEQ ID NO: 56546 - DNA, 522 bp, Lactococcus lactis subsp. lactis Il1403
  CDS (1)..(522): transl_table=11
atgataattaaaacaataaatttggaaaactataatgaagttactgaacttattcgtgaatcttttagtcagtcagaacatggttatggtaatgaggctgaacttgttgataaaattcgtaatgaagaaggttatatcaaagatttggaaattgttgcttttgaagatggtaaaatcgttggtcacggtcttttgagtgaggtagagatagtaagtgactcacaaaaattcaaaggtttggtcttagctcctcttgatgttttaactacttaccaaggtaaaggtattggggcagcagtattattggaacttgaaaaaagagcaaaaattttggattatccgtttattagtattttaggtcatgaaacttattatcctaagtttggttatgtaccagcaagtcaatatcaaatcaaagcaccttttgaagttcctgataagaactttatgattaaagaattaactgacggtggcttagaaggaaaatcaggagtaattcactactcagaagcctttaactaa

SEQ ID NO: 56547 - protein, 173 aa, Lactococcus lactis subsp. lactis Il1403
MIIKTINLENYNEVTELIRESFSQSEHGYGNEAELVDKIRNEEGYIKDLEIVAFEDGKIVGHGLLSEVEIVSDSQKFKGLVLAPLDVLTTYQGKGIGAAVLLELEKRAKILDYPFISILGHETYYPKFGYVPASQYQIKAPFEVPDKNFMIKELTDGGLEGKSGVIHYSEAFN

SEQ ID NO: 56548 - DNA, 504 bp, Agrobacterium tumefaciens str. C58
  CDS (1)..(504): transl_table=11
atgatcatccggccggagcggcagggtgatgaagaggcgatcgctcgcgttacggaagatgccttccgtaacgtcgaacaccgtagcgggacagaacaactgatcgtcgcgcggctgcgggacgccggcgctctgacggtttcactggttgcggaagacagcgaaggcatcatcggccatgtcggtttctcgccggtgacgctgtcgagtggcgagaccggctggttctgcctcgcgccgctctccgttacacctgaaaggcagggcgaaggtgtcggttcgaggctggcgcgtgacgggcttgccgtgctggagcggctgagcgctgccggctgcgttgttgtcggcgatcccgcctattacggccgcttcggttttcgccctgtcgcgggcctgagtgccgaggggattcctgacgaatatttcacagttcttcgcttgcatggcggaactccatccggcattgtcggttttcatccgggtttcgatggcgacaacgcttaa

SEQ ID NO: 56549 - protein, 167 aa, Agrobacterium tumefaciens str. C58
MIIRPERQGDEEAIARVTEDAFRNVEHRSGTEQLIVARLRDAGALTVSLVAEDSEGIIGHVGFSPVTLSSGETGWFCLAPLSVTPERQGEGVGSRLARDGLAVLERLSAAGCVVVGDPAYYGRFGFRPVAGLSAEGIPDEYFTVLRLHGGTPSGIVGFHPGFDGDNA

SEQ ID NO: 56550 - DNA, 498 bp, Sinorhizobium meliloti 1021
  CDS (1)..(498): transl_table=11
atgatcatccgaccggaaaccgcgggcgacgccgaggcgatccggcagattaccgaggcggctttcgccgggcagccctatagcgaccagacggaggcccggatcatcgaccggctgcgctccgaggacgcgatgacgctgtccctcgttgccgaggaagagggtgaggtgatcggccacatcgctttttcgcctgtcacgatcaccccgttcgcggtcggctggtacgggctcggtcccgtgtcggtgcggccggactggcaaggacgcggcacggggagcgcacttgtgcgccgcgggctcgacatgctgcgcaaggcgggggcttcaggctgcgtcctggcgggcaatccggccttctatgagagattcgggttccgcaacgagcctgctcttgtttttccgggttgtgcgccgcaatatttcatggctttacccttgtcgggagggctggtttccggcaccgtcacttatcatcccgccttcggagcggactga

SEQ ID NO: 56551 - protein, 165 aa, Sinorhizobium meliloti 1021
MIIRPETAGDAEAIRQITEAAFAGQPYSDQTEARIIDRLRSEDAMTLSLVAEEEGEVIGHIAFSPVTITPFAVGWYGLGPVSVRPDWQGRGTGSALVRRGLDMLRKAGASGCVLAGNPAFYERFGFRNEPALVFPGCAPQYFMALPLSGGLVSGTVTYHPAFGAD

SEQ ID NO: 56552 - DNA, 591 bp, Sinorhizobium meliloti 1021
  CDS (1)..(591): transl_table=11
atggccgctgttgttgattccttgcgcgcgttcttcgcgccaaccacctttgtgatcgactcggaaaacccgggcgatgtcgttgcgcgcgagaacctgctcgaccgcgccatgggcgcgggtcgccgcaggaaatcgtcggagaagctgcgtcgcggccgcgtgcctgccgagggccttgcccttgtcgcccgggatgccgacggtcacgtcatcggcaccgtgcgcctctggaacgtcgaggccggcgtcaaccgcgagggccagccggtgccggcgctgctgctcggcccgcttgcggtcgatccggcgcatgagggcaaaggtatcggcggcatgctgatgcgcgcggcggtccaggaagccaagaaccgcggccatggcgccgtcctgctcgtcggcgacgccgcctattacgaacgtttcggcttcttctcgcagcgcgcgcagcatctcgtcatgcccggtcctttcgagcgcaatcgcttcctggcgctcgagctcaaggaaggctggctcgacggtgctgccgggatgctggtcgccagcggccggaaactcgctttgccgccgcttcgccgcgccgcctga

SEQ ID NO: 56553 - protein, 196 aa, Sinorhizobium meliloti 1021
MAAVVDSLRAFFAPTTFVIDSENPGDVVARENLLDRAMGAGRRRKSSEKLRRGRVPAEGLALVARDADGHVIGTVRLWNVEAGVNREGQPVPALLLGPLAVDPAHEGKGIGGMLMRAAVQEAKNRGHGAVLLVGDAAYYERFGFFSQRAQHLVMPGPFERNRFLALELKEGWLDGAAGMLVASGRKLALPPLRRAA

SEQ ID NO: 56554 - DNA, 504 bp, Salmonella typhimurium LT2
  CDS (1)..(504): transl_table=11
atgctaattcgagtagaaattcctattgatgcgcctggtattgatgcgctgttacgccgttcattcgaaagcgatgcggaagcgaagctggttcacgatttgcgtgaagatggttttctgacgctcggactggtggccacggatgatgaaggtcaggtggtgggctatgtcgcctttagcccggttgatgtgcagggcgaagatttacagtgggtcggcatggcgccgctggcggtcgatgaaaagtatcgcgggcaagggctggcgcgccagttagtgtatgaagggctggattcgctcaacgagttcggctacgcggcggtcgtgacgctgggcgatccggcgttatatagccgcttcggttttgaactggccgcacattacgatcttcactgccgttggcccggtacggaaagcgctttccaggtacaccgtttggctgaggatgcgctggagggcgtgacggggctggtggagtatcacgaccacttcaatcgtttttaa

SEQ ID NO: 56555 - protein, 167 aa, Salmonella typhimurium LT2
MLIRVEIPIDAPGIDALLRRSFESDAEAKLVHDLREDGFLTLGLVATDDEGQVVGYVAFSPVDVQGEDLQWVGMAPLAVDEKYRGQGLARQLVYEGLDSLNEFGYAAVVTLGDPALYSRFGFELAAHYDLHCRWPGTESAFQVHRLAEDALEGVTGLVEYHDHFNRF

SEQ ID NO: 56556 - DNA, 519 bp, Listeria innocua Clip11262
  CDS (1)..(519): transl_table=11
atgattattcgaaaagaacaaccacaagattacgaggccattcgtcgtgtaaatgaggaagcttttaaaggtactgtggaagcagacttaattcaaaatatccggaaatccgattattatcagccaggtttgtcacttgtagcagaaacggaagatgggcttattgtaggctatattatgtttagtgaaatttcactggagacagctgggcgcagcagatttattttaggtcttgccccgcttgccgttttgccagaataccaggggaaacgggttggttcaagcttaatggaggaagggatccgcttatcacgcgaaaaagcatatcccgctattgctgtgttaggacatgctgattattatccgcgatttggatttattccttccaatcaatttgcgattccagcaccatttgatgtgccatctgaatactttatgctacttgaactgtatgatggaagtttagaaaatctagcagggacaattcattacccagctgcattttctgaagataattaa

SEQ ID NO: 56557 - protein, 172 aa, Listeria innocua Clip11262
MIIRKEQPQDYEAIRRVNEEAFKGTVEADLIQNIRKSDYYQPGLSLVAETEDGLIVGYIMFSEISLETAGRSRFILGLAPLAVLPEYQGKRVGSSLMEEGIRLSREKAYPAIAVLGHADYYPRFGFIPSNQFAIPAPFDVPSEYFMLLELYDGSLENLAGTIHYPAAFSEDN

SEQ ID NO: 56558 - DNA, 522 bp, Nostoc sp. PCC 7120
  CDS (1)..(522): transl_table=11
atggatgttaacatgatgaatatacgctgtgaaactgacgcagattatttagctatttccgaagtaaacaacttatcttttggtcaagagaatgaaacacaattaattgatgaaattcgtatttccgagttttatattccagaattatcattaatttacgaaattaatcatatcgtggtctggcatattctttttagctatattgagttagtaggagaagagaacctacaagtgctggggttagcacctatggctgttcatcctgaatttcaaagaaaaggaattggcagcgctctagtcaaaacaggtttagaaaaagcagatgcaagaggagaaagtttagttattgtattagggtatcctcagttttattctcgttttggttttatcccttctgttaactgtaaaattgagagtccttttccagtaccagacgatgtatttatggtcaaaacactacaaagttatcaagaaaaatatcaaggaaaagttatttatccgccggctttttccaaagtttaa

SEQ ID NO: 56559 - protein, 173 aa, Nostoc sp. PCC 7120
MDVNMMNIRCETDADYLAISEVNNLSFGQENETQLIDEIRISEFYIPELSLIYEINHIVVWHILFSYIELVGEENLQVLGLAPMAVHPEFQRKGIGSALVKTGLEKADARGESLVIVLGYPQFYSRFGFIPSVNCKIESPFPVPDDVFMVKTLQSYQEKYQGKVIYPPAFSKV

SEQ ID NO: 56560 - DNA, 591 bp, Agrobacterium tumefaciens str. C58
  CDS (1)..(591): transl_table=11
ttgtgtgacgggaggccaaggatggccgctcttttgaattcggtacgggcattttttacaccgcagacatttcatgtcgatcaggaaaatccgggcgatgtcgtcgcccgtgagaaccttctcgaccgcgccatgggcgctggccgccgccgcaagtcttctgaaaagctgcgcgccggccgcgttccggccgaaggcctggcgcttgttgctcgggatgaggatggccatgtcattgccacggtgcgcctttggaatgtcgaagccggtatttcacgcgaaggccgtcctgtcgaggcgttgttgcttggcccgttggccgtcgatgccgcccatgagggcaagggcatcggctccgcactgatgcgtgcggcaatcggtgaagccaccaagcgcggccatggcgccatcctcctggtcggcgacgcgccctattacgagcgcttcggctttttcgccgacaaggcccagcacctcatcatgcccggcccgttcgagcgcaaccgttttctggcgctggagctgaaagctggctggctcgaaggtgccgccggtcttctggtggcaaacggccgccggctctcggcctga

SEQ ID NO: 56561 - protein, 196 aa, Agrobacterium tumefaciens str. C58
MCDGRPRMAALLNSVRAFFTPQTFHVDQENPGDVVARENLLDRAMGAGRRRKSSEKLRAGRVPAEGLALVARDEDGHVIATVRLWNVEAGISREGRPVEALLLGPLAVDAAHEGKGIGSALMRAAIGEATKRGHGAILLVGDAPYYERFGFFADKAQHLIMPGPFERNRFLALELKAGWLEGAAGLLVANGRRLSA

SEQ ID NO: 56562 - DNA, 510 bp, Brucella melitensis 16M
  CDS (1)..(510): transl_table=11
gtgaagggaggcagaatgcatatccgcaaggaaaggccacaagacgccgccgaaatccgtcaggtgacagaggcggcttttcgccctgttgcttatagcaaccagaaggaaggggagattgtcgatgcgcttcgcgcggcaaaggcgcttaccctgtcgctggttgcggaggaagacgggcaggttctgggccatatcgccttttcgccggtcctgatcggcggtgcggaaaagggttggtacgggcttggtcccgtttcagtgctgcccgcccggcaaggtgaggggattggcggcaagctgatccgcgagggccttgcgcaattgcgcggtgccggggcaaggggctgtgttcttcttggcgacctcggctattacggacgctttggtttcaaggccgatgcgcggcagaaactgccgggggtgccgcccgaatatttccagtgtctggccttcggtccggatatgccgcaaggcgatgttgcctatcatgcggcattcgatgcatga

SEQ ID NO: 56563 - protein, 169 aa, Brucella melitensis 16M
MKGGRMHIRKERPQDAAEIRQVTEAAFRPVAYSNQKEGEIVDALRAAKALTLSLVAEEDGQVLGHIAFSPVLIGGAEKGWYGLGPVSVLPARQGEGIGGKLIREGLAQLRGAGARGCVLLGDLGYYGRFGFKADARQKLPGVPPEYFQCLAFGPDMPQGDVAYHAAFDA

SEQ ID NO: 56564 - DNA, 543 bp, Clostridium perfringens str. 13
  CDS (1)..(543): transl_table=11
atgaaagtaattgttagaaaagagttagaacaagatcataaaacagtagaacttttagtagaagaagcctttaaagatgctgagtacagtgatcatatggaacatgttttagttagtaaacttagaaagggagaaaactttattgatggcttatctttagttgctgaaagagaaggggaaatagtaggacacatattattaactaaagctaatatagaaaatgaaacagaaaaatatgaaactttagccttagcaccagtttcagtattacctaaatatcaaggtattggaattggaggagaacttataagagaaggaatgagaatggctaaggaacttggatatgattcaataatagttttaggacatgataaatactatcctaaatttggatttaaaaaagctggagattttggaataaaagctccttttgaagtgccagaagaaaactttatggcaatagaattaaatgaagaagctttaaaaaatataagtggtgttgtaagatatgctaatgaatttttagcagataataataagtaa

SEQ ID NO: 56565 - protein, 180 aa, Clostridium perfringens str. 13
MKVIVRKELEQDHKTVELLVEEAFKDAEYSDHMEHVLVSKLRKGENFIDGLSLVAEREGEIVGHILLTKANIENETEKYETLALAPVSVLPKYQGIGIGGELIREGMRMAKELGYDSIIVLGHDKYYPKFGFKKAGDFGIKAPFEVPEENFMAIELNEEALKNISGVVRYANEFLADNNK

SEQ ID NO: 56566 - DNA, 507 bp, Corynebacterium glutamicum ATCC 13032
  CDS (1)..(507): transl_table=11
atgagcgcattccacatccgagcggaacaatcgcgcgatatcagcgcgattcatgatgttactgaagcggcctttacaggaattgagcattcagatggaacagagcaagatctcgtcgataagcttcgtgctgcaaaggcgctgagcctttcgctcgtcgctgaggcggatggcgaggtcattgggcatatcgcagcctctgaggtactgatcggcggtggggtgcagggctggtttggcattgggcctgtcagtgttcggcccgataagcagcagcaaggcgtgggtattgcgctgatgggcagcgcgcttgatcagttgcgtgcggagggtgctggcggcatcgtgttgctgggggatccgggctattatcgacgcttcggttttgaggtcgtgcccgggctggtctatccggacgcgccagcggaattttttatggctgtgtgtttgaatgctccggcgtttccgcagggtgttgtggagtatcactcggcatttggagggtag

SEQ ID NO: 56567 - protein, 168 aa, Corynebacterium glutamicum ATCC 13032
MSAFHIRAEQSRDISAIHDVTEAAFTGIEHSDGTEQDLVDKLRAAKALSLSLVAEADGEVIGHIAASEVLIGGGVQGWFGIGPVSVRPDKQQQGVGIALMGSALDQLRAEGAGGIVLLGDPGYYRRFGFEVVPGLVYPDAPAEFFMAVCLNAPAFPQGVVEYHSAFGG

SEQ ID NO: 56568 - DNA, 654 bp, Methanosarcina acetivorans C2A
  CDS (1)..(654): transl_table=11
ttgcagaaacggatttctctgagaagggaggagaaaacgacaatgaacatttctatcagattggaagaagaaaaggacttcaaaaatgtagaatacatgacaagagaagcattctgggatttatacaaaccgggatgtgatgaacatcttgtattgcataaaataagaaaggtacctgcatttgtaaaagaattggattttgttgcatgtgatgaggatacaatcgtcggcaacattatctattcaagagctaaggtcatagattcggaaaataaggagttcgaagttttatgtatgggcccatttgcagtattgccatcatctcaaaagcaggggataggttctttattaatgaatcattctatcgaaaaggcaaggcagctgggatataagggtattattatttttggaaatcccgactactatcatcgttttggttttgtcagtgccaaagagtataatatttggacgtcctggggcgataattttgacgcatttatggcattggaactctacgacggtagcttgaagggtgtttcaggaaaattttatgaggacgaagtttttaagatagaaaatgaggagctggaggattttgaaaagcaatttccctacaaagaaaagcatattacggacactcaattaaaactataa

SEQ ID NO: 56569 - protein, 217 aa, Methanosarcina acetivorans C2A
MQKRISLRREEKTTMNISIRLEEEKDFKNVEYMTREAFWDLYKPGCDEHLVLHKIRKVPAFVKELDFVACDEDTIVGNIIYSRAKVIDSENKEFEVLCMGPFAVLPSSQKQGIGSLLMNHSIEKARQLGYKGIIIFGNPDYYHRFGFVSAKEYNIWTSWGDNFDAFMALELYDGSLKGVSGKFYEDEVFKIENEELEDFEKQFPYKEKHITDTQLKL

SEQ ID NO: 56570 - DNA, 522 bp, Streptomyces coelicolor A3(2)
  CDS (1)..(522)
atgtcctcttcccgttcttcctggaacacccgcgccgagaccggcgccgacgtccccgtcatccgtgacatcgtccgggccgccttccccacaccggaggaagccgccctcgtcgacgcgctgcgcgccgacgccggggcgtggatcgagggtctgtccctcgtcgcggtggacgactccgaccggcccgtggggcacgccctgctgacccgctgccacatcggggacagcccggcactgtgcctggcgcccgtcgcggtccggcccgagcaccagaacagcggcgccggcgcggccgcggtccgggccgcgctcgcggctgccgggcgcctcggcgagcaccacgtcgtcgtcctcggacacccggagtactacccccgcttcggcttcggcagggcctccgcccacggcatccggctgagcatcgacgtcccggacgaggccctgatggtcctcaccctggacgccgcccacccgctgcccgccgggaccgtccggtacgccgcgccgttcggtatctga

SEQ ID NO: 56571 - protein, 173 aa, Streptomyces coelicolor A3(2)
MSSSRSSWNTRAETGADVPVIRDIVRAAFPTPEEAALVDALRADAGAWIEGLSLVAVDDSDRPVGHALLTRCHIGDSPALCLAPVAVRPEHQNSGAGAAAVRAALAAAGRLGEHHVVVLGHPEYYPRFGFGRASAHGIRLSIDVPDEALMVLTLDAAHPLPAGTVRYAAPFGI

SEQ ID NO: 56572 - DNA, 654 bp, Methanosarcina mazei Go1
  CDS (1)..(654): transl_table=11
ttgaagaggcggctttattttagaagcgaggagaaaacgataatgaacatttctatcagagtagaagaagaaaaggacttcaaaattgtagaatacacgacaagagaagcattctgggatttatacaaaccaggatgtgatgaacatcttgtactgcataaaataagaaaagtacctgcatttgtaaaagaactggattttgttgcatgtgatgaggatacaatcgtcggcaatattatttattcaagagctaaggtcctgaatgaggaaaataaagaattcgaagttttatgtatgggcccattaacagtattgccatcatatcaaaagcaggggatcggttctttattaatgaattattctatcgaaaaagcaagacagctggcatataagggtgtaattatttttggaaatcctgattattatcatcgttttggttttgtcaatgctagagaatatgatatccggacatcctggggcgataattttgatgcatttatggcattggaactttacgatggtagcttgaggggcatttcaggaaaattttatgaggacgaggtttttaaaatagaaaatgaggagctggaggattttgaaaagcaatttccctacaaagagaagcatgttacggacactcaattaaaactatga

SEQ ID NO: 56573 - protein, 217 aa, Methanosarcina mazei Go1
MKRRLYFRSEEKTIMNISIRVEEEKDFKIVEYTTREAFWDLYKPGCDEHLVLHKIRKVPAFVKELDFVACDEDTIVGNIIYSRAKVLNEENKEFEVLCMGPLTVLPSYQKQGIGSLLMNYSIEKARQLAYKGVIIFGNPDYYHRFGFVNAREYDIRTSWGDNFDAFMALELYDGSLRGISGKFYEDEVFKIENEELEDFEKQFPYKEKHVTDTQLKL

SEQ ID NO: 56574 - DNA, 507 bp, Xanthomonas campestris pv. campestris str. ATCC 33913
  CDS (1)..(507): transl_table=11
atgagtgtgctgatccgcgaggcgagcgacggcgacgccgctgccatcgaggtgctgacgatggtggccttcatgcgcgccgagcatagccggcatgacgagcagcatgtgattgccgcgctgcgtaacgacgatgcgctggcgctgtcgttggtcgccgatcacgacggctatgtggtcggccatctggcggtgtcgccggtggctttgtccgacggttcttccggctggttcgcactcggaccgctggcagtgggcccaggccatcaacgtcaggggctcggcacgcgcttggtgcaggcggccctggccaccttgcgcgagcgcggtgcggccgggtgcgtggcccacggcgaacccggctttttccggcggttgggatttgcggtggagccggggttgagcgtgcccgacgtgcccgcatcggaattgcaggcgctggccttcggcgaccggctgctgccgctggccgatgtggcctatcacccggccttcggactgggctga

SEQ ID NO: 56575 - protein, 168 aa, Xanthomonas campestris pv. campestris str. ATCC 33913
MSVLIREASDGDAAAIEVLTMVAFMRAEHSRHDEQHVIAALRNDDALALSLVADHDGYVVGHLAVSPVALSDGSSGWFALGPLAVGPGHQRQGLGTRLVQAALATLRERGAAGCVAHGEPGFFRRLGFAVEPGLSVPDVPASELQALAFGDRLLPLADVAYHPAFGLG

SEQ ID NO: 56576 - DNA, 507 bp, Xanthomonas axonopodis pv. citri str. 306
  CDS (1)..(507): transl_table=11
atgaacgtgttgatccgcgaagccaccgaaggcgacgccgccgccatcgaactgctgaccatggtggccttcatgcgcgccgaacgcagccggcatgacgagcaccaggtgattgcaggattgcgtcaggacggcgcactggcgttgtcgttggtggccgaccacgacggctatgtggtcgggcatctggccgtctcgccggtggcgctgtccgacgattcgcccggctggttcgcgcttggcccgctggccgtggggcccggccaccaacggcaagggctgggcgcgcggttggtgcaggcagcgctcgccacgttgcgcgagcgcggcgccgcaggctgcctggcgctgggcgagccggcgtttttccggcgcctgggtttcgcggtcgaacctggcttggtgttgcccgaggtgcctgcatcggaactgcaagccctggcattcggcgaccggctgctgccgctggccgatgtgtcttaccacccggcgttcgggctgggttga

SEQ ID NO: 56577 - protein, 168 aa, Xanthomonas axonopodis pv. citri str. 306
MNVLIREATEGDAAAIELLTMVAFMRAERSRHDEHQVIAGLRQDGALALSLVADHDGYVVGHLAVSPVALSDDSPGWFALGPLAVGPGHQRQGLGARLVQAALATLRERGAAGCLALGEPAFFRRLGFAVEPGLVLPEVPASELQALAFGDRLLPLADVSYHPAFGLG

SEQ ID NO: 56578 - DNA, 531 bp, Staphylococcus aureus subsp. aureus MW2
  CDS (1)..(531): transl_table=11
atgcaaattagacaaatacatcaacatgactttgctcaagttgaccagttaattagaacggcatttgaaaatagtgaacatggttatggtaatgaatcagaactagtagaccaaattcgtctaagtgatacgtatgacaataacttagaattagtagctgttcttcaaaatgaagttgtagggcacggtttactaagtgaagtttatcttgataacgaggcacaacgggaaattggattagtgttagcacctgtatctgttgatattcatcatcaaaataaaggtattgggaagcgattgattcaagcattagaacgagaagcaatattaaaaggatataattttatcagtgtattaggatggccgacgtattatgccaatctaggatatcaacgcgcaagtatgtacgacatttatccaccatatgatggtataccagacgaagcgtttttaattaaagaattaaaagtgaacagtttagcgggaaaaacaggtaccataaattacacatctgcttttgaaaaaatatga

SEQ ID NO: 56579 - protein, 176 aa, Staphylococcus aureus subsp. aureus MW2
MQIRQIHQHDFAQVDQLIRTAFENSEHGYGNESELVDQIRLSDTYDNNLELVAVLQNEVVGHGLLSEVYLDNEAQREIGLVLAPVSVDIHHQNKGIGKRLIQALEREAILKGYNFISVLGWPTYYANLGYQRASMYDIYPPYDGIPDEAFLIKELKVNSLAGKTGTINYTSAFEKI

SEQ ID NO: 56580 - DNA, 525 bp, Bacillus anthracis str. A2012
  CDS (1)..(525): transl_table=11
gtgataacgattagacaagaacaaaaaaatgattatagaaaaacagaagaagttgtaaaagaagcatttttgcatgaagagtttagtgataaaaaagaacatgaacttgtaaaacgtattagagaatgtgacgcgtttgttccggagttatcaattgttgcggtagatgaggcaatagtcggtcacattatgttatcgaaaattaagatagaacaggatggaacttctgaagaatcattagcacttgcaccagtttcagttgctaggggccatcagaagaaagggattggtggaaagcttattgtagctgctttagaaaaagcgaaagaacttggatacggatcagttgtagtattaggacatccagagtactatccgaaatttggttttaaaaaagcaattgagtggaatataaaagcaccatttgaagtgcctgaagaagtgtttatggtaatagaattaacagaaaatgmtcttgaaagtgtagaaggagttgtacaatattcgagtgcttttgctgagtag

SEQ ID NO: 56581 - protein, 174 aa, Bacillus anthracis str. A2012
  misc_feature (158)..(158): Xaa can be any naturally occuring amino acid
MITIRQEQKNDYRKTEEVVKEAFLHEEFSDKKEHELVKRIRECDAFVPELSIVAVDEAIVGHIMLSKIKIEQDGTSEESLALAPVSVARGHQKKGIGGKLIVAALEKAKELGYGSVVVLGHPEYYPKFGFKKAIEWNIKAPFEVPEEVFMVIELTENXLESVEGVVQYSSAFAE

SEQ ID NO: 56582 - DNA, 486 bp, Chlorobium tepidum TLS
  CDS (1)..(486): transl_table=11
ttggtaaactcccggccccggcctgcgggtcttgccggacaaacgggagatattggtatattaaaggacaaaccgttcatcatcgaggcgctgcgagccgccggagcgctgacgatctctctcgtggcggcgttgggcggacgggtggtcggtcatatcgccttctcgccggtgaccatgtctgacgggtcgtttggggggttcggactcgggttgctgtcggtgctgccggagtttcagcggcagggcatcggtggtgtactgatccgggacggcctcgcctggctaaaagcgctcggggcgatcggctgctgcctggttggccatccggagtactaccgccaattcggcttcgagaatccggatgggctggggcacgaaggcgtaccgctggagttttttttcgtgctctctttcggcggtcaggtcccacagggcagcgcaaggttccacgacgcattcatggccagcggccctgcgtcataa

SEQ ID NO: 56583 - protein, 161 aa, Chlorobium tepidum TLS
MVNSRPRPAGLAGQTGDIGILKDKPFIIEALRAAGALTISLVAALGGRVVGHIAFSPVTMSDGSFGGFGLGLLSVLPEFQRQGIGGVLIRDGLAWLKALGAIGCCLVGHPEYYRQFGFENPDGLGHEGVPLEFFFVLSFGGQVPQGSARFHDAFMASGPAS

SEQ ID NO: 56584 - DNA, 507 bp, Yersinia pestis KIM
  CDS (1)..(507): transl_table=11
gtgttgatccgggttgaaattccggttgatgcgccggggatcgatgctttactgcgtcgggcatttcagcagggtgatgaggcggagctggtacaacaactgcgcgaagatggcttgctgacgcttgggatcgtggcgacggacgatgaaggggtcgttatcggttatgcggcgttcagcccggttgaggttggcggtgaagatcgccaatgggtcgcattggcaccactggccgtggaagagggcttgcgtcggcagggcttgggtgaaaagttggtgtatgagggccttgatgccctgaatgagttcggttatgccgctgtggtagtgctaggtgcgccagcttattattactcacgttttggttttgtaccggcagcccgccatcaactaacctgccgttggcccggtagcgaagaggctttccaggtatatgcactggcagaagacacgctggttaataccaaaggcgaagtggtgttctctgccccattcaatcgcttttag

SEQ ID NO: 56585 - protein, 168 aa, Yersinia pestis KIM
MLIRVEIPVDAPGIDALLRRAFQQGDEAELVQQLREDGLLTLGIVATDDEGVVIGYAAFSPVEVGGEDRQWVALAPLAVEEGLRRQGLGEKLVYEGLDALNEFGYAAVVVLGAPAYYYSRFGFVPAARHQLTCRWPGSEEAFQVYALAEDTLVNTKGEVVFSAPFNRF

SEQ ID NO: 56586 - DNA, 534 bp, Oceanobacillus iheyensis HTE831
  CDS (1)..(534): transl_table=11
atggatatcttaattagagaagaacgaactgaagaatataacacaacggaaaaggttgttaaaagggtatttttaaaggaagaatttagcgataagaaagagcatttacttgttaatcggattagaaaatcggatgcgtttattcctgaactttcattgatcgcaatagatcaagccaatgaaattattggtcacattctattatcaaaaattacaatcgtaaatgatcataaaactgttgattctttagctcttgccccggtatctgttataccggagcatcagaaaaaaggaattggaagtcaattaattcatgctgcattaaaaaaagcaaaagaaattggttatcattcagttattgtattaggtcataaagactattatccaaagtttggttttaaacaggcacgcttctggaatatacaagctccatttgatgtacctgatgaagtatttatggccctagaattaacggaggatgctcttgaaaatgtggaaggtgtcgttcattactccaacgccttttcaggatga

SEQ ID NO: 56587 - protein, 177 aa, Oceanobacillus iheyensis HTE831
MDILIREERTEEYNTTEKVVKRVFLKEEFSDKKEHLLVNRIRKSDAFIPELSLIAIDQANEIIGHILLSKITIVNDHKTVDSLALAPVSVIPEHQKKGIGSQLIHAALKKAKEIGYHSVIVLGHKDYYPKFGFKQARFWNIQAPFDVPDEVFMALELTEDALENVEGVVHYSNAFSG

SEQ ID NO: 56588 - DNA, 588 bp, Bradyrhizobium japonicum USDA 110
  CDS (1)..(588)
atgactgcttttcggaagccacaagtcgccctcacttcgaaagccgctccgttcgcgatccgtgcggagcgtgctgccgacgtcgccgcccgtgaagcgctgctcgatgccagctttggcgagaaccgccatggccgcacctgccagcgcctgcgcgacggacgtgcacctgcctcaggccttgccctgtcggctgtgcgcgaggggacactcgtgggaaccgtgcggctgtggcacgtcagcgccggaggcaggcccgctctggtcctcggaccgctggcggtggaccctgcctgccgcgagctcgggatcggcgccgcgctgatgcaacaagcgctggccgccgcccgggcgcgcgggcatgccgccgtgatcctgcttggcgatgccccctactatgcgcgtttcggcttctcggccgagaggaccggcgcactgatgctgcccggcccgttcgagcgagaccgcctgctggcgatcgaattccaggccggtgcgctggatggcgccgaggggatgatcgtcccgaccggcgcggccctggccaaacggagggtggttcgccccctccaggcgcacgcggcctaa

SEQ ID NO: 56589 - protein, 195 aa, Bradyrhizobium japonicum USDA 110
MTAFRKPQVALTSKAAPFAIRAERAADVAAREALLDASFGENRHGRTCQRLRDGRAPASGLALSAVREGTLVGTVRLWHVSAGGRPALVLGPLAVDPACRELGIGAALMQQALAAARARGHAAVILLGDAPYYARFGFSAERTGALMLPGPFERDRLLAIEFQAGALDGAEGMIVPTGAALAKRRVVRPLQAHAA

SEQ ID NO: 56590 - DNA, 504 bp, Vibrio parahaemolyticus RIMD 2210633
  CDS (1)..(504): transl_table=11
atgcttattcgaactgaagcccctgcggacattctgaccattgaccgcctattgaaacatgcgtttccaaccgatgcagaagccaacttggtgatgcgtttacgtgaaaacggcaagctgaccttgtcgctggtggcgtgtacggatgaaggtgaggtaattggccatgctttatttagcccagttacattaaatggtgaagatttgtcgtggcaagggcttgcaccattggctgttcatgaggactatcgccgtcaaggcattggagctgaactcattaaagaaggtttcgaatctctgcgtgatttcggttatccagtctgtgtcgtgttgggtgaacctaactactatgcacgacaaggtttcaatgctggtgaagagatgggctttgaatgcgcttgggaagtgcctgaaggtgcgtttcgagtagctgaactcgtcgaaggccaatgtacaggacgttctggacgcattgattacgcgccagagttctcagagctttaa

SEQ ID NO: 56591 - protein, 167 aa, Vibrio parahaemolyticus RIMD 2210633
MLIRTEAPADILTIDRLLKHAFPTDAEANLVMRLRENGKLTLSLVACTDEGEVIGHALFSPVTLNGEDLSWQGLAPLAVHEDYRRQGIGAELIKEGFESLRDFGYPVCVVLGEPNYYARQGFNAGEEMGFECAWEVPEGAFRVAELVEGQCTGRSGRIDYAPEFSEL

SEQ ID NO: 56592 - DNA, 525 bp, Bacillus cereus ATCC 14579
  CDS (1)..(525): transl_table=11
atggtaacgattagacaagaacaaaaaaatgattatagaaaaacagaagaagtcataaaagaagcatttttaaaggaagaatttagtgataaaacagaacatgaacttgtaaaacgtattagagaatgtgacgcgtttgttccagagttatcaattgttgcggtagatgaagatatagttggtcacattatgttatcgaaaattacaatagaacaagatggaacttctgtagaatcgttagcacttgcaccagtttcagttgctaggggtcatcagaaaaaaggaattggtggaaaactgattgtagctgcattagaaaaagcgaaagaacttggatacggatcagttgtagtattgggacatccagagtactacccgaaatttggttttaagaaagcaagtgagtggaatataaaagcaccgtttgaagtgcctgaagaggtatttatgataatggaattaacagaaaatgctcttcgaggtgtaaaaggaattgtacaatattcgagtgcttttgctgagtag

SEQ ID NO: 56593 - protein, 174 aa, Bacillus cereus ATCC 14579
MVTIRQEQKNDYRKTEEVIKEAFLKEEFSDKTEHELVKRIRECDAFVPELSIVAVDEDIVGHIMLSKITIEQDGTSVESLALAPVSVARGHQKKGIGGKLIVAALEKAKELGYGSVVVLGHPEYYPKFGFKKASEWNIKAPFEVPEEVFMIMELTENALRGVKGIVQYSSAFAE

SEQ ID NO: 56594 - DNA, 591 bp, Rhodopirellula baltica SH 1
  CDS (1)..(591): transl_table=11
ttgcattctcgtgttgttggcacttcaatgaagatccaagcgacaggcaggattcgagtagccacggaacaggatcgcgatgcaattcctgcggtacacatgaacgcctttggcgaggacgaaggtccggtgatcgtcaagctggtcgatgagatgctcgatgacgcttccggcaaaccaatgctttcactcgtcgccgacacagatgacgggttgattggccaccttcttttcacgtctgtgagaatcgagccggacgatagcacggtcagtgcaaggattcttgcgccgctggccgttgttcagaatcgacaacgccagggaattggcggacgtttgattcaagcggggttaagtcagttggccgactctggtgtcgacctcgtctttgtcctcggctatcccgactactattttcgtttcgggttcaagcccgctggtattcaaggtcttcaagcaacctatccgatcccaccacaaaacgcagatgcttggatggtggcggaactgacgcccggaacgattgagaattgcgagggaactatccgttgctcgaaagctttggaccatccgaagtactggatcgagtga

SEQ ID NO: 56595 - protein, 196 aa, Rhodopirellula baltica SH 1
MHSRVVGTSMKIQATGRIRVATEQDRDAIPAVHMNAFGEDEGPVIVKLVDEMLDDASGKPMLSLVADTDDGLIGHLLFTSVRIEPDDSTVSARILAPLAVVQNRQRQGIGGRLIQAGLSQLADSGVDLVFVLGYPDYYFRFGFKPAGIQGLQATYPIPPQNADAWMVAELTPGTIENCEGTIRCSKALDHPKYWIE

SEQ ID NO: 56596 - DNA, 501 bp, Bordetella pertussis Tohama I
  CDS (1)..(501): transl_table=11
atgctgatccgttccgaaacccccgccgaccagcgcgccatcttcgacgtgacgcaggcggcgtttcgcggccatccgcacagcgagcagaccgaggcgtacatcgtccaggcgctgcgcgccgccggcgcgttgacgctgtcgctggtggccgagctcgacgcccgggtggtcggccatgccgcgttctcgccggtgcagatttccgacggcagcccgtcgtggttcggcctgggaccggtgtcggtcgatccggcccaccagggccgcggtatcggcaccgccctgatcgaacacggcctggcgcggctgcaggcgcgcggcgcggccggttgcgtcctggtgggcgagccggcttactatgggcgtttcggctttcggcccgaacccgggctggtgctgccggacatgccgccgacgcatttcctggcgctgaccttcggcgcgcccgcgcgcggcaccgtcacctaccatccgggattcgcggcgcgcgacgcataa

SEQ ID NO: 56597 - protein, 166 aa, Bordetella pertussis Tohama I
MLIRSETPADQRAIFDVTQAAFRGHPHSEQTEAYIVQALRAAGALTLSLVAELDARVVGHAAFSPVQISDGSPSWFGLGPVSVDPAHQGRGIGTALIEHGLARLQARGAAGCVLVGEPAYYGRFGFRPEPGLVLPDMPPTHFLALTFGAPARGTVTYHPGFAARDA

SEQ ID NO: 56598 - DNA, 510 bp, Gloeobacter violaceus PCC 7421
  CDS (1)..(510): transl_table=11
atggaagttcgagccgaaaagccagaagatgtagaagctgttcgcagactcaatgttgcggcatttgggcgagagagtgaggcaaacttagtcgatcagttgcgaggcgttgcgtctacattttccttcgttgctgttgaatccgagcaaattgttggacacattttctttagtccagttgcgatcgcaggagaatgtgctgctaatttacttgttcttggattggcgccagtggcagtgcttcctgactatcagcgaaaaggaatcgggtcattgctgattcagcatggtttagcagagtgcgctcggttcggtttcaaagctgttgttgtgctgggttctccagcatactatctgcgattcgagtttactccagctaaggagaagggattggggtgtgagtacgcagtgccggatgagacatttatggtgttggagttggaaagtggtgcattggagggctgtgttggaataataaagtatcattcagagtttaatgaacttgcgtag

SEQ ID NO: 56599 - protein, 169 aa, Gloeobacter violaceus PCC 7421
MEVRAEKPEDVEAVRRLNVAAFGRESEANLVDQLRGVASTFSFVAVESEQIVGHIFFSPVAIAGECAANLLVLGLAPVAVLPDYQRKGIGSLLIQHGLAECARFGFKAVVVLGSPAYYLRFEFTPAKEKGLGCEYAVPDETFMVLELESGALEGCVGIIKYHSEFNELA

SEQ ID NO: 56600 - DNA, 504 bp, Photorhabdus luminescens subsp. laumondii TTO1
  CDS (1)..(504): transl_table=11
atgttgatcagagtagaaattccagtagatgcagcgggaatagatcaattattacggaaatcttttgataccccggcagaagcggaattggtccaacaattgcgggaagatggattattgacgttaggtgtggttgctacagatgacgaaggccaggtaatcggttatgtggcttttagtccggtggatattaatggtgaagatcaccaatgggttggtttggcaccgttagcggttgctgaagaatatcgtcggcaggggattggtgaaaagctggtgtatgaaggtttggatagcctgaatgaatttggctatggcgtcgtcgttgttttgggtgatccacactactattgccggtttggttttacgcttgccagtgagcatcagttgcattgccagtggtcaacgtgtgaatcttattttcaggtatatgaattagctgatagttccttggctgaccataaggggttggttacttactcctcacactttgaccgtttctaa

SEQ ID NO: 56601 - protein, 167 aa, Photorhabdus luminescens subsp. laumondii TTO1
MLIRVEIPVDAAGIDQLLRKSFDTPAEAELVQQLREDGLLTLGVVATDDEGQVIGYVAFSPVDINGEDHQWVGLAPLAVAEEYRRQGIGEKLVYEGLDSLNEFGYGVVVVLGDPHYYCRFGFTLASEHQLHCQWSTCESYFQVYELADSSLADHKGLVTYSSHFDRF

SEQ ID NO: 56602 - DNA, 534 bp, Synechocystis sp. PCC 6803
  CDS (1)..(534): transl_table=11
atgacaggacaagaaattttgataagggatgagagaaaggacgatgccgttctcattactgaagtgactattgcggccttcgcgcccctagagattagtaaccacacagagcagttcatcatcgaagctcttcgttccgcaggtgctttaaccctgtcattggttgcagaagtgaatagtcgtgttgtgggacatattgcattttcccctgtggccatctcggacggcacaaaaaactggtatggactcggcccggtctccgtgttacccctataccagcgtagggggattggtaaagctcttattcaggaaggactgtcacagttgaagggcttaggagccaagggctgttgccttgtcggacacccagaatactacaaaaaatttggatttaagaatgtggcggggcttgctctcgaaggggttcccgatgaggtattttttgctctttcgtttgacagtcattatccccagggtgatgttaccttccatgaaggattcagagcaaatagctctagcaacgtgaaattatga

SEQ ID NO: 56603 - protein, 177 aa, Synechocystis sp. PCC 6803
MTGQEILIRDERKDDAVLITEVTIAAFAPLEISNHTEQFIIEALRSAGALTLSLVAEVNSRVVGHIAFSPVAISDGTKNWYGLGPVSVLPLYQRRGIGKALIQEGLSQLKGLGAKGCCLVGHPEYYKKFGFKNVAGLALEGVPDEVFFALSFDSHYPQGDVTFHEGFRANSSSNVKL

SEQ ID NO: 56604 - DNA, 522 bp, Geobacter sulfurreducens PCA
  CDS (1)..(522): transl_table=11
atgaagattcagaaaccggccatcgaggcccgtcccaagatctacgcgcttctgcgcagctcctttcccggcagcgagtatgaagccgcgctggtacagaaactccacgaaaacgacaggtccatccacgaatgggcctgcatcatcggcggcaaggtcatcgcctacatcgcctttaccaatgcctaccatggccgcgacgtctgcggcctgcacctggcccccatggccgtggccccggagttccaggggcgcggggtagggctggagctgctcaggttcgccctgcgccaggaggcaatcagcagccggaccctcttcgttctgggtgaacccgcctattacagccggttcggtttcgaaccgtgcagcacgcccatctgtccctttgacaagaacaacgagcattttctgggcatgcgcaacacggccaccgacagtttcgtggtgggctatgagcccgaatttaccaccgccgcgccgaccgccgcgaccaaggggagaaagcgcgggagacggtaa

SEQ ID NO: 56605 - protein, 173 aa, Geobacter sulfurreducens PCA
MKIQKPAIEARPKIYALLRSSFPGSEYEAALVQKLHENDRSIHEWACIIGGKVIAYIAFTNAYHGRDVCGLHLAPMAVAPEFQGRGVGLELLRFALRQEAISSRTLFVLGEPAYYSRFGFEPCSTPICPFDKNNEHFLGMRNTATDSFVVGYEPEFTTAAPTAATKGRKRGRR

SEQ ID NO: 56606 - DNA, 495 bp, Anopheles gambiae str. PEST
  CDS (1)..(495)
atgaacatcatcattcggcccgaaacgggcgccgatcacgatgccattgaggcactgaccatggccgcattcctcaatgcgccccataccgatcacaacgaacagcggatcgtgcgcgacctgcgccaggccggggcgctcagcctgtcgctggtagcggagctggaggggcgggtggtcggccacctctgcttctcgccggtgaccatcagcgatggcagcccgcactggtatggtcttggccctatttcggtctctcctgccctgcacggcaaggggctgggttctcggctgatggaggtgggtctggccgagctcaaggggatgggagcggccggctgcgtggtgctgggggagcccggcttctacggccgtttcggcttcgtgtccgagccggggttggcgctgcccggcgtgccggccgagtacttcatggctcgctcgttcggcgccgccatgccccgtggcgaagtgtgctaccacccggccttttag

SEQ ID NO: 56607 - protein, 164 aa, Anopheles gambiae str. PEST
MNIIIRPETGADHDAIEALTMAAFLNAPHTDHNEQRIVRDLRQAGALSLSLVAELEGRVVGHLCFSPVTISDGSPHWYGLGPISVSPALHGKGLGSRLMEVGLAELKGMGAAGCVVLGEPGFYGRFGFVSEPGLALPGVPAEYFMARSFGAAMPRGEVCYHPAF

SEQ ID NO: 56608 - DNA, 561 bp, Yarrowia lipolytica CLIB99
  CDS (1)..(561)
atgatcttctcttggagcactacaacaacgtcgacagtggacgtcaagatctcacctgagctgccatggcacaaggatgatatctccaacgtgatcaagtctgcgtttgcgaagctcgccatctccaaccaccaggagcaggagattgtgcacgacttgcgagccacgggcgcactcacagcgtcctgggtcgccatcgataacaatacacagcaggtggttggcacgattttcctgagtgaggtcaaggtggacggacaggttcagagccccaagtggtacggcattggacccattgctgtattgcccgacttccagggcaacgggatcggcgccaaactcatgcatacggccattgagcattgccagggccagctcgatgccggtggcgtcgtgttgctgggaaacccggagttctacaagcagtttgaattcgttccccgtcgagacctgtcgctgatgggcgttccctctcagtactttcaggttcgaaagttccgaggagagtggccctctggagaagtcacctatgacgacgccttcatgagacactcgtggtga

SEQ ID NO: 56609 - protein, 186 aa, Yarrowia lipolytica CLIB99
MIFSWSTTTTSTVDVKISPELPWHKDDISNVIKSAFAKLAISNHQEQEIVHDLRATGALTASWVAIDNNTQQVVGTIFLSEVKVDGQVQSPKWYGIGPIAVLPDFQGNGIGAKLMHTAIEHCQGQLDAGGVVLLGNPEFYKQFEFVPRRDLSLMGVPSQYFQVRKFRGEWPSGEVTYDDAFMRHSW

SEQ ID NO: 56610 - DNA, 507 bp, Desulfovibrio vulgaris subsp. vulgaris str. Hildenborough
  CDS (1)..(507): transl_table=11
atggtggcttccatgattgtacgggaggaagtgccggaggacatcggcagcatattcgaggtgaccgccaaggcgtttgcgacgctggacatcagtgacaagcgggaaccatatgtcatcgaagccttgcgtcacgccggggctctttcgttgtcgctggttgccgtgtttgatggccgcgtcatcggccatgtggccttttcgccagtggcggtgtctgacggtacggagggctggtttggccttggccccttgtcggtgcaccctgcgtatccgcgccgaggtgtggggacggcactggtgcgcgaagggcttgcccgcctgcagtcgcttggtgccgcaggatgttgcctcgtggggcaccccacctactacgtccgtttcgggttcatgaatgcgccggggttgaatgtcgaaggcgtcccgccggagtatctcttcgccatgccgttcaaaggtgaagtgcccaagggcgtcgtgacctttcacgaagcgtttgaggtgtag

SEQ ID NO: 56611 - protein, 168 aa, Desulfovibrio vulgaris subsp. vulgaris str. Hildenborough
MVASMIVREEVPEDIGSIFEVTAKAFATLDISDKREPYVIEALRHAGALSLSLVAVFDGRVIGHVAFSPVAVSDGTEGWFGLGPLSVHPAYPRRGVGTALVREGLARLQSLGAAGCCLVGHPTYYVRFGFMNAPGLNVEGVPPEYLFAMPFKGEVPKGVVTFHEAFEV

SEQ ID NO: 56612 - DNA, 543 bp, Erwinia carotovora subsp. atroseptica SCRI1043
  CDS (1)..(543)
atgctagttcgggtggaaattcccgttgatgccgcagggatcgacagcttattgcgtcgttcttttccaacgggtgcagaagccgatctggtgcatcaactgcgtgaagacggcttattgacgcttggcgtcgtggcaaccgacgatgaaggtggtgtggtggggtacgccgcattcagtccggtgttgatcgaaggtgaggatcggcagtgggtagcgcttgcgccgttggcggtagacgaaagtctgcgtcgacaaggcgtgggtgagaagctggtctacgaagggttggatgcgctgaatgaatttagctataccgccgtcgttgtgctgggtgagcctgcgtactattcccgctttggtttcgttccggctacagagcaccagttgcattgtcgctggccggacagcgaatcgacttttcaggtctacccactggcggacaatcaggttgctggtgaagagtcgtctgaaggtgaaagtggatttgaagatgccatcgggctggttgaatatgccgagccgtttaaccgctttctctag

SEQ ID NO: 56613 - protein, 180 aa, Erwinia carotovora subsp. atroseptica SCRI1043
MLVRVEIPVDAAGIDSLLRRSFPTGAEADLVHQLREDGLLTLGVVATDDEGGVVGYAAFSPVLIEGEDRQWVALAPLAVDESLRRQGVGEKLVYEGLDALNEFSYTAVVVLGEPAYYSRFGFVPATEHQLHCRWPDSESTFQVYPLADNQVAGEESSEGESGFEDAIGLVEYAEPFNRFL

SEQ ID NO: 56614 - DNA, 519 bp, Desulfotalea psychrophila LSv54
  CDS (1)..(519): transl_table=11
atgatcattagagaatcgaagagtcgtgaacttgaggcgatttatgcgcttcatatggcagcctttgatgccgatgagcgcgagcttgtggcgaaactggccatagacttgatcaaggcagctcaccccctactctcattggttgcggtgagcgatgatctcgtcattggtcatattctttttagtccagtcagtatttcaaataacgacaatctatcatgctttattctggcgcctctggctgtatcacctgcaaggcaaaggcagggggttggcagtcagttaattgagcatggtttacgaacacttaccgcccagggcgcggatgttgtgttcgtcttgggtgatccagattattatagccgcagtggttttcatccagttcatgatgtaagtccatcgtattcattgccatacccggaggcatggcaggcaaaagagttaagggtaggcgcattgcaaggggtttccgggacggttgaatgtgtttccgttttaatgtcgccggagctttggtag

SEQ ID NO: 56615 - protein, 172 aa, Desulfotalea psychrophila LSv54
MIIRESKSRELEAIYALHMAAFDADERELVAKLAIDLIKAAHPLLSLVAVSDDLVIGHILFSPVSISNNDNLSCFILAPLAVSPARQRQGVGSQLIEHGLRTLTAQGADVVFVLGDPDYYSRSGFHPVHDVSPSYSLPYPEAWQAKELRVGALQGVSGTVECVSVLMSPELW

SEQ ID NO: 56616 - DNA, 504 bp, Photobacterium profundum SS9
  CDS (1)..(504): transl_table=11
atgctcattagaactgaagcacctgcggatattctacccatagatcgattgctgaagacggtgtttgagaccgatgctgaagctgatttagtgatgagattacgtgagaatagtcaccgtacattatctcttgttgcgtgtagtgatgacggcgaggtgattggacatatcctctttagccctgttaccgttgatgatgtggatgataattggcaaggcttagcgccattatcggtaaaacctgaataccaacgacaaggtatcggaaaagcattaatggaagaagcaaaaataatgcttgctgattttggttaccctgttgtcgttgtgcttggtcacagtgaatattatccacaagtgggtttcgagaaagcttctgagcacggtcttggctgtatttgggaagtacctgatgaagcctttatggttttagaagtgatacctgagcatctagccggtaaatctggcgtcgttaaatacagtgaagaattttcagctctgtaa

SEQ ID NO: 56617 - protein, 167 aa, Photobacterium profundum SS9
MLIRTEAPADILPIDRLLKTVFETDAEADLVMRLRENSHRTLSLVACSDDGEVIGHILFSPVTVDDVDDNWQGLAPLSVKPEYQRQGIGKALMEEAKIMLADFGYPVVVVLGHSEYYPQVGFEKASEHGLGCIWEVPDEAFMVLEVIPEHLAGKSGVVKYSEEFSAL

SEQ ID NO: 56618 - DNA, 552 bp, Magnetospirillum magnetotacticum MS-1
  CDS (1)..(552)
atggttcagatccgcgatgagatcgcctcggatggcgcggcccgcgagcgcctgctcgacacgtgcttcggcccgggtcgcttcctgaagacctcgcagcgcctgcgcgagggtcgccttcccgccctcgccctgagcgcggagcaggacggcaccctcgtcggcaccgtgcgcctgtgggatgtggagacggcctgcggccggccggccctgctgctcggcccgctcgcggtcgatccggcgctccaggggcagggcctcggcgcggcgctgatgcgtgcggccatcgcccgtgcggcggagctcggtcacggcgcggtgctgctggtgggggatgcgccctattatgcccgcttcggcttcgcgccggagaaggccgccggcctctacatgcccggcccgttcgagcgggagcgcttcctcggcctggaactcaaggccgacgcgctggcgggcgccgaaggtgtcctgcacgcgaccggggcgttcgaagcggttccggagttcgcggccgaagccgctgcccaggccgcacgacgacaggccgcctga

SEQ ID NO: 56619 - protein, 183 aa, Magnetospirillum magnetotacticum MS-1
MVQIRDEIASDGAARERLLDTCFGPGRFLKTSQRLREGRLPALALSAEQDGTLVGTVRLWDVETACGRPALLLGPLAVDPALQGQGLGAALMRAAIARAAELGHGAVLLVGDAPYYARFGFAPEKAAGLYMPGPFERERFLGLELKADALAGAEGVLHATGAFEAVPEFAAEAAAQAARRQAA

SEQ ID NO: 56620 - DNA, 507 bp, Dechloromonas aromatica RCB
  CDS (1)..(507)
atgaccacaaccatccgccccgaaaaaccttcagacgaagccgccattgagcaagtcactcggcgcgcttttctctcccacccttacagccatcaaaccgagcagttcatcatccgtgcgctgcgtgcagacgatgcgctttctgtctctctcgtggccgaggaggccggccgcatcgtcgggcatattgcgctgtctcctgtcaccatcagcgacggtagtgccggctggtatgggctgggcccgatttcggtcgaaccggaactgcagcgccgtggtatcggccgggcacttatggagagaggaattgtcgaactgcgcaagatcggagctgcggggtgcgtgctcgttggcgacccggcgttctacgtccgtttcggatttgcgaacaatcctgcactcgtgcttgagggggttcctccagagtttttcctctgtctgctccttggcacggcttccgctcatggctccgttcaattccatcaggcgtttcaagccacggcttga

SEQ ID NO: 56621 - protein, 168 aa, Dechloromonas aromatica RCB
MTTTIRPEKPSDEAAIEQVTRRAFLSHPYSHQTEQFIIRALRADDALSVSLVAEEAGRIVGHIALSPVTISDGSAGWYGLGPISVEPELQRRGIGRALMERGIVELRKIGAAGCVLVGDPAFYVRFGFANNPALVLEGVPPEFFLCLLLGTASAHGSVQFHQAFQATA

SEQ ID NO: 56622 - DNA, 507 bp, Anabaena variabilis ATCC 29413
  CDS (1)..(507)
atgaatatacgctgtgaaactgctacagattatttagctatttccgaagttaataatttagcttttggtcaagaaaatgaatcgcagctaattgataaaattcggatttctgagttttatattccagagttatcattaattgccgaagttaaccatactgtagttggtcatattctttttagctatattgagttagcaggagaagaaaaaatacaagtgcttggattagcacctatggctgtgcatcctgaatttcaaagacaaggaattggcagcgccctagtcaaagcgggattagaaaaagcagatgcaagaggagaaagtttagttattgtattagggcatccacagttttattctcgttttggtttcgtgccgtcagttaattataaaattgctagtccttttccagtaccagacgatgtatttatggtcaaaacactacgaagttatcaagataaatatcaaggaaaggttatttatccacctgctttttcccatgtttaa

SEQ ID NO: 56623 - protein, 168 aa, Anabaena variabilis ATCC 29413
MNIRCETATDYLAISEVNNLAFGQENESQLIDKIRISEFYIPELSLIAEVNHTVVGHILFSYIELAGEEKIQVLGLAPMAVHPEFQRQGIGSALVKAGLEKADARGESLVIVLGHPQFYSRFGFVPSVNYKIASPFPVPDDVFMVKTLRSYQDKYQGKVIYPPAFSHV

SEQ ID NO: 56624 - DNA, 504 bp, Exiguobacterium sp. 255-15
  CDS (1)..(504)
atgcagattcgtacagaaatattcaaagacgcggccggaattcggctcgtccatcaagccgcgtttggacagcggacggaagccgatctggtcgaagcgttacgggaagatgaggcgtcgctcccgcattacagccgcgtcgctgtaacggacaagggcgagattgttgggcatgtcttactcagccggatttacatcgaagacattccgtcgctcgcactcgcgccggtcggtgtcaaaccacactggcaacgcaaaggcatcggctcggaactgatccgccaagtgattgaagatgcccgggaagccggcgagtcacatatcgtcgtccttgggcatgacagttattatccgcagttcggattcgagcgggctgtcgattatggcatcgaagcaccattcccggtcccgatggacgtctttctggtcatgccgctcgaacggcaggcgttaaaagggattgccggaacagtccggtactcgaaaccctttagtgcggtataa

SEQ ID NO: 56625 - protein, 167 aa, Exiguobacterium sp. 255-15
MQIRTEIFKDAAGIRLVHQAAFGQRTEADLVEALREDEASLPHYSRVAVTDKGEIVGHVLLSRIYIEDIPSLALAPVGVKPHWQRKGIGSELIRQVIEDAREAGESHIVVLGHDSYYPQFGFERAVDYGIEAPFPVPMDVFLVMPLERQALKGIAGTVRYSKPFSAV

SEQ ID NO: 56626 - DNA, 507 bp, Mesorhizobium sp. BNC1
  CDS (1)..(507)
atgagcgcagtgattatccgtccggaagaagtcggagacgagaccgcgatccgtctcctcctcgtcaacgcctttggcggcgaggctgaagcaaggcttgtggacgaattgcgctcgtcgggcgaggtcgtgctttcgctcgtggccgagcgcgacggggaaatccgcggccatatcctcttctcgcggctgtgggtgcataacgcgggcgagcgttttgcggctgtcgccttggcgcctttggcggtccatcccgggcaccagcacgaaggcatcggaagcggcctggtggaggatgcgcatgcccgtctggaggcgcaaggagagaaactttcgctcgttcacggggagcctgcctattacggccgcttcggctatagccgcgaacgcgcggccggatttgaaaccatctatcagggtgaatatctccaggcgcgtgcgtgggacgatgctgcccctgcagccggacggctcgattatcctcaagccttcgcggatatcggctga

SEQ ID NO: 56627 - protein, 168 aa, Mesorhizobium sp. BNC1
MSAVIIRPEEVGDETAIRLLLVNAFGGEAEARLVDELRSSGEVVLSLVAERDGEIRGHILFSRLWVHNAGERFAAVALAPLAVHPGHQHEGIGSGLVEDAHARLEAQGEKLSLVHGEPAYYGRFGYSRERAAGFETIYQGEYLQARAWDDAAPAAGRLDYPQAFADIG

SEQ ID NO: 56628 - DNA, 594 bp, Burkholderia cepacia R18194
  CDS (1)..(594)
atggatgcgcgtgttccgcaacgcgcgccgctggatcggctgatcgggatgatgttcgacccgaacgcaccggtcgaggtcgtcacgctgcgcgaccagcgcgcaagcgagggcgacgcgatcggtcgcgtgatcgtcgcggcgttcgcgggcgagccggaaggcgggcagttcgaacggcggatcgtcgatacgctgcgtgcggacggtgcgttgagcgtctcgctcgtcgcggagcgcgacggccgcctgatcgggcatgttgcgttctcgccggtgtcgatcggcggcgaactgtccggcagccagggctggtacgggctggccccgctcgcggtgctgcccgactgccagcggcagagcatcggtgcagggttggtgcgcacggggctcgacgcgttgcgccggattggcgcgcgcggctgcgtgctgctcggcgaacccgcgtattacacgcggttcggctttgcgccatccggtgacatcgtgttcccgggcgtgccgcccgagtatttcctcgcgctgtcgctcgacgattcggcgccgcggccgtcgggtgacgttcgctatcacgacgtgttctatcccgcgtag

SEQ ID NO: 56629 - protein, 197 aa, Burkholderia cepacia R18194
MDARVPQRAPLDRLIGMMFDPNAPVEVVTLRDQRASEGDAIGRVIVAAFAGEPEGGQFERRIVDTLRADGALSVSLVAERDGRLIGHVAFSPVSIGGELSGSQGWYGLAPLAVLPDCQRQSIGAGLVRTGLDALRRIGARGCVLLGEPAYYTRFGFAPSGDIVFPGVPPEYFLALSLDDSAPRPSGDVRYHDVFYPA

SEQ ID NO: 56630 - DNA, 540 bp, Burkholderia cepacia R1808
  CDS (1)..(540)
atgttcgatccgcacgcgccggtcgacatcgtcacgttgcgcgacgaacgcgcgcgcgacgtcgatgcgatcggtcgcgtgatcgcggccgcatttgccggcgagccgcagcaagggcagcgcgagcggcagatcgtcgacgcgctgcgcgcggccggcgcgctcggcgtgtcgctggtcgccgagcgtgacgaccgcgtgatcggccacatcgcgttttcgccggttgcgatcggcggcgcgtcgccggacagccgttggtatgcgctcgcgccgctcgcggtgcggcccgattgcaggcggcagagcgtcggcgcggggctcgtgcgcaccgggctcgatgcgctgcgccggctcggggcacatggttgcgtcgtgctcggcgatcccgcgtactacgcgcggttcggctttgcgccttgcagcgatctggcgttgcacggtgcgccggccgggcgtttgcttgcgctggcgctcgatgcacacgcgccgcggccgtcgggcgacgttcgctatcacgacgcgttcgacctcggctag

SEQ ID NO: 56631 - protein, 179 aa, Burkholderia cepacia R1808
MFDPHAPVDIVTLRDERARDVDAIGRVIAAAFAGEPQQGQRERQIVDALRAAGALGVSLVAERDDRVIGHIAFSPVAIGGASPDSRWYALAPLAVRPDCRRQSVGAGLVRTGLDALRRLGAHGCVVLGDPAYYARFGFAPCSDLALHGAPAGRLLALALDAHAPRPSGDVRYHDAFDLG

SEQ ID NO: 56632 - DNA, 519 bp, Ralstonia metallidurans CH34
  CDS (1)..(519)
atgaccctccagctccgacacgaaaccccggacgacattgccgccatcgaggccgtgaccatcgccgcgttcgctgatgcaccacacaccagccacaccgagcaattcatcgtgcgcgccttgcgtgccgccaacgaactgacgctttccatcgtggccgaagaacatgggcgcgtcgtcggtcacgtcgcgctgtcgccagtaacaatcacccatgagcacgggcgaaagaccgagggctggtataggttggggccgatctccgtcctgccgccaaggcaggggcaaggcatcggttcgcgcctgatggaacaggcgctgtctgaactgcgggctatgcaggccgcaggctgcgtgctgctgggcgatccaacgtactacacgcgctttggcttccaggcccatgcgggcttgcaactgccgggcgtgccgcccggctatttcatggcgctggccctgcatgggacagtgccggaaggcatcgcgcactacagcgatgccttcaacgccgccgcctga

SEQ ID NO: 56633 - protein, 172 aa, Ralstonia metallidurans CH34
MTLQLRHETPDDIAAIEAVTIAAFADAPHTSHTEQFIVRALRAANELTLSIVAEEHGRVVGHVALSPVTITHEHGRKTEGWYRLGPISVLPPRQGQGIGSRLMEQALSELRAMQAAGCVLLGDPTYYTRFGFQAHAGLQLPGVPPGYFMALALHGTVPEGIAHYSDAFNAAA

SEQ ID NO: 56634 - DNA, 549 bp, Ralstonia metallidurans CH34
  CDS (1)..(549)
atggttgatgtccaccgcgagagcatcaatgaggaaaactgcatgaccatctccgtccggaccgagcgtcccgaggatgttgaaaccatcgcccaactcacggaagcggcgttcaggggcgagacccactcgagccacaccgaagccttcatcatcaacggcttgcgtcgtgccggatgcctgacgctctcgctggtggcggaggatgaaagcgggatcgtcggccacgttgcagcctcgcccgtcaccatttcctccggcaattcgggctggtatggcattgggccagtctcggtattgccagatcggcagcgcaggggcattggctcggtgctgatgctggcggcgcttgatgagttgcgacgccttggcgcacgcggttgcgtcgtgctgggtgagcctgcctattacggcagattcggcttccaggccgattcccggctggtgttgcccggcgtaccgcaggagtatttccagacccttgccttcgggcccgacgtgccggtaggcaccgtgcgctatcacgatgcattcgacgccacggagtag

SEQ ID NO: 56635 - protein, 182 aa, Ralstonia metallidurans CH34
MVDVHRESINEENCMTISVRTERPEDVETIAQLTEAAFRGETHSSHTEAFIINGLRRAGCLTLSLVAEDESGIVGHVAASPVTISSGNSGWYGIGPVSVLPDRQRRGIGSVLMLAALDELRRLGARGCVVLGEPAYYGRFGFQADSRLVLPGVPQEYFQTLAFGPDVPVGTVRYHDAFDATE

SEQ ID NO: 56636 - DNA, 510 bp, Nostoc punctiforme PCC 73102
  CDS (1)..(510)
atgatcgatatccgttatgaaactctgtcagattacacagtaatagctgaggtgaatacattagcttttgggcaagaaaatgaggctaaacttgtagagaaaattcgccgttctgaccgctatattccagaactttctctggttgcagagattgaaaatgttgtagtcggtcatattttattcagctacattgatttagtgggtgaagaaacgctacaggtaatcggtttagcacctttagcagtttatccacagtttcaaagacagggtattggtagcgcactaataaaagcagggttagaaatagcagaggcaaagaaagaagctatagtgattgtccttggccatccccacttctatactcgctttggctttcagccttctgttgtttatgaaatcgagtctccttttccagtaccagaggatgtcttcatggttaaaccactgcaaagctatcaaaaaaggtataaaggaaaagttttttatccatctacttttgatggagtgtaa

SEQ ID NO: 56637 - protein, 169 aa, Nostoc punctiforme PCC 73102
MIDIRYETLSDYTVIAEVNTLAFGQENEAKLVEKIRRSDRYIPELSLVAEIENVVVGHILFSYIDLVGEETLQVIGLAPLAVYPQFQRQGIGSALIKAGLEIAEAKKEAIVIVLGHPHFYTRFGFQPSVVYEIESPFPVPEDVFMVKPLQSYQKRYKGKVFYPSTFDGV

SEQ ID NO: 56638 - DNA, 507 bp, Pseudomonas aeruginosa UCBPP-PA14
  CDS (1)..(507)
atgaatatttccatccgtgcggaaacgcccggcgacatcgacgccatcgctcgcctgaccgaagccgcgctccgcaacgaaacgcatagcagccataccgagcagtacatcgtcgatgccctccgccgtgctggcgcgctgacgctttcgctggtggccgaagcgaatggccaggtgatcggccatatcgcagcctcaccagtgaccatcgatggcgaagcgggcggctggtacggcctcgcgccgctatcggtggcgcccgggcgacagcgccagggtctcggttcgcagttggtccggcgcctgctcaccgagttgcgactgctgcccgcgggtggctgcgtggtactgggcgaaccgacctactactcgcgcttcggctttcgggtggaaagcggcctggcgttgcccggcgttcccgccgaatacttccaggcacagtccttcagcgggcgcatggcgcgaggaatagtggccttccacgccgcattcgacgccagcgactga

SEQ ID NO: 56639 - protein, 168 aa, Pseudomonas aeruginosa UCBPP-PA14
MNISIRAETPGDIDAIARLTEAALRNETHSSHTEQYIVDALRRAGALTLSLVAEANGQVIGHIAASPVTIDGEAGGWYGLAPLSVAPGRQRQGLGSQLVRRLLTELRLLPAGGCVVLGEPTYYSRFGFRVESGLALPGVPAEYFQAQSFSGRMARGIVAFHAAFDASD

SEQ ID NO: 56640 - DNA, 516 bp, Chloroflexus aurantiacus
  CDS (1)..(516)
atgaaaacgatgatccgccctgaaacagccgatgatttcaacgccatttacctgatcaaccaactggcattcaaccgcgaaaatgaagcgcacctggtggaggaactgcgctctgctggagcgatcatcttgtcgctggtggcacagatggaggatagaatcgtcggccatatcctgttttcaccggttgtaatcaccgatgccgacgcgcactggcaggctgtcggattgggaccgatggcagtcctgcctcagcttcaacatcggggaattggttcagccctcatccatgccgggctggctgaactcaacaagctcggtcacgatgtcgtcgttgtgctggggcatcccggcttctatccccgcttcgggtttaagccgtctaaaccatttggcattgcgtgggagattgatgtgcctgaagaagtgttcatggtgaaggaattgcgtagtggggcgctcaacggtagaaagggtgtcgtccgctatcaccctgcgttcaatggagttgaataa

SEQ ID NO: 56641 - protein, 171 aa, Chloroflexus aurantiacus
MKTMIRPETADDFNAIYLINQLAFNRENEAHLVEELRSAGAIILSLVAQMEDRIVGHILFSPVVITDADAHWQAVGLGPMAVLPQLQHRGIGSALIHAGLAELNKLGHDVVVVLGHPGFYPRFGFKPSKPFGIAWEIDVPEEVFMVKELRSGALNGRKGVVRYHPAFNGVE

SEQ ID NO: 56642 - DNA, 525 bp, uncultured archaeon GZfos18H11
  CDS (1)..(522)
atggtaataaacattagaaaagaaacagaaaaggattacgaagacattaaatcagtaaatgacaaagcatttggccaagaaaacgaaggtaaaatagttgaaaatctcagaaaaaatgaaaaatatatttctgatttatatttggtcgctgaaatagataataaaattgttggccacattttattctttccaattaaaataagatcacaggaaaatgaatacgaaaccctttcacttgctccaatgtcggtcttgccaaattatcaaaaaatgggtattggatcaaaactaattgaatatggaatcaaagctgctaaaaaagctggatatggttctattatcgtagtgggacaccctgactattatccaagatttggctttgcacctgcaagtacttttggaataaaactaccttttgaagttcctgataacgcttttatggctttagaacttttacccaatagcctaaagggaaaacaagggacagttaaatatccaaaagaatacaatgacgatgattgatag

SEQ ID NO: 56643 - protein, 173 aa, uncultured archaeon GZfos18H11
MVINIRKETEKDYEDIKSVNDKAFGQENEGKIVENLRKNEKYISDLYLVAEIDNKIVGHILFFPIKIRSQENEYETLSLAPMSVLPNYQKMGIGSKLIEYGIKAAKKAGYGSIIVVGHPDYYPRFGFAPASTFGIKLPFEVPDNAFMALELLPNSLKGKQGTVKYPKEYNDDD

SEQ ID NO: 56644 - DNA, 546 bp, Escherichia coli
  CDS (1)..(546)
atgacagtacaccacttcacttttcatatcacagataaaagtgatgccagtgatatccgggaagtcgaaacccgcgcatttggcttcagcaaagaagccgatttagtggcctctttacttgaggatgaaagcgcgcgccccgcgttatcgctgctagcccggtatgaaggcaaagccgtcgggcatattttatttacccgggcaaccttcaaaggagaaatggattcaccgttgatgcacatcctcgctcccctggcggtcataccggaataccaagggatgggcgtgggaggacggttgatacgcactggcatcgagcacctgaggttgatgggctgccagacggtttttgttctcggccacgccacctattacccccgacatgggttcgaaccctgtgccggagacaaaggctatccggcaccttatcccatcccggaggagcacaaagcctgctggatgatgcaatcactcaccgctcagcccatgaccctgaccggccacatccggtgcgcagaccctgatgaaaccggagcactgacgtga

SEQ ID NO: 56645 - protein, 181 aa, Escherichia coli
MTVHHFTFHITDKSDASDIREVETRAFGFSKEADLVASLLEDESARPALSLLARYEGKAVGHILFTRATFKGEMDSPLMHILAPLAVIPEYQGMGVGGRLIRTGIEHLRLMGCQTVFVLGHATYYPRHGFEPCAGDKGYPAPYPIPEEHKACWMMQSLTAQPMTLTGHIRCADPDETGALT

SEQ ID NO: 56646 - DNA, 23 bp, Artificial sequence
  Primer sequence
atgctaattcgagtagaaattcc

SEQ ID NO: 56647 - DNA, 25 bp, Artificial sequence
  Primer sequence
ttaaaagcgattgaaatgctcgtga

SEQ ID NO: 56648 - protein, 195 aa, Artificial sequence
  Consensus
  Variant (2)..(2): Xaa in position 2 is any amino acid
  Variant (5)..(5): Xaa in position 5 is any amino acid
  Variant (7)..(9): Xaa in position 7 to 9 is any amino acid
  Variant (11)..(13): Xaa in position 11 to 13 is any amino acid
  Variant (15)..(16): Xaa in position 15 to 16 is any amino acid
  Variant (18)..(20): Xaa in position 18 to 20 is any amino acid
  Variant (23)..(25): Xaa in position 23 to 25 is any amino acid
  Variant (26)..(31): Xaa in position 26 to 31 is any or no amino acid
  Variant (33)..(34): Xaa in position 33 to 34 is any amino acid
  Variant (37)..(38): Xaa in position 37 to 38 is any amino acid
  Variant (41)..(47): Xaa in position 41 to 47 is any amino acid
  Variant (48)..(51): Xaa in position 48 to 51 is any or no amino acid
  Variant (53)..(58): Xaa in position 53 to 58 is any amino acid
  Variant (59)..(60): Xaa in position 59 to 60 is any or no amino acid
  Variant (66)..(67): Xaa in position 66 to 67 is any amino acid
  Variant (69)..(69): Xaa in position 69 is any amino acid
  Variant (71)..(71): Xaa in position 71 is any amino acid
  Variant (73)..(79): Xaa in position 73 to 79 is any amino acid
  Variant (80)..(85): Xaa in position 80 to 85 is any or no amino acid
  Variant (92)..(98): Xaa in position 92 to 98 is any amino acid
  Variant (102)..(103): Xaa in position 102 to 103 is any amino acid
  Variant (106)..(107): Xaa in position 106 to 107 is any amino acid
  Variant (110)..(114): Xaa in position 110 to 114 is any amino acid
  Variant (115)..(116): Xaa in position 115 to 116 is any or no amino acid
  Variant (118)..(121): Xaa in position 118 to 121 is any amino acid
  Variant (126)..(128): Xaa in position 126 to 128 is any amino acid
  Variant (131)..(131): Xaa in position 131 is any amino acid
  Variant (132)..(132): Xaa in position 132 is any or no amino acid
  Variant (137)..(143): Xaa in position 137 to 143 is any amino acid
  Variant (145)..(151): Xaa in position 145 to 151 is any amino acid
  Variant (152)..(157): Xaa in position 152 to 157 is any or no amino acid
  Variant (159)..(172): Xaa in position 159 to 172 is any amino acid
  Variant (173)..(190): Xaa in position 173 to 190 is any or no amino acid
  Variant (192)..(194): Xaa in position 192 to 194 is any amino acid
MXIRXEXXXDXXXIXXLXXXAFXXXXXXXXXEXXLVXXLRXXXXXXXXXXXLXXXXXXXXVVGHIXXSXVXIXXXXXXXXXXXXXLAPLAVXXXXXXXGIGXXLIXXGLXXXXXXXGXXXXVVLGXXXYYXXRFGFXXXXXXXLXXXXXXXXXXXXXFXXXXXXXXXXXXXXXXXXXXXXXXXXXXXXXXYXXXF

SEQ ID NO: 56649 - protein, 16 aa, Artificial sequence
  Consensus
  Variant (2)..(3): Xaa in position 2 to 3 is any or no amino acid
  Variant (6)..(11): Xaa in position 6 to 11 is any amino acid
  Variant (12)..(13): Xaa in position 12 to 13 is any or no amino acid
  Variant (15)..(15): Xaa in position 15 is any amino acid
  Variant (16)..(16): Xaa in position 16 is Ala, Gly, Ile, Leu or Val
LXXVAXXXXXXXXGXX

SEQ ID NO: 56650 - protein, 45 aa, Artificial sequence
  Consensus
  Variant (2)..(2): Xaa in position 2 is Ala or Gly
  Variant (3)..(3): Xaa in position 3 is Leu or Pro
  Variant (4)..(4): Xaa in position 4 is Ile, Leu, Met or Val
  Variant (5)..(5): Xaa in position 5 is Ala, Asp, Gly or Ser
  Variant (7)..(13): Xaa in position 7 to 13 is any amino acid
  Variant (15)..(15): Xaa in position 15 is any amino acid
  Variant (17)..(18): Xaa in position 17 to 18 is any amino acid
  Variant (19)..(19): Xaa in position 19 is any or no amino acid
  Variant (21)..(38): Xaa in position 21 to 38 is any amino acid
  Variant (39)..(39): Xaa in position 39 is any or no amino acid
  Variant (41)..(43): Xaa in position 41 to 43 is any amino acid
  Variant (44)..(45): Xaa in position 44 to 45 is Phe or Tyr
LXXXXVXXXXXXXGXGXXXLXXXXXXXXXXXXXXXXXXXGXXXXX

SEQ ID NO: 56651 - DNA, 1431 bp, Escherichia coli; identical to SEQ ID NO: 14875
  CDS (1)..(1431)

SEQ ID NO: 56652 - protein, 476 aa, Escherichia coli; identical to SEQ ID NO: 14876

SEQ ID NO: 56653 - DNA, 1638 bp, Fusobacterium nucleatum subsp. nucleatum ATCC 25586; identical to SEQ ID NO: 14877
  CDS (1)..(1638): transl_table=11

SEQ ID NO: 56654 - protein, 545 aa, Fusobacterium nucleatum subsp. nucleatum ATCC 25586; identical to SEQ ID NO: 14878

SEQ ID NO: 56655 - DNA, 1392 bp, Clostridium tetani E88; identical to SEQ ID NO: 14879
  CDS (1)..(1392): transl_table=11

SEQ ID NO: 56656 - protein, 463 aa, Clostridium tetani E88; identical to SEQ ID NO: 14880

SEQ ID NO: 56657 - DNA, 1380 bp, Bacteroides thetaiotaomicron VPI-5482; identical to SEQ ID NO: 14881
  CDS (1)..(1380): transl_table=11

SEQ ID NO: 56658 - protein, 459 aa, Bacteroides thetaiotaomicron VPI-5482; identical to SEQ ID NO: 14882

SEQ ID NO: 56659 - DNA, 1380 bp, Porphyromonas gingivalis W83; identical to SEQ ID NO: 14883
  CDS (1)..(1380): transl_table=11

SEQ ID NO: 56660 - protein, 459 aa, Porphyromonas gingivalis W83; identical to SEQ ID NO: 14884

SEQ ID NO: 56661 - DNA, 1449 bp, Rhodopseudomonas palustris CGA009; identical to SEQ ID NO: 14885
  CDS (1)..(1449): transl_table=11

SEQ ID NO: 56662 - protein, 482 aa, Rhodopseudomonas palustris CGA009; identical to SEQ ID NO: 14886

SEQ ID NO: 56663 - DNA, 1380 bp, Treponema denticola ATCC 35405; identical to SEQ ID NO: 14887
  CDS (1)..(1380): transl_table=11

SEQ ID NO: 56664 - protein, 459 aa, Treponema denticola ATCC 35405; identical to SEQ ID NO: 14888

SEQ ID NO: 56665 - DNA, 1380 bp, Treponema denticola ATCC 35405; identical to SEQ ID NO: 14889
  CDS (1)..(1380): transl_table=11

SEQ ID NO: 56666 - protein, 459 aa, Treponema denticola ATCC 35405; identical to SEQ ID NO: 14890

SEQ ID NO: 56667 - DNA, 1617 bp, Entamoeba histolytica HM-1:IMSS; identical to SEQ ID NO: 14891
  CDS (1)..(1617)

SEQ ID NO: 56668 - protein, 538 aa, Entamoeba histolytica HM-1:IMSS; identical to SEQ ID NO: 14892

SEQ ID NO: 56669 - DNA, 1389 bp, Desulfovibrio vulgaris subsp. vulgaris str. Hildenborough; identical to SEQ ID NO: 14893
  CDS (1)..(1389): transl_table=11

SEQ ID NO: 56670 - protein, 462 aa, Desulfovibrio vulgaris subsp. vulgaris str. Hildenborough; identical to SEQ ID NO: 14894

SEQ ID NO: 56671 - DNA, 1377 bp, Propionibacterium acnes KPA171202; identical to SEQ ID NO: 14895
  CDS (1)..(1377): transl_table=11

SEQ ID NO: 56672 - protein, 458 aa, Propionibacterium acnes KPA171202; identical to SEQ ID NO: 14896

SEQ ID NO: 56673 - DNA, 1365 bp, Symbiobacterium thermophilum IAM 14863; identical to SEQ ID NO: 14897
  CDS (1)..(1365): transl_table=11

SEQ ID NO: 56674 - protein, 454 aa, Symbiobacterium thermophilum IAM 14863; identical to SEQ ID NO: 14898

SEQ ID NO: 56675 - DNA, 1416 bp, Symbiobacterium thermophilum IAM 14863; identical to SEQ ID NO: 14899
  CDS (1)..(1416): transl_table=11

SEQ ID NO: 56676 - protein, 471 aa, Symbiobacterium thermophilum IAM 14863; identical to SEQ ID NO: 14900

SEQ ID NO: 56677 - DNA, 1443 bp, Photobacterium profundum SS9; identical to SEQ ID NO: 14901
  CDS (1)..(1443): transl_table=11

SEQ ID NO: 56678 - protein, 480 aa, Photobacterium profundum SS9; identical to SEQ ID NO: 14902

SEQ ID NO: 56679 - DNA, 1467 bp, Photobacterium profundum SS9; identical to SEQ ID NO: 14903
  CDS (1)..(1467): transl_table=11

SEQ ID NO: 56680 - protein, 488 aa, Photobacterium profundum SS9; identical to SEQ ID NO: 14904

SEQ ID NO: 56681 - DNA, 1401 bp, Photobacterium profundum SS9; identical to SEQ ID NO: 14905
  CDS (1)..(1401): transl_table=11

SEQ ID NO: 56682 - protein, 466 aa, Photobacterium profundum SS9; identical to SEQ ID NO: 14906

SEQ ID NO: 56683 - DNA, 1344 bp, Haloarcula marismortui ATCC 43049; identical to SEQ ID NO: 14907
  CDS (1)..(1344): transl_table=11

SEQ ID NO: 56684 - protein, 447 aa, Haloarcula marismortui ATCC 43049; identical to SEQ ID NO: 14908

SEQ ID NO: 56685 - DNA, 1449 bp, Azoarcus sp. EbN1; identical to SEQ ID NO: 14909
  CDS (1)..(1449): transl_table=11

SEQ ID NO: 56686 - protein, 482 aa, Azoarcus sp. EbN1; identical to SEQ ID NO: 14910

SEQ ID NO: 56687 - DNA, 1404 bp, Nostoc punctiforme PCC 73102; identical to SEQ ID NO: 14911
  CDS (1)..(1404)

SEQ ID NO: 56688 - protein, 467 aa, Nostoc punctiforme PCC 73102; identical to SEQ ID NO: 14912

SEQ ID NO: 56689 - DNA, 1416 bp, Haemophilus somnus 129PT; identical to SEQ ID NO: 14913
  CDS (1)..(1416)

SEQ ID NO: 56690 - protein, 471 aa, Haemophilus somnus 129PT; identical to SEQ ID NO: 14914

SEQ ID NO: 56691 - DNA, 1569 bp, Fusobacterium nucleatum subsp. vincentii ATCC 49256; identical to SEQ ID NO: 14915
  CDS (1)..(1569): transl_table=11

SEQ ID NO: 56692 - protein, 522 aa, Fusobacterium nucleatum subsp. vincentii ATCC 49256; identical to SEQ ID NO: 14916

SEQ ID NO: 56693 - DNA, 1383 bp, Fusobacterium nucleatum subsp. vincentii ATCC 49256; identical to SEQ ID NO: 14917
  CDS (1)..(1383): transl_table=11

SEQ ID NO: 56694 - protein, 460 aa, Fusobacterium nucleatum subsp. vincentii ATCC 49256; identical to SEQ ID NO: 14918

SEQ ID NO: 56695 - DNA, 1182 bp, Haemophilus influenzae 86-028NP; identical to SEQ ID NO: 14919
  CDS (1)..(1182)

SEQ ID NO: 56696 - protein, 393 aa, Haemophilus influenzae 86-028NP; identical to SEQ ID NO: 14920

SEQ ID NO: 56697 - DNA, 1347 bp, Solibacter usitatus Ellin6076; identical to SEQ ID NO: 14921
  CDS (1)..(1347): transl_table=11

SEQ ID NO: 56698 - protein, 448 aa, Solibacter usitatus Ellin6076; identical to SEQ ID NO: 14922

SEQ ID NO: 56699 - DNA, 1374 bp, Desulfitobacterium hafniense DCB-2; identical to SEQ ID NO: 14923
  CDS (1)..(1374): transl_table=11

SEQ ID NO: 56700 - protein, 457 aa, Desulfitobacterium hafniense DCB-2; identical to SEQ ID NO: 14924

SEQ ID NO: 56701 - DNA, 1389 bp, Desulfitobacterium hafniense DCB-2; identical to SEQ ID NO: 14925
  CDS (1)..(1389): transl_table=11

SEQ ID NO: 56702 - protein, 462 aa, Desulfitobacterium hafniense DCB-2; identical to SEQ ID NO: 14926

SEQ ID NO: 56703 - DNA, 1443 bp, uncultured bacterium; identical to SEQ ID NO: 14927
  CDS (1)..(1443)

SEQ ID NO: 56704 - protein, 480 aa, uncultured bacterium; identical to SEQ ID NO: 14928

SEQ ID NO: 56705 - DNA, 1365 bp, Symbiobacterium thermophilum; identical to SEQ ID NO: 14929
  CDS (1)..(1365)

SEQ ID NO: 56706 - protein, 454 aa, Symbiobacterium thermophilum; identical to SEQ ID NO: 14930

SEQ ID NO: 56707 - DNA, 1365 bp, Symbiobacterium thermophilum; identical to SEQ ID NO: 14897
  CDS (1)..(1365)

SEQ ID NO: 56708 - protein, 454 aa, Symbiobacterium thermophilum; identical to SEQ ID NO: 14898

SEQ ID NO: 56709 - DNA, 1386 bp, Chromobacterium violaceum; identical to SEQ ID NO: 14933
  CDS (1)..(1386): transl_table=11

SEQ ID NO: 56710 - protein, 461 aa, Chromobacterium violaceum; identical to SEQ ID NO: 14934

SEQ ID NO: 56711 - DNA, 1419 bp, Clostridium tetani; identical to SEQ ID NO: 14935
  CDS (1)..(1419): transl_table=11

SEQ ID NO: 56712 - protein, 472 aa, Clostridium tetani; identical to SEQ ID NO: 14936

SEQ ID NO: 56713 - DNA, 1389 bp, Enterobacter aerogenes; identical to SEQ ID NO: 14937
  CDS (1)..(1389): transl_table=11

SEQ ID NO: 56714 - protein, 462 aa, Enterobacter aerogenes; identical to SEQ ID NO: 14938

SEQ ID NO: 56715 - DNA, 1419 bp, Haemophilus influenzae; identical to SEQ ID NO: 14939
  CDS (1)..(1419): transl_table=11

SEQ ID NO: 56716 - protein, 472 aa, Haemophilus influenzae; identical to SEQ ID NO: 14940

SEQ ID NO: 56717 - DNA, 1347 bp, Halobacterium salinarium; identical to SEQ ID NO: 14941
  CDS (1)..(1347)

SEQ ID NO: 56718 - protein, 448 aa, Halobacterium salinarium; identical to SEQ ID NO: 14942

SEQ ID NO: 56719 - DNA, 1416 bp, Pasteurella multocida; identical to SEQ ID NO: 14943
  CDS (1)..(1416): transl_table=11

SEQ ID NO: 56720 - protein, 471 aa, Pasteurella multocida; identical to SEQ ID NO: 14944

SEQ ID NO: 56721 - DNA, 1401 bp, Photorhabdus luminescens; identical to SEQ ID NO: 14945
  CDS (1)..(1401): transl_table=11

SEQ ID NO: 56722 - protein, 466 aa, Photorhabdus luminescens; identical to SEQ ID NO: 14946

SEQ ID NO: 56723 - DNA, 1398 bp, Proteus inconstans; identical to SEQ ID NO: 14947
  CDS (1)..(1398): transl_table=11

SEQ ID NO: 56724 - protein, 465 aa, Proteus inconstans; identical to SEQ ID NO: 14948

SEQ ID NO: 56725 - DNA, 1404 bp, Proteus vulgaris; identical to SEQ ID NO: 14949
  CDS (1)..(1404): transl_table=11

SEQ ID NO: 56726 - protein, 467 aa, Proteus vulgaris; identical to SEQ ID NO: 14950

SEQ ID NO: 56727 - DNA, 1365 bp, Rhodobacter capsulatus; identical to SEQ ID NO: 14951
  CDS (1)..(1365): transl_table=11

SEQ ID NO: 56728 - protein, 454 aa, Rhodobacter capsulatus; identical to SEQ ID NO: 14952

SEQ ID NO: 56729 - DNA, 1389 bp, Thermoanaerobacter tengcongensis; identical to SEQ ID NO: 14953
  CDS (1)..(1389): transl_table=11

SEQ ID NO: 56730 - protein, 462 aa, Thermoanaerobacter tengcongensis; identical to SEQ ID NO: 14954

SEQ ID NO: 56731 - DNA, 1419 bp, Vibrio cholerae; identical to SEQ ID NO: 14955
  CDS (1)..(1419): transl_table=11

SEQ ID NO: 56732 - protein, 472 aa, Vibrio cholerae; identical to SEQ ID NO: 14956

SEQ ID NO: 56733 - DNA, 1401 bp, Vibrio parahaemolyticus; identical to SEQ ID NO: 14957
  CDS (1)..(1401): transl_table=11

SEQ ID NO: 56734 - protein, 466 aa, Vibrio parahaemolyticus; identical to SEQ ID NO: 14958

SEQ ID NO: 56735 - DNA, 1422 bp, Vibrio vulnificus; identical to SEQ ID NO: 14959
  CDS (1)..(1422): transl_table=11

SEQ ID NO: 56736 - protein, 473 aa, Vibrio vulnificus; identical to SEQ ID NO: 14960

SEQ ID NO: 56737 - DNA, 1371 bp, Citrobacter freundii; identical to SEQ ID NO: 14961
  CDS (1)..(1371): transl_table=11

SEQ ID NO: 56738 - protein, 456 aa, Citrobacter freundii; identical to SEQ ID NO: 14962

SEQ ID NO: 56739 - DNA, 1383 bp, Clostridium tetani; identical to SEQ ID NO: 14963
  CDS (1)..(1383)

SEQ ID NO: 56740 - protein, 460 aa, Clostridium tetani; identical to SEQ ID NO: 14964

SEQ ID NO: 56741 - DNA, 1371 bp, Enterobacter agglomerans; identical to SEQ ID NO: 14965
  CDS (1)..(1371): transl_table=11

SEQ ID NO: 56742 - protein, 456 aa, Enterobacter agglomerans; identical to SEQ ID NO: 14966

SEQ ID NO: 56743 - DNA, 1383 bp, Fusobacterium nucleatum; identical to SEQ ID NO: 14967
  CDS (1)..(1383): transl_table=11

SEQ ID NO: 56744 - protein, 460 aa, Fusobacterium nucleatum; identical to SEQ ID NO: 14968

SEQ ID NO: 56745 - DNA, 1377 bp, Pasteurella multocida; identical to SEQ ID NO: 14969
  CDS (1)..(1377): transl_table=11

SEQ ID NO: 56746 - protein, 458 aa, Pasteurella multocida; identical to SEQ ID NO: 14970

SEQ ID NO: 56747 - DNA, 1377 bp, Symbiobacterium sp; identical to SEQ ID NO: 14971
  CDS (1)..(1377): transl_table=11

SEQ ID NO: 56748 - protein, 458 aa, Symbiobacterium sp; identical to SEQ ID NO: 14972

SEQ ID NO: 56749 - DNA, 27 bp, Artificial sequence
  Primer sequence
atgaaggattatgtaatggaaaacttt

SEQ ID NO: 56750 - DNA, 26 bp, Artificial sequence
  Primer sequence
ttaaacttctttaagttttgcggtga

SEQ ID NO: 56751 - protein, 533 aa, Artificial sequence; identical to SEQ ID NO: 14975
  Consensus
  Variant (2)..(2): Xaa in position 2 is any amino acid
  Variant (7)..(7): Xaa in position 7 is any amino acid
  Variant (10)..(10): Xaa in position 10 is any amino acid
  Variant (12)..(18): Xaa in position 12 to 18 is any amino acid
  Variant (20)..(22): Xaa in position 20 to 22 is any amino acid
  Variant (24)..(25): Xaa in position 24 to 25 is any amino acid
  Variant (27)..(28): Xaa in position 27 to 28 is any amino acid
  Variant (30)..(30): Xaa in position 30 is any amino acid
  Variant (32)..(32): Xaa in position 32 is any amino acid
  Variant (34)..(34): Xaa in position 34 is any amino acid
  Variant (36)..(37): Xaa in position 36 to 37 is any amino acid
  Variant (49)..(49): Xaa in position 49 is any amino acid
  Variant (53)..(54): Xaa in position 53 to 54 is any amino acid
  Variant (56)..(56): Xaa in position 56 is any or no amino acid
  Variant (61)..(61): Xaa in position 61 is any amino acid
  Variant (70)..(71): Xaa in position 70 to 71 is any amino acid
  Variant (73)..(74): Xaa in position 73 to 74 is any amino acid
  Variant (76)..(78): Xaa in position 76 to 78 is any amino acid
  Variant (80)..(80): Xaa in position 80 is any amino acid
  Variant (83)..(83): Xaa in position 83 is any amino acid
  Variant (86)..(88): Xaa in position 86 to 88 is any amino acid
  Variant (89)..(134): Xaa in position 89 to 134 is any or no amino acid
  Variant (137)..(137): Xaa in position 137 is any amino acid
  Variant (145)..(145): Xaa in position 145 is any amino acid
  Variant (147)..(150): Xaa in position 147 to 150 is any amino acid
  Variant (153)..(160): Xaa in position 153 to 160 is any amino acid
  Variant (161)..(170): Xaa in position 161 to 170 is any or no amino acid
  Variant (172)..(173): Xaa in position 172 to 173 is any amino acid
  Variant (175)..(175): Xaa in position 175 is any amino acid
  Variant (178)..(179): Xaa in position 178 to 179 is any amino acid
  Variant (181)..(184): Xaa in position 181 to 184 is any amino acid
  Variant (187)..(190): Xaa in position 187 to 190 is any amino acid
  Variant (192)..(195): Xaa in position 192 to 195 is any amino acid
  Variant (197)..(202): Xaa in position 197 to 202 is any amino acid
  Variant (203)..(210): Xaa in position 203 to 210 is any or no amino acid
  Variant (214)..(215): Xaa in position 214 to 215 is any amino acid
  Variant (218)..(218): Xaa in position 218 is any amino acid
  Variant (221)..(223): Xaa in position 221 to 223 is any amino acid
  Variant (225)..(227): Xaa in position 225 to 227 is any amino acid
  Variant (229)..(230): Xaa in position 229 to 230 is any amino acid
  Variant (231)..(231): Xaa in position 231 is any or no amino acid
  Variant (233)..(234): Xaa in position 233 to 234 is any amino acid
  Variant (236)..(238): Xaa in position 236 to 238 is any amino acid
  Variant (241)..(241): Xaa in position 241 is any amino acid
  Variant (243)..(244): Xaa in position 243 to 244 is any amino acid
  Variant (252)..(252): Xaa in position 252 is any amino acid
  Variant (256)..(259): Xaa in position 256 to 259 is any amino acid
  Variant (261)..(263): Xaa in position 261 to 263 is any amino acid
  Variant (265)..(265): Xaa in position 265 is any amino acid
  Variant (267)..(267): Xaa in position 267 is any amino acid
  Variant (269)..(270): Xaa in position 269 to 270 is any amino acid
  Variant (273)..(273): Xaa in position 273 is any amino acid
  Variant (275)..(276): Xaa in position 275 to 276 is any amino acid
  Variant (283)..(285): Xaa in position 283 to 285 is any amino acid
  Variant (287)..(288): Xaa in position 287 to 288 is any amino acid
  Variant (290)..(292): Xaa in position 290 to 292 is any amino acid
  Variant (295)..(296): Xaa in position 295 to 296 is any amino acid
  Variant (298)..(299): Xaa in position 298 to 299 is any amino acid
  Variant (301)..(301): Xaa in position 301 is any amino acid
  Variant (303)..(303): Xaa in position 303 is any amino acid
  Variant (307)..(309): Xaa in position 307 to 309 is any amino acid
  Variant (316)..(316): Xaa in position 316 is any amino acid
  Variant (323)..(323): Xaa in position 323 is any amino acid
  Variant (325)..(327): Xaa in position 325 to 327 is any amino acid
  Variant (329)..(330): Xaa in position 329 to 330 is any amino acid
  Variant (331)..(348): Xaa in position 331 to 348 is any or no amino acid
  Variant (351)..(357): Xaa in position 351 to 357 is any amino acid
  Variant (359)..(360): Xaa in position 359 to 360 is any amino acid
  Variant (363)..(364): Xaa in position 363 to 364 is any amino acid
  Variant (370)..(370): Xaa in position 370 is any amino acid
  Variant (375)..(375): Xaa in position 375 is any amino acid
  Variant (379)..(379): Xaa in position 379 is any amino acid
  Variant (382)..(382): Xaa in position 382 is any amino acid
  Variant (384)..(388): Xaa in position 384 to 388 is any amino acid
  Variant (391)..(392): Xaa in position 391 to 392 is any amino acid
  Variant (395)..(395): Xaa in position 395 is any amino acid
  Variant (398)..(398): Xaa in position 398 is any amino acid
  Variant (401)..(403): Xaa in position 401 to 403 is any amino acid
  Variant (405)..(407): Xaa in position 405 to 407 is any amino acid
  Variant (410)..(413): Xaa in position 410 to 413 is any amino acid
  Variant (414)..(414): Xaa in position 414 is any or no amino acid
  Variant (416)..(416): Xaa in position 416 is any or no amino acid
  Variant (421)..(421): Xaa in position 421 is any amino acid
  Variant (426)..(429): Xaa in position 426 to 429 is any amino acid
  Variant (431)..(433): Xaa in position 431 to 433 is any or no amino acid
  Variant (436)..(439): Xaa in position 436 to 439 is any amino acid
  Variant (443)..(444): Xaa in position 443 to 444 is any amino acid
  Variant (446)..(448): Xaa in position 446 to 448 is any amino acid
  Variant (451)..(453): Xaa in position 451 to 453 is any amino acid
  Variant (457)..(458): Xaa in position 457 to 458 is any amino acid
  Variant (460)..(460): Xaa in position 460 is any amino acid
  Variant (462)..(467): Xaa in position 462 to 467 is any amino acid
  Variant (468)..(470): Xaa in position 468 to 470 is any or no amino acid
  Variant (472)..(479): Xaa in position 472 to 479 is any or no amino acid
  Variant (481)..(482): Xaa in position 481 to 482 is any amino acid
  Variant (485)..(485): Xaa in position 485 is any amino acid
  Variant (489)..(490): Xaa in position 489 to 490 is any amino acid
  Variant (493)..(494): Xaa in position 493 to 494 is any amino acid
  Variant (498)..(498): Xaa in position 498 is any amino acid
  Variant (500)..(505): Xaa in position 500 to 505 is any amino acid
  Variant (507)..(512): Xaa in position 507 to 512 is any amino acid
  Variant (514)..(514): Xaa in position 514 is any amino acid
  Variant (515)..(515): Xaa in position 515 is any or no amino acid
  Variant (518)..(521): Xaa in position 518 to 521 is any amino acid
  Variant (524)..(525): Xaa in position 524 to 525 is any amino acid
  Variant (526)..(527): Xaa in position 526 to 527 is any or no amino acid
  Variant (530)..(530): Xaa in position 530 is any amino acid
  Variant (532)..(532): Xaa in position 532 is any amino acid

SEQ ID NO: 56752 - protein, 85 aa, Artificial sequence; identical to SEQ ID NO: 14976
  Consensus
  Variant (2)..(2): Xaa in position 2 is Pro or Ser
  Variant (3)..(4): Xaa in position 3 to 4 is any amino acid
  Variant (5)..(5): Xaa in position 5 is Ile, Leu or Met
  Variant (6)..(8): Xaa in position 6 to 8 is any amino acid
  Variant (10)..(10): Xaa in position 10 is any amino acid
  Variant (11)..(18): Xaa in position 11 to 18 is any or no amino acid
  Variant (20)..(25): Xaa in position 20 to 25 is any amino acid
  Variant (26)..(26): Xaa in position 26 is Ala, Ser or Val
  Variant (27)..(28): Xaa in position 27 to 28 is any amino acid
  Variant (30)..(30): Xaa in position 30 is any amino acid
  Variant (32)..(32): Xaa in position 32 is any amino acid
  Variant (33)..(33): Xaa in position 33 is Ile or Leu
  Variant (34)..(34): Xaa in position 34 is any amino acid
  Variant (35)..(35): Xaa in position 35 is Ala, Gly or Ser
  Variant (36)..(39): Xaa in position 36 to 39 is any amino acid
  Variant (49)..(49): Xaa in position 49 is Ala, Gly, Asn, Ser or Thr
  Variant (51)..(51): Xaa in position 51 is Ile, Met or Val
  Variant (52)..(52): Xaa in position 52 is Ser or Thr
  Variant (53)..(53): Xaa in position 53 is Asp, Asn, Gln or Ser
  Variant (54)..(56): Xaa in position 54 to 56 is any amino acid
  Variant (57)..(57): Xaa in position 57 is Ala, Gly or Ser
  Variant (58)..(58): Xaa in position 58 is Ala or Gly
  Variant (59)..(59): Xaa in position 59 is Ile, Leu, Met or Val
  Variant (60)..(60): Xaa in position 60 is Phe, Ile, Leu or Met
  Variant (61)..(61): Xaa in position 61 is any amino acid
  Variant (65)..(65): Xaa in position 65 is Ala or Ser
  Variant (67)..(67): Xaa in position 67 is Ala or Ser
  Variant (69)..(69): Xaa in position 69 is Ala, Gly or Ser
  Variant (70)..(70): Xaa in position 70 is any amino acid
  Variant (71)..(71): Xaa in position 71 is Asn or Ser
  Variant (72)..(72): Xaa in position 72 is Phe, Trp or Tyr
  Variant (73)..(74): Xaa in position 73 to 74 is any amino acid
  Variant (75)..(75): Xaa in position 75 is Phe, Leu or Met
  Variant (76)..(78): Xaa in position 76 to 78 is any amino acid
  Variant (79)..(79): Xaa in position 79 is Ala, Gly, Ile or Val
  Variant (80)..(83): Xaa in position 80 to 83 is any amino acid
  Variant (84)..(84): Xaa in position 84 is Asp, Gly, Asn or Pro
  Variant (85)..(85): Xaa in position 85 is Phe or Tyr

SEQ ID NO: 56753 - protein, 41 aa, Artificial sequence; identical to SEQ ID NO: 14977
  Consensus
  Variant (2)..(2): Xaa in position 2 is Ala or Thr
  Variant (7)..(7): Xaa in position 7 is Ala or Gly
  Variant (10)..(10): Xaa in position 10 is any amino acid
  Variant (11)..(15): Xaa in position 11 to 15 is any or no amino acid
  Variant (17)..(40): Xaa in position 17 to 40 is any amino acid
  Variant (41)..(41): Xaa in position 41 is Ala, Glu, Gly, Gln or Thr

SEQ ID NO: 56754 - protein, 100 aa, Artificial sequence; identical to SEQ ID NO: 14978
  Consensus
  Variant (2)..(13): Xaa in position 2 to 13 is any amino acid
  Variant (14)..(17): Xaa in position 14 to 17 is any or no amino acid
  Variant (19)..(19): Xaa in position 19 is Cys, Asn, Ser or Val
  Variant (21)..(22): Xaa in position 21 to 22 is any amino acid
  Variant (27)..(27): Xaa in position 27 is Ile or Val
  Variant (29)..(29): Xaa in position 29 is Ile, Leu or Met
  Variant (30)..(30): Xaa in position 30 is any amino acid
  Variant (32)..(32): Xaa in position 32 is Ile, Leu or Met
  Variant (33)..(33): Xaa in position 33 is any amino acid
  Variant (34)..(34): Xaa in position 34 is Ala, Asp, Glu, Gly or Ser
  Variant (35)..(37): Xaa in position 35 to 37 is any amino acid
  Variant (38)..(38): Xaa in position 38 is Ile, Leu, Met or Val
  Variant (39)..(39): Xaa in position 39 is Ala, Cys or Thr
  Variant (40)..(43): Xaa in position 40 to 43 is any amino acid
  Variant (44)..(44): Xaa in position 44 is Ile or Val
  Variant (45)..(45): Xaa in position 45 is any amino acid
  Variant (46)..(46): Xaa in position 46 is Phe, Ile, Leu, Met or Val
  Variant (47)..(48): Xaa in position 47 to 48 is any amino acid
  Variant (50)..(50): Xaa in position 50 is Ala, Ser or Val
  Variant (51)..(51): Xaa in position 51 is Ala, Cys or Thr
  Variant (53)..(53): Xaa in position 53 is any amino acid
  Variant (54)..(54): Xaa in position 54 is Ala, Cys, Ser or Val
  Variant (57)..(57): Xaa in position 57 is Ala or Cys
  Variant (58)..(58): Xaa in position 58 is His, Trp or Tyr
  Variant (60)..(60): Xaa in position 60 is Ile or Val
  Variant (61)..(62): Xaa in position 61 to 62 is any amino acid
  Variant (63)..(63): Xaa in position 63 is Asp, Gln or Arg
  Variant (64)..(64): Xaa in position 64 is Asp or Glu
  Variant (65)..(68): Xaa in position 65 to 68 is any amino acid
  Variant (69)..(69): Xaa in position 69 is Asp, Glu, Gly, Asn or Ser
  Variant (70)..(71): Xaa in position 70 to 71 is any amino acid
  Variant (72)..(72): Xaa in position 72 is Ile, Leu, Pro or Val
  Variant (73)..(73): Xaa in position 73 is any amino acid
  Variant (74)..(74): Xaa in position 74 is Asp, Glu, Gln, Ser or Thr
  Variant (75)..(75): Xaa in position 75 is Ile or Val
  Variant (76)..(77): Xaa in position 76 to 77 is any amino acid
  Variant (78)..(78): Xaa in position 78 is Asp, Glu or Lys
  Variant (79)..(83): Xaa in position 79 to 83 is any amino acid
  Variant (84)..(84): Xaa in position 84 is Asp or Glu
  Variant (85)..(88): Xaa in position 85 to 88 is any amino acid
  Variant (90)..(90): Xaa in position 90 is Ala, Gly or Ser
  Variant (94)..(94): Xaa in position 94 is Ala, Cys, Gly, Pro or Thr
  Variant (95)..(95): Xaa in position 95 is Phe, Ile, Leu or Met
  Variant (96)..(96): Xaa in position 96 is Ala, Leu or Val
  Variant (97)..(97): Xaa in position 97 is Asn, Pro or Gln
  Variant (98)..(98): Xaa in position 98 is Ile or Met

SEQ ID NO: 56755 - protein, 84 aa, Artificial sequence; identical to SEQ ID NO: 14979
  Consensus
  Variant (2)..(4): Xaa in position 2 to 4 is any amino acid
  Variant (8)..(8): Xaa in position 8 is Leu or Met
  Variant (9)..(9): Xaa in position 9 is Ala, Glu, Asn, Ser or Thr
  Variant (11)..(11): Xaa in position 11 is any amino acid
  Variant (12)..(12): Xaa in position 12 is Ala or Asp
  Variant (13)..(13): Xaa in position 13 is Ile, Leu or Met
  Variant (14)..(16): Xaa in position 14 to 16 is any amino acid
  Variant (18)..(18): Xaa in position 18 is any amino acid
  Variant (20)..(20): Xaa in position 20 is Phe, Ile or Leu
  Variant (21)..(31): Xaa in position 21 to 31 is any amino acid
  Variant (33)..(33): Xaa in position 33 is Ile or Val
  Variant (34)..(34): Xaa in position 34 is any amino acid
  Variant (36)..(39): Xaa in position 36 to 39 is any amino acid
  Variant (40)..(40): Xaa in position 40 is Ala, Gly, Asn or Val
  Variant (41)..(42): Xaa in position 41 to 42 is any amino acid
  Variant (44)..(46): Xaa in position 44 to 46 is any amino acid
  Variant (47)..(47): Xaa in position 47 is Asp, Glu, Gly or Asn
  Variant (48)..(48): Xaa in position 48 is Ile or Val
  Variant (49)..(49): Xaa in position 49 is Ala, Ile, Leu, Pro or Val
  Variant (50)..(52): Xaa in position 50 to 52 is any amino acid
  Variant (53)..(53): Xaa in position 53 is Ala or Pro
  Variant (54)..(54): Xaa in position 54 is any amino acid
  Variant (56)..(56): Xaa in position 56 is any or no amino acid
  Variant (58)..(58): Xaa in position 58 is Ala, Gly or Thr
  Variant (59)..(60): Xaa in position 59 to 60 is any amino acid
  Variant (61)..(61): Xaa in position 61 is Ile, Leu or Val
  Variant (62)..(62): Xaa in position 62 is Asp or Glu
  Variant (63)..(63): Xaa in position 63 is Ala, Gly or Thr
  Variant (64)..(67): Xaa in position 64 to 67 is any amino acid
  Variant (68)..(68): Xaa in position 68 is Glu, Asn, Pro or Thr
  Variant (69)..(75): Xaa in position 69 to 75 is any amino acid
  Variant (76)..(76): Xaa in position 76 is Gly, Ile or Pro
  Variant (77)..(77): Xaa in position 77 is Ala, Asp, Gly or Ser
  Variant (78)..(80): Xaa in position 78 to 80 is any amino acid
  Variant (81)..(81): Xaa in position 81 is Ala, Cys, Gly, Asn, Ser, Thr or Val
  Variant (82)..(83): Xaa in position 82 to 83 is any amino acid
  Variant (84)..(84): Xaa in position 84 is Ile, Leu or Val

SEQ ID NO: 56756 - DNA, 1251 bp, Saccharomyces cerevisiae
  CDS (1)..(1251)
atgtctttatcttcaaagttgtctgtccaagatttggacttgaaggacaagcgtgtcttcatcagagttgacttcaacgtcccattggacggtaagaagatcacttctaaccaaagaattgttgctgctttgccaaccatcaagtacgttttggaacaccacccaagatacgttgtcttggcttctcacttgggtagaccaaacggtgaaagaaacgaaaaatactctttggctccagttgctaaggaattgcaatcattgttgggtaaggatgtcaccttcttgaacgactgtgtgcgtccagaagttgaagccgctgtcaaggcttctgccccaggttccgttattttgttggaaaacttgcgttaccacatcgaagaagaaggttccagaaaggtcgatggtcaaaaggtcaaggcttccaaggaagatgttcaaaagttcagacacgaattgagctctttggctgatgtttacatcaacgatgccttcggtaccgctcacagagctcactcttctatggtcggtttcgacttgccacaacgtgctgccggtttcttgttggaaaaggaattgaagtacttcggtaaggctttggagaacccaaccagaccattcttggccatcttaggtggtgccaaggttgctgacaagattcaattgattgacaacttgttggacaaggtcgactctatcatcattggtggtggtatggctttcaccttcaagaaggttttggaaaacactgaaatcggtgactccatcttcgacaaggctggtgctgaaatcgttccaaagttgatggaaaaggccaaggccaagggtgtcgaagtcgtcttgccagtcgacttcatcattgctgatgctttctctgctgatgccaacaccaagactgtcactgacaaggaaggtattccagctggctggcaagggttggacaatggtccagaatctagaaagttgtttgctgctactgttgcaaaggctaagaccattgtctggaacggtccaccaggtgttttcgaattcgaaaagttcgctgctggtactaaggctttgttagacgaagttgtcaagagctctgctgctggtaacaccgtcatcattggtggtggtgacactgccactgtcgctaagaagtacggtgtcactgacaagatctcccatgtctctactggtggtggtgcttctttggaattattggaaggtaaggaattgccaggtgttgctttcttatccgaaaagaaataa

SEQ ID NO: 56757 - protein, 416 aa, Saccharomyces cerevisiae
MSLSSKLSVQDLDLKDKRVFIRVDFNVPLDGKKITSNQRIVAALPTIKYVLEHHPRYVVLASHLGRPNGERNEKYSLAPVAKELQSLLGKDVTFLNDCVRPEVEAAVKASAPGSVILLENLRYHIEEEGSRKVDGQKVKASKEDVQKFRHELSSLADVYINDAFGTAHRAHSSMVGFDLPQRAAGFLLEKELKYFGKALENPTRPFLAILGGAKVADKIQLIDNLLDKVDSIIIGGGMAFTFKKVLENTEIGDSIFDKAGAEIVPKLMEKAKAKGVEVVLPVDFIIADAFSADANTKTVTDKEGIPAGWQGLDNGPESRKLFAATVAKAKTIVWNGPPGVFEFEKFAAGTKALLDEVVKSSAAGNTVIIGGGDTATVAKKYGVTDKISHVSTGGGASLELLEGKELPGVAFLSEKK

SEQ ID NO: 56758 - DNA, 1179 bp, Francisella tularensis subsp. tularensis
  CDS (1)..(1179)
atgagttttctaacattgaaagatgttgatttaaaagataaaaaagtcttggttcgtgttgacttcaacgtacctgttaaagatggtaaggtaacaagtaaagttagaattgaagcggctattccgactattcaatatattctagatcaaggtggagctgtgattctgatgtcacaccttggtcgtcctacagagggtgagtatgattctcagttctctctagagcctgttgctaaagctttatctgaaattatcaataagccggttaagtttgctaaagactggttagatggtgttgatgttaaagctggtgaaattgtcatgtgtgaaaatgtccgctttaatagtggtgagaaaaaatcaacagatgatttatctaaaaagattgcaagcttaggtgatgtgtttgttatggacgcttttgctacagcgcatagagctcaagcttcgacctacggtgtggctaaatatattcctgtagcatgtgcagggatattgttaactaatgaaattcaagcattagaaaaagctttaaaatcgccaaaaaaaccaatggcagcaatagttggagggtctaaggtctctactaaactatcggtgctaaataaccttcttgataaggttgaaattcttattgttggtggtggtattgctaatactttcataaaagcagaaggttttgatgttggtaattcattgtatgaacaagatcttgtcgctgaagcaacagagattttagctaaagctaaggctttaggggttaatattcctgtgccagttgatgtaagagttgctaaagagtttagcgaaaatgcccaagcaatcattaaaaaggtttccgatgttgttgcggatgagatgattctagatataggtccagaatctcaaaagataattgctgagctgttaaaatcagcaaatactatcttatggaatggacctgttggagtatttgagtttgataactttgcagagggtacaaaagctttatctttagctatagcacaatcgcacgctttttcagtagctggtggtggtgatactattgctgcgatagaaaaatttggcattaaagaccaagtttcttatatatcaacagctggtggagcattcttagagtttcttgaaggcaagaaattaccagctatagagatacttaaagaaaaagcaatcaggtag

SEQ ID NO: 56759 - protein, 392 aa, Francisella tularensis subsp. tularensis
MSFLTLKDVDLKDKKVLVRVDFNVPVKDGKVTSKVRIEAAIPTIQYILDQGGAVILMSHLGRPTEGEYDSQFSLEPVAKALSEIINKPVKFAKDWLDGVDVKAGEIVMCENVRFNSGEKKSTDDLSKKIASLGDVFVMDAFATAHRAQASTYGVAKYIPVACAGILLTNEIQALEKALKSPKKPMAAIVGGSKVSTKLSVLNNLLDKVEILIVGGGIANTFIKAEGFDVGNSLYEQDLVAEATEILAKAKALGVNIPVPVDVRVAKEFSENAQAIIKKVSDVVADEMILDIGPESQKIIAELLKSANTILWNGPVGVFEFDNFAEGTKALSLAIAQSHAFSVAGGGDTIAAIEKFGIKDQVSYISTAGGAFLEFLEGKKLPAIEILKEKAIR

SEQ ID NO: 56760 - DNA, 1254 bp, Homo sapiens
  CDS (1)..(1254)
atgtcgctttctaacaagctgacgctggacaagctggacgttaaagggaagcgggtcgttatgagagtcgacttcaatgttcctatgaagaacaaccagataacaaacaaccagaggattaaggctgctgtcccaagcatcaaattctgcttggacaatggagccaagtcggtagtccttatgagccacctaggccggcctgatggtgtgcccatgcctgacaagtactccttagagccagttgctgtagaactcaaatctctgctgggcaaggatgttctgttcttgaaggactgtgtaggcccagaagtggagaaagcctgtgccaacccagctgctgggtctgtcatcctgctggagaacctccgctttcatgtggaggaagaagggaagggaaaagatgcttctgggaacaaggttaaagccgagccagccaaaatagaagctttccgagcttcactttccaagctaggggatgtctatgtcaatgatgcttttggcactgctcacagagcccacagctccatggtaggagtcaatctgccacagaaggctggtgggtttttgatgaagaaggagctgaactactttgcaaaggccttggagagcccagagcgacccttcctggccatcctgggcggagctaaagttgcagacaagatccagctcatcaataatatgctggacaaagtcaatgagatgattattggtggtggaatggcttttaccttccttaaggtgctcaacaacatggagattggcacttctctgtttgatgaagagggagccaagattgtcaaagacctaatgtccaaagctgagaagaatggtgtgaagattaccttgcctgttgactttgtcactgctgacaagtttgatgagaatgccaagactggccaagccactgtggcttctggcatacctgctggctggatgggcttggactgtggtcctgaaagcagcaagaagtatgctgaggctgtcactcgggctaagcagattgtgtggaatggtcctgtgggggtatttgaatgggaagcttttgcccggggaaccaaagctctcatggatgaggtggtgaaagccacttctaggggctgcatcaccatcataggtggtggagacactgccacttgctgtgccaaatggaacacggaggataaagtcagccatgtgagcactgggggtggtgccagtttggagctcctggaaggtaaagtccttcctggggtggatgctctcagcaatatttag

SEQ ID NO: 56761 - protein, 417 aa, Homo sapiens
MSLSNKLTLDKLDVKGKRVVMRVDFNVPMKNNQITNNQRIKAAVPSIKFCLDNGAKSVVLMSHLGRPDGVPMPDKYSLEPVAVELKSLLGKDVLFLKDCVGPEVEKACANPAAGSVILLENLRFHVEEEGKGKDASGNKVKAEPAKIEAFRASLSKLGDVYVNDAFGTAHRAHSSMVGVNLPQKAGGFLMKKELNYFAKALESPERPFLAILGGAKVADKIQLINNMLDKVNEMIIGGGMAFTFLKVLNNMEIGTSLFDEEGAKIVKDLMSKAEKNGVKITLPVDFVTADKFDENAKTGQATVASGIPAGWMGLDCGPESSKKYAEAVTRAKQIVWNGPVGVFEWEAFARGTKALMDEVVKATSRGCITIIGGGDTATCCAKWNTEDKVSHVSTGGGASLELLEGKVLPGVDALSNI

SEQ ID NO: 56762 - DNA, 1254 bp, Mus musculus
  CDS (1)..(1254)
atgtcgctttccaacaagctgactttggacaagctggacgtgaaggggaagcgggtcgtgatgagggtggacttcaacgttcctatgaagaacaaccagataacaaacaaccaaaggatcaaggctgctgttccaagcatcaaattctgcttggacaatggagccaactccgttgtccttatgagccacctgggccggcctgatggtgttcccatgcctgacaagtactccttagagccagttgctgctgaactcaaatctctgctgggcaaggatgttctgttcttgaaggattgtgtgggcccagaagtcgagaatgcctgtgccaacccagcggctgggactgtcatcctgctggaaaacctccgctttcatgtagaggaagaagggaagggaaaagatgcttctgggaacaaggttaaagctgagccggccaaaattgatgctttccgagcctcactgtccaaactaggagatgtctatgtcaatgatgcttttgggactgcacaccgagcccatagctccatggtgggtgtgaatctgccacagaaggctggtggatttttgatgaagaaggagctgaactactttgccaaggctttggagagtcctgagcgacccttcctggctatcttgggaggcgctaaagttgcagacaagatccagctgatcaataatatgctagacaaagtcaatgagatgatcattggtggtggaatggcctttaccttccttaaggtcctcaacaacatggagattggcacatctctgtatgatgaagaaggagccaagattgtcaaagatctcatgtccaaagctgagaaaaatggtgtgaagattaccttgcctgttgactttgtcactgctgacaaatttgatgagaatgccaagactggccaagctactgtggcctctggtatacctgctggctggatgggcttggactgtggtactgagagcagcaagaaatatgccgaggctgtgggtcgagctaagcagattgtttggaatggtcctgttggggtatttgaatgggaagcctttgccaggggaaccaagtcactcatggatgaggtggtgaaagccacttctaggggttgcatcactatcataggtggtggagacactgccacttgctgtgccaaatggaacacagaggataaagtcagccatgtgagcactgggggcggtgccagtctagagctcctggaaggtaaagtccttcctggggtggatgctctcagcaatgtttag

SEQ ID NO: 56763 - protein, 417 aa, Mus musculus
MSLSNKLTLDKLDVKGKRVVMRVDFNVPMKNNQITNNQRIKAAVPSIKFCLDNGANSVVLMSHLGRPDGVPMPDKYSLEPVAAELKSLLGKDVLFLKDCVGPEVENACANPAAGTVILLENLRFHVEEEGKGKDASGNKVKAEPAKIDAFRASLSKLGDVYVNDAFGTAHRAHSSMVGVNLPQKAGGFLMKKELNYFAKALESPERPFLAILGGAKVADKIQLINNMLDKVNEMIIGGGMAFTFLKVLNNMEIGTSLYDEEGAKIVKDLMSKAEKNGVKITLPVDFVTADKFDENAKTGQATVASGIPAGWMGLDCGTESSKKYAEAVGRAKQIVWNGPVGVFEWEAFARGTKSLMDEVVKATSRGCITIIGGGDTATCCAKWNTEDKVSHVSTGGGASLELLEGKVLPGVDALSNV

SEQ ID NO: 56764 - DNA, 1212 bp, Neisseria meningitidis MC58
  CDS (1)..(1212): transl_table=11
atggcatttttaaaactgaccgaacaaaacgtgcagggcaaaaccgtcctcatccgcgccgatatgaacgtaccgttcaaagacggcaaaatcagcgacgacacccgtatccgcgcctcgctcgcgtccattaaatactgcgtggacaacggtgcgtccgttatcgtgatgacccatctcggccgcccgaccgaaggcgagttccaccccgaagacgatgtcgcccccgttgccgcgcacttgggcagcctgttgggcaaagacgtgaaagtattgaacgactggcgtgaaaacaaacccgccctgaacgcgggcgatgtcgtcatgctgcaaaacgtgcgcatcaacaaaggcgagaagaaaaacgatttggaactgggtaaagcctacgcttctttgtgcgacgtgttcgtcaatgacgcgttcggaaccgcccaccgcgcccaagcctcgaccgaagccgtcgcccaagccgcgcccgttgcctgcgccggcgtattgatggcgggcgaactcgacgctttgggcaaagccttgaaacagcccgcgcgcccgatggttgccatcgttgccggcagcaaagtgtccaccaagctgaccatcctcgaatcgctggcggacaaagtcgaccaactcatcgtcggcggcggtatcgcaaacaccttcctgttggcggaaggcaaagccatcggcaaatctttggcggaacacgatttggtggaagaatccaaaaaaattatggcgaaaatggcggcaaaaggcggttctgtgccgctgccgaccgatgtcgtcgttgccaaagcctttgccgccgatgcggaagctgtggtgaaagacattgccgccgatgcggaagctgtggtgaaagacattgccgacgttgccgaagacgagatgattttggacatcggtccgaaatccgctgccgcgcttgccgatttgcttaaagccgccggtacggtcgtttggaacgggccggtcggcgtgttcgagtttgaccaattcgcaggcggtacgaaagcccttgccgaagccattgcccaaagcaaagcgttctcgattgcgggcggcggcgacacgctggcggcgattgccaaattcggcgttaccgaacaaatcggctacatctccaccggcggcggcgcgttccttgagttcttggaaggcaaagagctgcctgccgtagccgctttggaaaaacgcggcgcgtaa

SEQ ID NO: 56765 - protein, 403 aa, Neisseria meningitidis MC58
MAFLKLTEQNVQGKTVLIRADMNVPFKDGKISDDTRIRASLASIKYCVDNGASVIVMTHLGRPTEGEFHPEDDVAPVAAHLGSLLGKDVKVLNDWRENKPALNAGDVVMLQNVRINKGEKKNDLELGKAYASLCDVFVNDAFGTAHRAQASTEAVAQAAPVACAGVLMAGELDALGKALKQPARPMVAIVAGSKVSTKLTILESLADKVDQLIVGGGIANTFLLAEGKAIGKSLAEHDLVEESKKIMAKMAAKGGSVPLPTDVVVAKAFAADAEAVVKDIAADAEAVVKDIADVAEDEMILDIGPKSAAALADLLKAAGTVVWNGPVGVFEFDQFAGGTKALAEAIAQSKAFSIAGGGDTLAAIAKFGVTEQIGYISTGGGAFLEFLEGKELPAVAALEKRGA

SEQ ID NO: 56766 - DNA, 1248 bp, Sulfolobus solfataricus P2
  CDS (1)..(1248): transl_table=11
gtggggatctttctgattaaagtgggagacttaactatacccacaatggatgatatagatatccaatcaaaaaaagttctgttacgaatagacataaattcccccgtagatgagaacggcaaaataattgatgattctagaataaaggcacatattggaacaattaaggaattgattaataagggcaattctgttgtgttaatttcacatcaaggtaggcctggagacaaggatttcacaagtttagaggaacatgctaaattaatttcaaagtatttagatcgagaagtaattttcgtagatgatgtaataggcccatatgcaagggaaatgattaaaaaattagaaaataatgggattttactcttagataatataagattaatttcagaggagttaatagaggctccaccacaacaacacgtaaaaagctttttagtaaagaaattagctccgcttttcgacatttatatcaatgatgcgttcgctactgcacacagaagtcagcctagtatcgtaggctttcctttagctttaccatcagcagctggaagagtaatggaaagggaagtttcagcgttagccaagatttttaatgccgaagacacaccaaagatatttacgttaggtggtggtaaggttcacgatactattaggataattgaaaatctagtgagaaaaaggatagctgacagaatacttactgggggtttagttgcagaattattttctgtcgctaaaggaatgaatttaaatccaaagaatatggaaattctggaaaaattaggtatactgagtctaattcctagagctagaaaactacttctaagtggagctcctatcgaaataccagttgactataaggtagaaataaacggaaacgtaatcgaggaaccagctagtaaggtcactggcattataaaggatatcggatccactactgcagaaatatactcatcatttataaaagatgctaaagtagtagttttaaggggaccaatgggagtaatcgaagatgaaagatttaagagtggaagtaaaagcgtcttaaaagcatcattagagggacaaggttacgttataataggaggtggacacatgataagtgctttagatgaggatatgaagatagatagtagtaaagttcatatctctactggtggaggagctctcctcttattcttatctggagaacgattaccagcattagaggcattatcaatgtcggtggtgaatagcggtgattaa

SEQ ID NO: 56767 - protein, 415 aa, Sulfolobus solfataricus P2
MGIFLIKVGDLTIPTMDDIDIQSKKVLLRIDINSPVDENGKIIDDSRIKAHIGTIKELINKGNSVVLISHQGRPGDKDFTSLEEHAKLISKYLDREVIFVDDVIGPYAREMIKKLENNGILLLDNIRLISEELIEAPPQQHVKSFLVKKLAPLFDIYINDAFATAHRSQPSIVGFPLALPSAAGRVMEREVSALAKIFNAEDTPKIFTLGGGKVHDTIRIIENLVRKRIADRILTGGLVAELFSVAKGMNLNPKNMEILEKLGILSLIPRARKLLLSGAPIEIPVDYKVEINGNVIEEPASKVTGIIKDIGSTTAEIYSSFIKDAKVVVLRGPMGVIEDERFKSGSKSVLKASLEGQGYVIIGGGHMISALDEDMKIDSSKVHISTGGGALLLFLSGERLPALEALSMSVVNSGD

SEQ ID NO: 56768 - DNA, 1281 bp, Agrobacterium tumefaciens str. C58
  CDS (1)..(1281): transl_table=11
atgaggcctgaccggcttgcgtcggcaatcaggcatagtatggtccgtcccgaactcgcaacaaatcaggatcgacccatgcccgctttcaagaccatcgacgaccttaacgacattgccggaaagcgcgttctcgtccgcgttgatctcaacgtgccggtcgcggatggcaaggtgacggacgcaacccgtatcgaacgcgttgcgccgaccattctggaactctcttcaaagggcgcaaaagtcattctgctcgcccatttcggccgcccaaagggtgaacccgtcgctgagatgtcgctttcccagattgtccccacggtcgaggacgtgctggatcacgccatttccttcgcaacggactgcatcggtgcccctgcagcggatgcggtcgcaaaaatgaatgatggcgatattctgctgctggaaaacacccgcttccacaagggcgaggaaaagaacgatcccgccttcgtcgaagaactggccgcgaatggcgatatctatgtgaacgacgccttctccgccgctcaccgtgcccacgcctccaccgagggcctggcgcggcatctgcccgcttatgccggccgcaccatgcaggccgagcttgaggcgctggaaaaaggcctcggccagcccgttcgcccggtcgtcgccatcgtcggcggtgccaaggtttcgagcaagatcgatctcttgatgaacctcgtcaagaaggtcgatgccctcgtcattggcggcggcatggccaacaccttcctcgccgcccgcggcaccaatgtcggcaagtcgctctgcgagcacgatctggcagagaccgcaaagcagatcatgatcgaggcagcgacatccggttgcgctatcgtcctgccggaagacggcgtcgtcgcccgcgaattcacggccggcgcggccaatgaaattgtcgatatcaacgccattcccgccgacgccatggttctcgatgtcggtccgaaatcggttgaaagcatcaaggcctggatttcgcgggcggaaacgctggtctggaacggcccgctcggcgccttcgaaatcgaacccttcgatgcggcaaccgtggcggcggcaaaacacgctgcggaatgcaccaaggccggcaagctcgtttccgttgccggtggcggcgacaccgtcgctgcactcaaccatgccggtgtttcggacgatttcacctatatttcgacggcgggcggcgccttccttgaatggatggaaggcaaggaattgccaggcgttgccatcctgaccactgccaagtaa

SEQ ID NO: 56769 - protein, 426 aa, Agrobacterium tumefaciens str. C58
MRPDRLASAIRHSMVRPELATNQDRPMPAFKTIDDLNDIAGKRVLVRVDLNVPVADGKVTDATRIERVAPTILELSSKGAKVILLAHFGRPKGEPVAEMSLSQIVPTVEDVLDHAISFATDCIGAPAADAVAKMNDGDILLLENTRFHKGEEKNDPAFVEELAANGDIYVNDAFSAAHRAHASTEGLARHLPAYAGRTMQAELEALEKGLGQPVRPVVAIVGGAKVSSKIDLLMNLVKKVDALVIGGGMANTFLAARGTNVGKSLCEHDLAETAKQIMIEAATSGCAIVLPEDGVVAREFTAGAANEIVDINAIPADAMVLDVGPKSVESIKAWISRAETLVWNGPLGAFEIEPFDAATVAAAKHAAECTKAGKLVSVAGGGDTVAALNHAGVSDDFTYISTAGGAFLEWMEGKELPGVAILTTAK

SEQ ID NO: 56770 - DNA, 1164 bp, Escherichia coli K12; identical to SEQ ID NO: 10380
  CDS (1)..(1164): transl_table=11

SEQ ID NO: 56771 - protein, 387 aa, Escherichia coli K12; identical to SEQ ID NO: 10381

SEQ ID NO: 56772 - DNA, 1161 bp, Haemophilus influenzae Rd KW20; identical to SEQ ID NO: 10418
  CDS (1)..(1161): transl_table=11

SEQ ID NO: 56773 - protein, 386 aa, Haemophilus influenzae Rd KW20; identical to SEQ ID NO: 10419

SEQ ID NO: 56774 - DNA, 1164 bp, Salmonella typhimurium LT2
  CDS (1)..(1164): transl_table=11
atgtctgtaattaagatgaccgatctggatctggccgggaaacgcgtttttatccgtgcggatctgaacgtacctgttaaagaagggaaagtgaccagcgacgcgcgtatccgcgcttctctgccgaccatcgaactggctctgaaacagggcgcgaaagtgatggtaacttcccacctgggtcgtcctaccgaaggcgagtacaacgaagaattctctctgctgccggttgttaactacctgaaagacaaactgtctaacccggttcgcctggtcaaagattacctggacggcgttgacgtggccgaaggtgagctggtggttctggaaaacgttcgctttaacaaaggcgaaaagaaagacgacgaagcgctgtctaaaaaatacgccgccctgtgtgacgtattcgtgatggacgcctttggtactgcgcaccgcgcgcaggcttctacccacggtatcggcaaatttgctgatgttgcgtgcgcaggcccgctgctggccgctgaactggatgcgctgggtaaagcgctgaaagaaccggctcgtccgatggtggctatcgttggtggttctaaagtatctaccaaactgaccgttctggattccctgtctaaaatcgctgaccagctgattgtcggcggcggtatcgccaacaccttcgttgccgctcagggccacagcgtcggtaaatccctgtacgaagctgacctggttgacgaagcaaaacgtctgctgaccacttgcgatatcccggttccgaccgatgttcgcgttgccaccgagttctccgaaaccgcaccggcgactctgaaatccgttaacgacgtgaaagaagacgagcagatcctggatatcggcgatgcttccgctcagcagctggctgaaatcctcaagaatgccaaaaccattctgtggaacggcccggttggcgtgtttgagttcccgaacttccgtaaagggactgaaatcgtggcgaatgccatcgctgatagcgaagcgttttccatcgctggcggcggcgacaccctggcggcaatcgacctgttcggcattgctgacaaaatttcctacatttctactggcggcggcgcattcctcgaattcgtggaaggtaaagttctgccagccgtagcgatgctcgaagagcgcgctaagaagtaa

SEQ ID NO: 56775 - protein, 387 aa, Salmonella typhimurium LT2; identical to SEQ ID NO: 10401

SEQ ID NO: 56776 - DNA, 1215 bp, Brucella melitensis 16M
  CDS (1)..(1215): transl_table=11
ttgataaggaccgagagaagaaacatgatgttccgcacccttgacgatgccaatgtccaatccaagcgcgtgctggtccgtgttgacctcaacgtgccgatggcaaacggcgaagtcaccgaccttacccgcatcgaacgcatcgttccgaccatcgcggaactgtcaaggaagggcgcgaaggtcatcctgctcgcccatttcggtcgcccgaagggggttgcctcggatgaaaattcgctgaagcatgtcgtgaagccgctctccaaggttctggatcacagtgttcattttgccgaagactgcatcggcgacaaggcgaaagcggccgtcgatgcgctgaaggacggcgacgtcctgcttctggaaaatacccgtttccacaagggcgaggaaaagaacgatcctgaattcgtgcaggcgctggccgccaatggcgatctctatgtgaacgatgccttttccgccgctcaccgcgcccatgcctcgactgaaggtctggcccatgtcctgcctgccttcgcgggccgcgccatgcaggctgagcttgaagcacttgaaaagggcctcggcaatccggcccgcccggtggtcgccatcgtcggcggtgcaaaggtttcgaccaagctcgacctcctgtccaacctgatcgaaaaggtcgatgcgcttgtcatcggcggcggcatggccaacacgttccttgcagccaagggtcttgatgtcggcaaatcgctctgcgagcatgagctggcctcgaccgcacgcgaaatcatggccaaggccgaaaccaccaaatgcgccatcatcctgccggtggacgcgatcgtgggctggcacttcgccgccgatacgccacaccagacctatggcgtggattcggttccgggcgacgccatgatccttgacgcaggcgagctttcgaccgacctcattgcttcggccatcgatgatgccgcaacattggtctggaacggcccgcttggggctttcgagttgcgcccctttgacacagcaacggtgaaggtcgcaaggcatgtcgcaaagcgcacaaaggaaggcaagcttgtttcggtcggcggcggcggcgatacggtggcagccctcaaccatgcgggcgtggccgacgacttcacctatatctcaaccgctggcggcgctttcctcgaatggatggaaggcaaaccgcttccgggcgtcgatgtattgaagaagtga

SEQ ID NO: 56777 - protein, 404 aa, Brucella melitensis 16M
MIRTERRNMMFRTLDDANVQSKRVLVRVDLNVPMANGEVTDLTRIERIVPTIAELSRKGAKVILLAHFGRPKGVASDENSLKHVVKPLSKVLDHSVHFAEDCIGDKAKAAVDALKDGDVLLLENTRFHKGEEKNDPEFVQALAANGDLYVNDAFSAAHRAHASTEGLAHVLPAFAGRAMQAELEALEKGLGNPARPVVAIVGGAKVSTKLDLLSNLIEKVDALVIGGGMANTFLAAKGLDVGKSLCEHELASTAREIMAKAETTKCAIILPVDAIVGWHFAADTPHQTYGVDSVPGDAMILDAGELSTDLIASAIDDAATLVWNGPLGAFELRPFDTATVKVARHVAKRTKEGKLVSVGGGGDTVAALNHAGVADDFTYISTAGGAFLEWMEGKPLPGVDVLKK

SEQ ID NO: 56778 - DNA, 1167 bp, Encephalitozoon cuniculi; identical to SEQ ID NO: 10592
  CDS (1)..(1167)

SEQ ID NO: 56779 - protein, 388 aa, Encephalitozoon cuniculi; identical to SEQ ID NO: 10593

SEQ ID NO: 56780 - DNA, 1347 bp, Drosophila melanogaster
  CDS (1)..(1347)
atgcttccaattcggcagagtttataccaaagagctcaaactcgatttacaaaattaagatttccaagattttttagcaaagacgattgcaatggaaagcaagtaaagaagttgagcttaaaaaatgtagatgtggctgggaaaagggtttttatgagagtggactttaatgtacccatgaaagatggcaaaataaccaacaaccaacgaattgtttccgcacttcccagtattaaatatgccttggacaagaaatgtaagtccttggttttggcatcccacttggggcgtccggatggcaaaaagaacaaaaagtttagcctggaacccgtggccaaggagctggagagtgtgctgggccagccggttcaattcctggacgactgcgtgggtgatagcaccctgagagctttgaaggatccctccgacggcactgtgttcctgttggagaatcttcgtttctatgccgaggagacgggcagcagcaaggacgataacaagaagaaggtcaaagcagatcccgcgaaggtgaaggaattccgagccaagttggcgcagctgggcgagatctatgtgaacgatgcctttggaacagcacatcgtccgcatagttccatgatgggcgatggctacaaggtgcgagcggctggtttcctgctggacaaggaactggagtactttgccaaggttctccacgatccggccaagccctttttggccattctgggtggcgccaagatagccgataaaattccactgataacgaacctcctgaacaatgtaacggccatgatcatatccggtggcatggccttcacctttctcaaagtgctcaatggcatggagattggaaagtccctcttcgacgagaagggatccgagttggtcaacgacatagtctgcaaggcgaaggagaaggacgtgaatatactatttccgattgactttgtcatagccaataagatcgacaaggagccggataaagtggaacatgtggatgccacacagggcataccggaggacatgatgggtctggaccacggccaggcatccagtcagatgtttgctggcgctatttgtgcatccaaaaccatcgtctggaacggaccgccaggcttgttcgaaaacgagctattctccaaaggcaccgagtccatgctggaggcagtaatcggggccactaaccgaggagccaccacaatcgttggtggtggggatacggccaccgcttgcttgaagttcggaggcgccgacaaggtctcgcatgtgtccaccggtggaggagcttccctggagttgctggagggtaaggttctgcctggagtggctgctctttcggatgcctaa

SEQ ID NO: 56781 - protein, 448 aa, Drosophila melanogaster; identical to SEQ ID NO: 10625

SEQ ID NO: 56782 - DNA, 1326 bp, Bifidobacterium longum NCC2705
  CDS (1)..(1326): transl_table=11
gtgacaaaacaccgcattcagtcagtagacgaatgcggtgttttgttccggaatgcctgtaatatgcaaagtggcaaaattggccactttgacgtgcgattcgtcaaggaaaggatattcatgaagacactcaaggaccttggagatctcaagggcaagcgcgttctggttcgcgctgatttcaatgttccgctggacggcaccaccatcaccgatgacggtcgaatcaaggctgctctgccgaccatcaagaccctgcgcgaagaaggcgccaaggtcatcctcatggcccaccttggccgcccgaagggcaaggtcgttcctgagctgagcctggccccggttgccgcccgcctcggcgagctgctcggcgccaacgtgccgctggccaaggacacctacggcgaggacgctcaggccaaggtcgccgccatgaacgatggcgacgttgtgctgcttgagaacgttcgtttcaacccggaggagacctctaaggacgccgacgaacgcgccgcttacgccaagaagatcgccgccctcggcgaggccttcgtttccgatggcttcggcgtggtccaccgcgctcagggctccaactacgacgttgccgccgatctgccggccgccgcaggcctgctggtcgagaaggaagtcaaggccttgtccaaggccaccgagaacccggagcgtccgttcaccgtggtgctcggcggttccaaggtctccgacaagctcggcgtcatcgagaacctgctcgacaaggccaaccgtctggtcatcggcggtggcatggtgttcaccttcctcaaggccaagggctacgaggtcggcacctccctgcttgaagaggaccagcttgagaaggtcaagggctacatcgagaccgccgagaagaacggcgttgagctcgtgctgccgaccgacgtcgtcgtgaacgccggcttcccggccggtgacaccccggttgctccggaagtcgttgccgccgacgccatcccggccgacaagatgggtctggacatcggcccggagtcccagaagctcttccacgacaagatcgtcgactccaagaccgtcgtgtggaacggcccgatgggcgtgttcgaggttcctgagttcgccgccggcaccaaggccgtggcccagggtctggtcgacgccaccgcagtcggtgcgttcaccatcgtcggtggcggcgactccgcctccgccgtgcgcaacctcggcttcccggaggacggcttctcccacatctccaccggtggtggcgcttccctcgagttcctcgaaggcaaggagctccctggcctgaaggtgcttgagtaa

SEQ ID NO: 56783 - protein, 441 aa, Bifidobacterium longum NCC2705
MTKHRIQSVDECGVLFRNACNMQSGKIGHFDVRFVKERIFMKTLKDLGDLKGKRVLVRADFNVPLDGTTITDDGRIKAALPTIKTLREEGAKVILMAHLGRPKGKVVPELSLAPVAARLGELLGANVPLAKDTYGEDAQAKVAAMNDGDVVLLENVRFNPEETSKDADERAAYAKKIAALGEAFVSDGFGVVHRAQGSNYDVAADLPAAAGLLVEKEVKALSKATENPERPFTVVLGGSKVSDKLGVIENLLDKANRLVIGGGMVFTFLKAKGYEVGTSLLEEDQLEKVKGYIETAEKNGVELVLPTDVVVNAGFPAGDTPVAPEVVAADAIPADKMGLDIGPESQKLFHDKIVDSKTVVWNGPMGVFEVPEFAAGTKAVAQGLVDATAVGAFTIVGGGDSASAVRNLGFPEDGFSHISTGGGASLEFLEGKELPGLKVLE

SEQ ID NO: 56784 - DNA, 1197 bp, Streptococcus pyogenes SSI-1
  CDS (1)..(1197): transl_table=11
atggctaaattgactgttaaagacgttgatttgaaaggtaaaaaagtcctcgttcgtgttgactttaatgtgcctttgaaagacggcgttatcactaacgacaaccgtatcactgcggctcttccaacaatcaagtatatcatcgaacaaggtggtcgtgctatcctcttctctcaccttggacgtgttaaagaagaagctgacaaagaaggaaaatcacttgcaccggtagctgctgatttagctgctaaacttggtcaagatgttgtattcccaggtgttactcgtggttcaaaattagaagaagcaatcaatgctttggaagatggacaagttcttttggttgaaaacactcgttttgaagatgttgacggtaagaaagaatctaagaatgacgaagaacttggtaaatactgggcttcacttggagatggaatcttcgttaacgatgcatttggtacagcacaccgtgctcacgcatcaaacgtaggtatttcagcaaacgttgaaaaagctgtagctggtttccttcttgaaaacgaaattgcttacatccaagaagcagttgaaactccagaacgtccattcgtagctattcttggtggctcaaaagtttctgataagattggtgttatcgaaaatcttcttgaaaaagctgataaagttcttatcggtggtggtatgacttacacattctacaaagctcaaggtatcgaaatcggtaactcacttgtagaagaagacaaattggatgttgctaaagacctccttgaaaaatcaaatggtaaattgatcttgccagttgactcgaaagaagcaaacgcatttgctggttacactgaagttcgcgacactgaaggtgaagcagtttcagaaggcttccttggtcttgacatcggtcctaaatcaatcgctaaatttgatgaagcacttactggtgctaaaacagttgtttggaacggacctatgggtgtctttgaaaaccctgacttccaagctggtacaatcggtgtcatggacgctatcgttaaacaaccaggcgttaaatcaatcatcggtggtggtgattcagcagcagctgctatcaaccttggccgtgctgacaaattctcatggatcagtaccggcggaggcgctagcatggaacttctcgagggtaaagtattaccaggtttggcagcattgactgaaaaataa

SEQ ID NO: 56785 - protein, 398 aa, Streptococcus pyogenes SSI-1
MAKLTVKDVDLKGKKVLVRVDFNVPLKDGVITNDNRITAALPTIKYIIEQGGRAILFSHLGRVKEEADKEGKSLAPVAADLAAKLGQDVVFPGVTRGSKLEEAINALEDGQVLLVENTRFEDVDGKKESKNDEELGKYWASLGDGIFVNDAFGTAHRAHASNVGISANVEKAVAGFLLENEIAYIQEAVETPERPFVAILGGSKVSDKIGVIENLLEKADKVLIGGGMTYTFYKAQGIEIGNSLVEEDKLDVAKDLLEKSNGKLILPVDSKEANAFAGYTEVRDTEGEAVSEGFLGLDIGPKSIAKFDEALTGAKTVVWNGPMGVFENPDFQAGTIGVMDAIVKQPGVKSIIGGGDSAAAAINLGRADKFSWISTGGGASMELLEGKVLPGLAALTEK

SEQ ID NO: 56786 - DNA, 1278 bp, Bordetella parapertussis 12822
  CDS (1)..(1278): transl_table=11
ttggttttcccgtcacggggaaacggatctggcccttttcgcaggcaggccccggacgccatccacacaggaaccgaatacagtatgtccaacgtcaatacgctttccgcgctggccaagagcggcgctctgtccggcaagcgcgttttcatccgcgccgacctcaacgtgccgttcgacgacgccggccgcatcagcgaagacacccgcatccgcgcctcggtgcccggcatccgcctggcgctggacgccggcgaggcggtcatggtcacctcgcacctgggccgccccaaggagggcgcgctgaccgaggcggactcgctggccccggtcgcgcagcgcctgtccgaactgctgggcatgcaggtgcgcctggtgcccgactgggtcgacggcgtttccgtcgagccgggcgaagtcgtgctgctggagaactgccgcggcaacgtgggcgagaaaaaggacgacgaaggcttgtcgcgcaagatggcggcgctgtgcgatgtgtacgtcaacgacgccttcggcaccgcgcaccgcgccgaggccaccacgcacggcatcgcgcgcttcgcgccggtggcctgcgccggcccgctgctggaggccgagctcgaggcgctggggcgcgcgctgcatgatcccaaacggccgctggtggcgatcgtgggcggctccaaggtgtcgaccaagctgtccatcctgcaatcgctggccgacaaggtcgaccagctggtggtcggcggcggcatcgccaacaccttcatgctggccgccggcctgcccatcggcaagtcgctggccgagcccgagcaggtcgagcaggcgcgcgccgtgatcgaaatcatgaagcgccgcggcgccgaggtgccgattcccaccgacgtggtttgcgccaagtcgttcggcgcggacgccgcggccaccgtcaaggcggccgccgacgtggccgaggacgacatgatcctcgacatcggaccgcagaccgcgcagcgcctggccgacatcctcaaggcggccggcaccatcgtctggaacggtccggtcggcgtgttcgagttcgaccagttcgcccacggcaccgaggtggtggcgcgcgccatcgccgactcggcgggcttttcgattgccggcggcggcgatacgctggctgccatcgccaagtacggcatcgccgaccagaccggctatatctcgaccggcggcggcgctttcctggagttcctggaaggcaaggcgctgccggccgtggccgtgctgcaggcgcgcgccgcgtaa

SEQ ID NO: 56787 - protein, 425 aa, Bordetella parapertussis 12822
MVFPSRGNGSGPFRRQAPDAIHTGTEYSMSNVNTLSALAKSGALSGKRVFIRADLNVPFDDAGRISEDTRIRASVPGIRLALDAGEAVMVTSHLGRPKEGALTEADSLAPVAQRLSELLGMQVRLVPDWVDGVSVEPGEVVLLENCRGNVGEKKDDEGLSRKMAALCDVYVNDAFGTAHRAEATTHGIARFAPVACAGPLLEAELEALGRALHDPKRPLVAIVGGSKVSTKLSILQSLADKVDQLVVGGGIANTFMLAAGLPIGKSLAEPEQVEQARAVIEIMKRRGAEVPIPTDVVCAKSFGADAAATVKAAADVAEDDMILDIGPQTAQRLADILKAAGTIVWNGPVGVFEFDQFAHGTEVVARAIADSAGFSIAGGGDTLAAIAKYGIADQTGYISTGGGAFLEFLEGKALPAVAVLQARAA

SEQ ID NO: 56788 - DNA, 1176 bp, Vibrio vulnificus YJ016
  CDS (1)..(1176): transl_table=11
ttgagaggacacatcatgtctgtaatcaagatgactgacctggatctagcaggtaaacgtgtattcatccgtgctgacctaaacgtgccagtaaaagacggtaaagtaacttctgatgcacgtatcatcgcatctcttcctactatcaagctatgtctagaagctggcgcgaaagtaatggtcacttctcacctaggtcgtcctactgaaggtgaatacgcagaagagttctctctacaaccagttgttaactacctaaacgacgcgctagattgcgaagtgaaactggctaaagattacctagatggtcttgagctaaacgctggtgaacttgttgttcttgaaaacgttcgctttaacaaaggcgagaagaaaaacgacgaagaactttctaagaaatacgcggcactatgtgacgtattcgtaatggatgcattcggtacagctcaccgtgcacaagcgtcaactcacggtgtgggtatgtttgctgaagtagcgtgtgcgggccctctacttgctgctgaactagaagcactaggcaaagcaatgagcaacccagagcgtcctctagttgctatcgttggtggttcaaaagtgtctactaaactaacggttcttgagtcactatctaaaatcgctgaccaacttgttgttggtggtggtatcgcgaacacattcatcgcagctgaaggtcacaatgtaggtaagtctctatacgaagcggatcttgttgaaactgcacaaaaactgatgaaagagtgtgcaattcctgtcgcgactgacgtagcgtgtgcgaaagcattcgacgagaacgcagaagcggaaatcaaacatgtttctgaagtacaagacgacgacatgatcttcgaccttggtccagactcaacagctgcactagctgaaatcatcgcaaacgcgaaaactattctgtggaatggccctgttggtgtattcgagttcaaaaacttcgaagcgggtactaaaggtatttctgaagcgatcgctcagtctccagcattctctgtagcaggcggtggcgatacgctagcggctatcgacaagttcggtatcaaagcggacgtatcttacatctctactggcggcggtgcgttccttgagtttgtagaaggtaaagtacttccagcagttgaaatgctagaagcacgcgctaagtaa

SEQ ID NO: 56789 - protein, 391 aa, Vibrio vulnificus YJ016
MRGHIMSVIKMTDLDLAGKRVFIRADLNVPVKDGKVTSDARIIASLPTIKLCLEAGAKVMVTSHLGRPTEGEYAEEFSLQPVVNYLNDALDCEVKLAKDYLDGLELNAGELVVLENVRFNKGEKKNDEELSKKYAALCDVFVMDAFGTAHRAQASTHGVGMFAEVACAGPLLAAELEALGKAMSNPERPLVAIVGGSKVSTKLTVLESLSKIADQLVVGGGIANTFIAAEGHNVGKSLYEADLVETAQKLMKECAIPVATDVACAKAFDENAEAEIKHVSEVQDDDMIFDLGPDSTAALAEIIANAKTILWNGPVGVFEFKNFEAGTKGISEAIAQSPAFSVAGGGDTLAAIDKFGIKADVSYISTGGGAFLEFVEGKVLPAVEMLEARAK

SEQ ID NO: 56790 - DNA, 1344 bp, Eremothecium gossypii; identical to SEQ ID NO: 10564
  CDS (1)..(1344)

SEQ ID NO: 56791 - protein, 447 aa, Eremothecium gossypii; identical to SEQ ID NO: 10565

SEQ ID NO: 56792 - DNA, 1296 bp, Methanococcus maripaludis S2; identical to SEQ ID NO: 10818
  CDS (1)..(1296): transl_table=11

SEQ ID NO: 56793 - protein, 431 aa, Methanococcus maripaludis S2; identical to SEQ ID NO: 10819

SEQ ID NO: 56794 - DNA, 1254 bp, Gallus gallus
  CDS (1)..(1254)
atgtctctctccaacaagctcaccctggataaggtggatgtgaagggcaagcgggtcgtcatgagggttgacttcaatgttccaatgaaggatcacaaaataaccaacaaccaaagaatcaaggcagctgtccctaccatcaagcactgcttggaccatggagccaagtcagtggttttgatgagtcacctgggccgcccggatggagttcccatgcctgacaagttctccttttctccagtagctgtggagcttaaagctctcctgggcagggaggtctcattcctgaaggattgtgttggtcctgaggtggagaaggcctgtgctaatcctgcaaacggctccgtcatcctgctagagaacctccgattccatgtagaagaagaagggaaagggaaggatgcttcagggaacaagatcaaagctgatgctgcaaaagtggaggctttcagagcctctctttctaaattgggagatgtttatgtcaatgatgcttttggaactgcccatcgtgctcacagctccatggtaggtgttcatcttcctcagaaggctgctggcttcctgatgaagaaagaactggattattttgcaaaggcccttgagagtccagagagacccttcttagcaattcttggaggagctaaagttcaggataagatccagctgatcagtaacatgttagataaggtcaacgagatgatcattggtggtggaatggcattcacctttctcaaagtgttaaacaacatgcagattggcaactcgctgtttgatgaagagggatcaaaaattgtcaaggacctgatggccaaggcagagaagaacggtgtgaagattaccttgccagttgacttcatcactgcagacaaatttgatgagcatgcacagactggggaagccacagtggcttcaggcattcctgctggctggatgggcttggactgcggccctgaaagtgttaagaagtttgttgaagttgtgggaagggccaaacaaatagtgtggaacggtccagttggagtctttgaatgggacaagttctccaaaggaaccaaagccctgatggacaaagtggtggaagtaactggaaagggctgcatcaccattattggtggtggagatactgctacatgctgtgcgaagtggaatactgaagataaagttagccacgttagcactggaggtggtgccagcctggaactgctagagggtaaggttcttcctggcgtggatgccttgagcagtgtgtag

SEQ ID NO: 56795 - protein, 417 aa, Gallus gallus; identical to SEQ ID NO: 10457

SEQ ID NO: 56796 - DNA, 1254 bp, Danio rerio
  CDS (1)..(1254)
atgtctctttcgaacaaacttcatttggacaaggtggacgtgaaaggaaagcgggtgatcatgagggtggacttcaatgtccctatgaagaacaatgtgatcacaaataaccagagaatcaaggctgcagtcccatctatccagcactgtttagataattgtgccaaagctgtggccctgatgagccacttgggccggcctgatggagtccctatgccagacaaatactctctggagcctgtggctgcagaactcaagaacctgctgggaaaagacgttcagttcctgaaagactgtgtgggtccagatgtggagaaagcctgtgcagaccctcctgcaggatctgtcattctgctggagaatctgcgctttcatgtggctgaggagggcaagggcaaagatgcatcgggtaacaagaccaaagcaagtcaggcagagatcgatgctttccgagcctccctgtccaaattgggtgacgtatacgtcaacgatgctttcggaactgcacatagagctcacagctctatggttggagtgaatctccctcagaaggctgctggttttctgatgaagaaagagctagactactttgccatggcccttgagaaaccacagaggcctttcttggccatcctcggaggggccaaggtcaaagataagattcagctgatcaacaacatgttggacaaggtgaatgagatgatcattggtggaggaatggcctttaccttcctcaaggttctcaagaacatggagatcggcacttccctgtttgatgaagagggttccacaattgtgaaagacctcatggccaaagcagaaaagaacggtgtaaagatcacacttccagtcgactttatcactgcagacaaatttgatgagaaggcaacaacagggaccgcaacggtagcagaaggtattcctgctggctggatgggtctagactgtggtcctgagagctcaaagctctatgcagaggctgtggccagagccaagcagattgtgtggaacggacccgttggcgtgttcgagtgggacaactttgctcatggaaccaagaacatgatggacaaagttgtagaagcgaccaaaaatggctgcatcaccattatcggtgggggagacacagctacctgctgtgccaagtgggacactgaggacaaggtcagccatgtgagcacagggggcggagccagtctggagctgctggagggtaaagtgctgcccggtgtcgatgccctcagtaacgtataa

SEQ ID NO: 56797 - protein, 417 aa, Danio rerio
MSLSNKLHLDKVDVKGKRVIMRVDFNVPMKNNVITNNQRIKAAVPSIQHCLDNCAKAVALMSHLGRPDGVPMPDKYSLEPVAAELKNLLGKDVQFLKDCVGPDVEKACADPPAGSVILLENLRFHVAEEGKGKDASGNKTKASQAEIDAFRASLSKLGDVYVNDAFGTAHRAHSSMVGVNLPQKAAGFLMKKELDYFAMALEKPQRPFLAILGGAKVKDKIQLINNMLDKVNEMIIGGGMAFTFLKVLKNMEIGTSLFDEEGSTIVKDLMAKAEKNGVKITLPVDFITADKFDEKATTGTATVAEGIPAGWMGLDCGPESSKLYAEAVARAKQIVWNGPVGVFEWDNFAHGTKNMMDKVVEATKNGCITIIGGGDTATCCAKWDTEDKVSHVSTGGGASLELLEGKVLPGVDALSNV

SEQ ID NO: 56798 - DNA, 1257 bp, Magnaporthe grisea 70-15
  CDS (1)..(1257)
atgtctctctctaacaagctctccatcacggacgttgatgtcaaggggaagcgggtgctcatccgtgtcgacttcaacgttcctcttgacgataacaagaacatcaccaacaaccagcgtattgccggcgctgtgccaacaatcaagcatgccctcgacaatggcgccaagacagttatcctgatgtcgcacctcggtcggccaaatggatcgcccaaccccaagtactcgctcaagcctgtcgtgtccgagcttgagaagcttttgggcggcaaaaaggtcaccttcgctcctgactgtgtcggccctgaggtcgaggaaatcgtcaacaaggccggcgagggcgacgtcgtactattggagaacctgcgcttccacatcgaggaggagggcagcgccaaggacaaggagggcaacaagaccaaggctgacaaggccaaggtcgaggagttccgcaagggcctcaccaagttgggagacatttacatcaacgatgctttcggcactgctcaccgtgctcactcttccatggttggcgtcgacctaccccagaaggccgctggtttcctgatgaagaaggagcttgactacttcgcacaggccctcgagtcgcccaagcgccccttcttggccattcttggtggtgccaaggtttcggacaaaatccagctgatcgacaacctgcttgacaaggtcaacacgctcatcgtttgcggtggcatggcctttaccttcaagaaggttctcgacaacatggccattggaaactcgctctttgacgaggcaggatccaagaccgtccctgagctcatgaagaaggcgcaggagaagggcgtcaaggtcgtcctgccggtcgacttcatcactgctgacaagttcgccgcggacgccaagactgggtctgccacggacaaggagggcatccctgagggctggatgggcttggactgcggcgagaagagtgtcgagctgttccagagcgccatcgacgagtcgcagaccgtcctgtggaacggccccgccggtgtctttgagtttgacgctttcgccaagggcaccaaggccactcttgacgctgccgtcagcggctgcggcaagggcaagattgttatcatcggaggtggtgacacagctaccgttgcggccaagtacggagttgaggacaagctgagccacgtctcgaccggcggtggtgccagcttggagctcctcgagggcaaggaactgcctggtgtcaccgcgctcagcagcaagtaa

SEQ ID NO: 56799 - protein, 418 aa, Magnaporthe grisea 70-15
MSLSNKLSITDVDVKGKRVLIRVDFNVPLDDNKNITNNQRIAGAVPTIKHALDNGAKTVILMSHLGRPNGSPNPKYSLKPVVSELEKLLGGKKVTFAPDCVGPEVEEIVNKAGEGDVVLLENLRFHIEEEGSAKDKEGNKTKADKAKVEEFRKGLTKLGDIYINDAFGTAHRAHSSMVGVDLPQKAAGFLMKKELDYFAQALESPKRPFLAILGGAKVSDKIQLIDNLLDKVNTLIVCGGMAFTFKKVLDNMAIGNSLFDEAGSKTVPELMKKAQEKGVKVVLPVDFITADKFAADAKTGSATDKEGIPEGWMGLDCGEKSVELFQSAIDESQTVLWNGPAGVFEFDAFAKGTKATLDAAVSGCGKGKIVIIGGGDTATVAAKYGVEDKLSHVSTGGGASLELLEGKELPGVTALSSK

SEQ ID NO: 56800 - DNA, 1257 bp, Gibberella zeae PH-1
  CDS (1)..(1257)
atgtcgctgtccaacaagctttccatcgccgacgttgacgtcaagggcaagaaggtcctcatccgagtcgacttcaacgtccctctcgacgccgacaagaacatcaccaacaaccagcgaattgtcggtgctctccccaccatcaaatacgccctcgagaatggcgccaagtctgtcatcctcatgtcccacctcggacgccccaacggctcccccaacgagaagtactccctcaagcccgtcgtcgccgagctcgagaagcttctcagcaagaaggtcacctttgcccccgactgtgtcggccccgaggtcgaggagatcgtcaacaaggctgaggatggctctgtcattctcctcgagaacctccgattccacattgaggaggagggctcctccaaagacaaggagggcaacaagaccaaggccgacaaggctcaggttgaggctttccgcaagggtctgaccgctcttggtgacgtctacatcaacgacgctttcggcactgctcaccgtgctcactcttccatggtcggtgtcgatctcccccaaaaggcctccggtttcctcgtcaagaaggagctcgagtacttcgccaaggccctcgagaacccccagcgccccttccttgctattctcggtggtgccaaggtctccgacaagatccagctcatcgacaacctccttgacaaggtcaacaccctcatcatctgcggtggcatggccttcaccttcaagaagacccttgagaacgtctccatcggaaactccctcttcgacgaggccggctccaagaccgtcggtaacctcgttgagaaggccaagcagaagggcgtcaagctcgtcctccccgtcgactacatcaccgccgacaagttcgacaaggatgccaacactggctacgccactgacaaggacggtatccccgacggctggcagggacttgactgcggtgaggagtccgtcaagctctacaaggaggccattgccgatgccaagaccatcctctggaacggtcccgccggtgtctttgagttcgagaagttcgccagcggcaccaaggccactctcgacgccgtcgttgacgctgtccagaaggacggcaagatcgtcatcatcggtggtggtgacactgccaccgttgccaagaagtacggtgttgaggacaagattagccacgtctctaccggcggtggtgccagcttggagctcctcgagggcaaggagcttcccggtgttactgctctgtccagtaagtaa

SEQ ID NO: 56801 - protein, 418 aa, Gibberella zeae PH-1
MSLSNKLSIADVDVKGKKVLIRVDFNVPLDADKNITNNQRIVGALPTIKYALENGAKSVILMSHLGRPNGSPNEKYSLKPVVAELEKLLSKKVTFAPDCVGPEVEEIVNKAEDGSVILLENLRFHIEEEGSSKDKEGNKTKADKAQVEAFRKGLTALGDVYINDAFGTAHRAHSSMVGVDLPQKASGFLVKKELEYFAKALENPQRPFLAILGGAKVSDKIQLIDNLLDKVNTLIICGGMAFTFKKTLENVSIGNSLFDEAGSKTVGNLVEKAKQKGVKLVLPVDYITADKFDKDANTGYATDKDGIPDGWQGLDCGEESVKLYKEAIADAKTILWNGPAGVFEFEKFASGTKATLDAVVDAVQKDGKIVIIGGGDTATVAKKYGVEDKISHVSTGGGASLELLEGKELPGVTALSSK

SEQ ID NO: 56802 - DNA, 1251 bp, Ustilago maydis 521
  CDS (1)..(1251)
atgtctctttccagcaagcttggtatcaccgatgtcgacctcaaggacaagaaggtcctgatccgtgtcgacttcaacgtccccatggacggcgacaagatcaccaacaaccagcgtattgtcgctgcccttcccactgtcaagtacgccatcgagcagaatgccaaggctgtcgtgctcatgtcgcacatgggtcgtcccgatggaaagcctgtccccaagtactcgctcaagcccgtcgctgccgaggtatccaagctgctcaacaaggatgtcgaattccttgctgactgcgtcggtgctgagacagagaaggctgtcgagtcggctaccggcggcaagatcttcttgctcgagaacctccgctaccacgttgaggaagagggcaagggcaccaatgaagccggagagaaggtcaaggctgaccccaagaaggtcgaggagttccgtgccagtctcaccaagctcggtgacgtctacatcaacgatgcctttggcacagctcaccgcgcccactcatcgatggttggtgtgcagctgccccaacgtgctgccggtttccttatgaagaaggagctcgagttctttgccaaggcgctcgagagccctgagcgccccttccttgctatcctcggtggtgccaaggtgtcggacaagatccagctcatcgacaacatgctggacaaggtcaactcgctcatcatctgcggtggtatggctttcaccttcaaaaagacgctcgacaatgtcaagattggcacctcgctctttgacgaggccggctcgcacaaagtcgctgagctcgttgagaaggccaagaagaacaacgtcgagctcgtcttccccgtcgactacatcaccgccgacaagtttgacaagaacgccaagaccggttcggccaccgatgccgacggtatccccgatgagtggatgggtctcgatgccggtgaggagtcgcgcaagaagttccgcgagaccattcttaaggccaagaccatcctgtggaacggccccgccggagtctttgagtttgacaactttgccggtggttccaaggccatgcttgacgcctgtctcgaggctgagaagaacggctctactgtcatcgttggaggtggtgacactgccacggtggttgccaagtacggcgctgaggacggcatctcgcactgctcgactggtggtggcgcttcgctggagctgctcgagggcaagaccttgcctggtgtcaaggagctttcggagaagtga

SEQ ID NO: 56803 - protein, 416 aa, Ustilago maydis 521
MSLSSKLGITDVDLKDKKVLIRVDFNVPMDGDKITNNQRIVAALPTVKYAIEQNAKAVVLMSHMGRPDGKPVPKYSLKPVAAEVSKLLNKDVEFLADCVGAETEKAVESATGGKIFLLENLRYHVEEEGKGTNEAGEKVKADPKKVEEFRASLTKLGDVYINDAFGTAHRAHSSMVGVQLPQRAAGFLMKKELEFFAKALESPERPFLAILGGAKVSDKIQLIDNMLDKVNSLIICGGMAFTFKKTLDNVKIGTSLFDEAGSHKVAELVEKAKKNNVELVFPVDYITADKFDKNAKTGSATDADGIPDEWMGLDAGEESRKKFRETILKAKTILWNGPAGVFEFDNFAGGSKAMLDACLEAEKNGSTVIVGGGDTATVVAKYGAEDGISHCSTGGGASLELLEGKTLPGVKELSEK

SEQ ID NO: 56804 - DNA, 1209 bp, Parachlamydia sp. UWE25
  CDS (1)..(1209): transl_table=11
gtgagggtgaaggataaattatcgattcgcgatttaaatttgaaagacaagaaagccttaattcgtgtcgattttaacgtccctttagaaaaaggtttgattacagatgatagtcgtattcaagcctctcttcccacaattcaatatgttttagatcaagaaggagccgttattttgatgagccatctcggtcgtcctaaaggtttgtttgattctaaattttcgttggctccttgtgctaaacgtttatcagaattattaaataagcctgtaaaaatggctgcagattgttgtggattagacgttgaacagatggttcgtcagctaaaatcaggagaagttttattgcttgaaaatttacgttttcacaaaggcgaagaaaggcctgatgatgaacctaattttacaagtgctttgtcagagttgggagatgtttatatcaatgatgcttttggaactgctcatcgtgctcatgcttcgacaacaaaaattgcaaaattttttcccaatcgtgcagcagcgggtttgttacttgaaaaggaaatttcttatctaggttgtgctttaacgaatcctaaacgtcctttttgtgcagtgttaggaggtgcaaaaatttccacaaagtttaaagtcatcgaagctttacagtctaaagcagatgttttattaatagggggagcgatggctttcacttttttcaaatctgaaggaatacctattggggattcgctttacgaaagcgaattcgttgctgtcgctcgtgaattgttaggtgttgagacacagtctcgctgccgccttttactacccatagacttggtcattgctaaaaaaatggatgaatccttcactgaaacgagaattatttcagttaaagaaggaattcctgatgggtatcaaggggtagatattgggccagacactattaaactttatcaagaagaattgaacagagcagctacgattttttggaacggccctttaggagtatttgaagttcctgctttttctaaagggactcaaactattgctcaaactcttgctgttgtcaacgcgattactattgttgggggaggggattccttagctgctatagaacaagctggggtttctaaacaaataaaccatctttcaactggagggggtgcctctttagaatatatagaatttgggcaattacctgggattgaagctctatcagataaataa

SEQ ID NO: 56805 - protein, 402 aa, Parachlamydia sp. UWE25; identical to SEQ ID NO: 10553

SEQ ID NO: 56806 - DNA, 1245 bp, Picrophilus torridus DSM 9790; identical to SEQ ID NO: 10550
  CDS (1)..(1245): transl_table=11

SEQ ID NO: 56807 - protein, 414 aa, Picrophilus torridus DSM 9790; identical to SEQ ID NO: 10551

SEQ ID NO: 56808 - DNA, 1194 bp, Bartonella quintana str. Toulouse; identical to SEQ ID NO: 10542
  CDS (1)..(1194): transl_table=11

SEQ ID NO: 56809 - protein, 397 aa, Bartonella quintana str. Toulouse; identical to SEQ ID NO: 10543

SEQ ID NO: 56810 - DNA, 1188 bp, Acinetobacter sp. ADP1; identical to SEQ ID NO: 10538
  CDS (1)..(1188): transl_table=11

SEQ ID NO: 56811 - protein, 395 aa, Acinetobacter sp. ADP1; identical to SEQ ID NO: 10539

SEQ ID NO: 56812 - DNA, 1164 bp, Erwinia carotovora subsp. atroseptica SCRI1043; identical to SEQ ID NO: 10534
  CDS (1)..(1164)

SEQ ID NO: 56813 - protein, 387 aa, Erwinia carotovora subsp. atroseptica SCRI1043; identical to SEQ ID NO: 10535

SEQ ID NO: 56814 - DNA, 1215 bp, Mesoplasma florum L1; identical to SEQ ID NO: 10536
  CDS (1)..(1215): transl_table=4

SEQ ID NO: 56815 - protein, 404 aa, Mesoplasma florum L1; identical to SEQ ID NO: 10537

SEQ ID NO: 56816 - DNA, 1209 bp, Propionibacterium acnes KPA171202
  CDS (1)..(1209): transl_table=11
atgaaatctgttgaggatctcggagacttgcgcggtaagcgcgtcgtcattcgctgcgacttcaatgtcccgctcgacggggacaagatcaccgacgacggccgtattaaggctgccctgcctactttgacccagctgcatgaggctggcgctcgcaccaccgtgctcgcgcacctcggtcgtcccaagggtgccgtcgatcccaagtactcgctggcgccagttgccaagcgcctcggtgagcttatgaaccttgacgtcaagcttgctggggacgttgttggtccctccgccactaaaacctctgagtcgctggctgatggcgagatcgccttggtcgaaaacgtccgcttcgagaagggcgagaccagtaaggacgaggccgagcgcgctgagctcgctcagaaatacgcctcgtttggtgagttttacgtctccaacggcttcggcgttgtgcaccgcaagcaggcttccgtctacgacgttgccaagctgctgccgagcgctgctggctccctcgttgccaaggaggtagaggtcctcgaaggcctgaccgccgatccgaagcggccgttcgtcgtcgtcctcggtggtgccaaggtcgccgacaagcttgccgtcatcgataacctgctcaaggccgctgacactctcgttattggtggcggtatggcgtacaccttcctcaaggcgaagggtctcgaggtcggtgactccctacttgacgaagattcgatcgacgcgtgcacgaagtatctcgaacaggccaaggctgcaggcaagcagatcctgcttcccgtagacgtgcgagtggtctccgacatcgatttcgaggcccgcactgtcggtcagatcgacgtcgtgcccgctgacgagattccttccgacaagatggcagtagacatcggtccggagaccgagaaggcttacgccaacgcgatcaagggtgccaagtcagtgttctggaacggaccaatgggcgttttcgagatcaagggcctcgagctcggcaccaaggccgtcgcccaggctcttaccgaggttgacggcctttcggtggtcggcgggggagactccgcctccgccgtgcgtaccctcggtttcgccgacgatcagttcggtcatatttctaccggtggtggcgcctccctcgagcttatggagggcaaggagctacccggaatcgcagtactcaaggagaacaactga

SEQ ID NO: 56817 - protein, 402 aa, Propionibacterium acnes KPA171202
MKSVEDLGDLRGKRVVIRCDFNVPLDGDKITDDGRIKAALPTLTQLHEAGARTTVLAHLGRPKGAVDPKYSLAPVAKRLGELMNLDVKLAGDVVGPSATKTSESLADGEIALVENVRFEKGETSKDEAERAELAQKYASFGEFYVSNGFGVVHRKQASVYDVAKLLPSAAGSLVAKEVEVLEGLTADPKRPFVVVLGGAKVADKLAVIDNLLKAADTLVIGGGMAYTFLKAKGLEVGDSLLDEDSIDACTKYLEQAKAAGKQILLPVDVRVVSDIDFEARTVGQIDVVPADEIPSDKMAVDIGPETEKAYANAIKGAKSVFWNGPMGVFEIKGLELGTKAVAQALTEVDGLSVVGGGDSASAVRTLGFADDQFGHISTGGGASLELMEGKELPGIAVLKENN

SEQ ID NO: 56818 - DNA, 1212 bp, Leifsonia xyli subsp. xyli str. CTCB07
  CDS (1)..(1212): transl_table=11
gtggcgcttcgcaccctcgactcactcggttcgctcgcgggcaagcgcgtcgtcgtccgctgtgatctgaacgtccccctgaaggacgggaagatcacggacgacggccgtgtgcgcgcgtccatccccaccctccacgctctcatcgcccagggcgcgaaggtcgcgatcgtctcgcacctgggccgccccgagggcgcgcccgatgcgcagtacagcctggctccggtcgcccagcggctctccgagctgctgggcaagccggtgacctttgccagcgacaccgtcggcgccggtgcggcggaggccgtctccggactggaggacggcgatgtcgctctgctggagaacctccggttcaacccgggggagaccagcaaggacgagggcgagcgtgaggcgtttgccgccgagctcgccgcgttcggcgacgccttcgtctccgacggcttcggcgtcgtccatcgcaagcaggcgagcgtctacgagctggccaaggcgctcccgagcgccgcgggcgcgctcatcgcgaccgagctcgacgtgctcgaccgcctcaccgagaaccctgagcggccctacacggtcctgctcggcggctcgaaggtgtcggacaagctcggcgtcatcggccacctgctgccgcgcgtcgactcgctgctcatcggcggcgggatgctgttcacctttctcgccgcgctcggccaccgggtcggctccagcctcctcgaggcggaccagatcggcaccgtcaagggctacctggagcaggcgaagcagctgggcgtggagatcgtgctgccgcgagatgtcgttgtcgcctccaggttcggcgtggatgcggagcacctcgttcgtcccgtcgaccgcatcgaggacaccgggtggggcacctctggtctcggtctggacatcggaccggagaccgcagaggtgttctcggagcgcatccgcgctgcgcgcacggtgttctggaacggcccgatgggcgtgttcgagctggccccgttcgcggccggaaccaaggccgtggcgcaggcgctcaccgaggtcgacggcctcggcgtcgtcgggggcggtgactcggccgcggcggttcatgcgctcggcttctcggacgaccagttcgggcatatttctaccggtggcggtgcgagcctcgaattccttgagggcaagcgcctgccgggtctggaggttttgggttggtag

SEQ ID NO: 56819 - protein, 403 aa, Leifsonia xyli subsp. xyli str. CTCB07
MALRTLDSLGSLAGKRVVVRCDLNVPLKDGKITDDGRVRASIPTLHALIAQGAKVAIVSHLGRPEGAPDAQYSLAPVAQRLSELLGKPVTFASDTVGAGAAEAVSGLEDGDVALLENLRFNPGETSKDEGEREAFAAELAAFGDAFVSDGFGVVHRKQASVYELAKALPSAAGALIATELDVLDRLTENPERPYTVLLGGSKVSDKLGVIGHLLPRVDSLLIGGGMLFTFLAALGHRVGSSLLEADQIGTVKGYLEQAKQLGVEIVLPRDVVVASRFGVDAEHLVRPVDRIEDTGWGTSGLGLDIGPETAEVFSERIRAARTVFWNGPMGVFELAPFAAGTKAVAQALTEVDGLGVVGGGDSAAAVHALGFSDDQFGHISTGGGASLEFLEGKRLPGLEVLGW

SEQ ID NO: 56820 - DNA, 1179 bp, Desulfotalea psychrophila LSv54
  CDS (1)..(1179): transl_table=11
atgaagtcgttacgtgaattggaactcgccggtaagcgagtcttggtacgggtggattttaatgtgccgatggatgataagcaacgaataaccgacgatattcgtattcgtatggttcttcccaccctacgctatgtgcttgaacagggtggccgcttaattatctgttctcatatgggtaggcccaagggcaagcgagttgaggagtatagtcttgctcccatagcccgtcatcttgcaggtctgctaggcagagatgtcggcattgctccggattgtattggtgctgaggtggaggcgcaggtggcagcccttggcgtaggcgaggtgcttcttttgcaaaaccttcgtttttacggcgaagaaacggaaaatgatgccgtctttgccggtaagcttgcaggacttgccgatgtctatgtaaatgatgcctttgccgtatctcatcgagcccatgcctccgtggttggagttgccgagcgggtagctgaaaaatgtgccggctttctcctgcagacagagatagattattttcataaatcgatgaatgaccccattcgtcccctggtggccctggtgggtggagccaaggtctcctctaagataggtgccctggaaaatatgcttggtaaggtcgataagatgattattggcggtgccatggccaataccttcttaatgagtcagggcgtcgatgttggtgcctcaaaggtggaggatgacctgcttgtcaccgccaggaattttctgcaggcagcaggggagcgggggatgaaggtctatcttcccgttgattttgtggttgcagatcgttttgccgccgatgcggtgcacaagactgtgcccgccgatagtgttccggagggttggatggccctcgatgtcggcccggcaagtagtattctctttcgagaggccctgcagggtgccggtaccatcgtctggaatgggcccatgggcgcttttgagatggatgcctttgccggagggaccatgagtctctgtcgtgatgttgccgcttcgcaggcgctttcgatcactggtggtggggattctaatgccgcagtgaagaaatcaggcgaggcagataatatctcctatatgtccaccggtggaggggccttcttgcagttgatggaggggaaaaccctacctggggtggatgccttggaagcataa

SEQ ID NO: 56821 - protein, 392 aa, Desulfotalea psychrophila LSv54
MKSLRELELAGKRVLVRVDFNVPMDDKQRITDDIRIRMVLPTLRYVLEQGGRLIICSHMGRPKGKRVEEYSLAPIARHLAGLLGRDVGIAPDCIGAEVEAQVAALGVGEVLLLQNLRFYGEETENDAVFAGKLAGLADVYVNDAFAVSHRAHASVVGVAERVAEKCAGFLLQTEIDYFHKSMNDPIRPLVALVGGAKVSSKIGALENMLGKVDKMIIGGAMANTFLMSQGVDVGASKVEDDLLVTARNFLQAAGERGMKVYLPVDFVVADRFAADAVHKTVPADSVPEGWMALDVGPASSILFREALQGAGTIVWNGPMGAFEMDAFAGGTMSLCRDVAASQALSITGGGDSNAAVKKSGEADNISYMSTGGGAFLQLMEGKTLPGVDALEA

SEQ ID NO: 56822 - DNA, 1182 bp, Borrelia garinii PBi
  CDS (1)..(1182): transl_table=11
atgtcaataaaaacagtaaaagactttaatagctttgcgggcaagcgagctttagtaagatgtgattttaatgttcccctaaaagaggggaacattagcgatgatactagaattaaggctgcattgcccacaatagaatacctgaaagaaaaaggagctagaattgtacttataagtcatttgggtagaccagagggcaaaaaaaatcttaaatattctcttaaacctgttgccaataaattgtcagagcttttgggccaggatgtcaagatgctttctgattgcattggaagagaaattgtaaataatactttacaaatgaaagatggtgatgttgtattgcttgaaaatgtaaggttttatgcggaagaagagaaaaacgataaaaattttgcaaaaaaactttctgagaatggagatgtttttgtaaatgatgcctttggtgcagctcatagggctcatgcttcaacggtgggggtttctgattatttaccatctgttggtggatttttaatggagaaagaagacaaatttcttggagaagtattaaaaaatcccgaaagaccatttgtttcgattattggtgggtctaaggtttcttcaaagattgcagtactggaatcacttttatcaaagtcaaatgtagttgtgattggcggtggaatggcctatacttttttacattccaaaggatattctataggcaaatctcttttagagagcgaatatattgatatagcttcttcttttttaaagaaagcaaaagagttggatgttaaagtaattttaccgcttgatcacattgtagcggacgattttaataaaaattctactcctgagtatattgattcctttgatattcctgaaaataagattggcatggatgttggaggtaagactttaaaagaaatcgaaaaggttataaaaactgctaagactataatttggaatggccctcttggtgtatttgaatttgattcattttcaaaaggaactgcaatggttgccgaaatggtagcatcttgcgcaggtttaactattgttggtggtggagattctgttgcagctgttaataaatttaatttatctgataagatcactcatgtttcaacaggtggcggtgcatcacttgaatatcttgaaggaaagattttaccaggtattaaggttttggagaagtaa

SEQ ID NO: 56823 - protein, 393 aa, Borrelia garinii PBi
MSIKTVKDFNSFAGKRALVRCDFNVPLKEGNISDDTRIKAALPTIEYLKEKGARIVLISHLGRPEGKKNLKYSLKPVANKLSELLGQDVKMLSDCIGREIVNNTLQMKDGDVVLLENVRFYAEEEKNDKNFAKKLSENGDVFVNDAFGAAHRAHASTVGVSDYLPSVGGFLMEKEDKFLGEVLKNPERPFVSIIGGSKVSSKIAVLESLLSKSNVVVIGGGMAYTFLHSKGYSIGKSLLESEYIDIASSFLKKAKELDVKVILPLDHIVADDFNKNSTPEYIDSFDIPENKIGMDVGGKTLKEIEKVIKTAKTIIWNGPLGVFEFDSFSKGTAMVAEMVASCAGLTIVGGGDSVAAVNKFNLSDKITHVSTGGGASLEYLEGKILPGIKVLEK

SEQ ID NO: 56824 - DNA, 1179 bp, Symbiobacterium thermophilum IAM 14863
  CDS (1)..(1179): transl_table=11
atggcgctgatgaccgtacgcgacatcgatgtcaagggcaagcgcgtgttcgtgcgtgtcgacttcaacgtcccgctggaagatggtcggatcacggatgacacccggatcagggcggccgtgcccaccatccggtacctggtggaggaaggggcggtcgctgtgctggcgtcgcacctgggccggcccaagggccagcggaacgagaagtactccctcgccccctgtgcccggcgcctgtccgagctgctgggccgggaggtcgtgttcgcccccgactgcatcggcgaggaggtcgagcggctggtggccgaacagccgcccgggtccgtggtcctgctcgagaacgtccgtttctacgcggaggaggagaagaacgaccccgagttcgccgcgaagctcgcgcgcctcggcgagatcttcgtcaacgacgcctttggcaccgcgcaccgggcgcacgcctcgacccggggggtggccgaccacatgccggttcgggtggcaggcttcctcatgcagaaagaggtcgacatcatgggcaaggccctgtccgaccccgaccggcccttcgtggcgatcatcggcggcgccaaggtctcggataagattatggtgatcgagaacctgttgaccaaggtcgaccggctcatcatcggcggcggcatggccaacaccttcctgcgggccaggggcttcgccaccggcaagtcgctggtggaggaggaccgggtcgacaccgcccgggagctgctggccaagggcggcgacaagatcctcctgcccaccgatctggtggtcgcctcggagttcaaggccgacgccgagcagaaggtcgttccggtggacgccatccccgagggctggatggccctggacatcgggccggagaccgcccgggcctttgccgacgtgatccgcggggctcacaccgtcgtgtggaacggcccgatgggcgtgtttgagatggagcccttcgcgcgcggcaccttcgcggtcgcccaggcgatggcggactgcgagggcgtgacgatcgtgggcggcggcgactccgtggcggctgtcgaggcggcgggcctggccgatcgcatgacccacgtctccacgggcggcggcgcctcgctggagttcctggaggggaaggaactgcccggcgttgcctgcctcgctgtgaagccgtga

SEQ ID NO: 56825 - protein, 392 aa, Symbiobacterium thermophilum IAM 14863
MALMTVRDIDVKGKRVFVRVDFNVPLEDGRITDDTRIRAAVPTIRYLVEEGAVAVLASHLGRPKGQRNEKYSLAPCARRLSELLGREVVFAPDCIGEEVERLVAEQPPGSVVLLENVRFYAEEEKNDPEFAAKLARLGEIFVNDAFGTAHRAHASTRGVADHMPVRVAGFLMQKEVDIMGKALSDPDRPFVAIIGGAKVSDKIMVIENLLTKVDRLIIGGGMANTFLRARGFATGKSLVEEDRVDTARELLAKGGDKILLPTDLVVASEFKADAEQKVVPVDAIPEGWMALDIGPETARAFADVIRGAHTVVWNGPMGVFEMEPFARGTFAVAQAMADCEGVTIVGGGDSVAAVEAAGLADRMTHVSTGGGASLEFLEGKELPGVACLAVKP

SEQ ID NO: 56826 - DNA, 1170 bp, Mannheimia succiniciproducens MBEL55E
  CDS (1)..(1170): transl_table=11
atgtcagtaatcaaaatgaccgatcttgatttagccggcaaacgtcttttcatccgcgccgatttaaacgtgccggtaaaagacggcaaagtgacttcagatgcgcgtatccgcgcaacaattcctactttaaaattagccttggaaaaaggcgccaaagtgatggtaacttctcacttgggccgtccgactgaaggtgaattcaaacctgaagactcattacaaccggtagttgattacttaaaagatgcaggatttaacgtacgcctagcacaaaactacttagacggcgttgaagtaaacgaaggcgaaatcgttgtattggaaaacgttcgtatcaacaaaggcgaaaagaaaaacgatcctgaattgggtaaaaaatatgccgcactttgcgacgtattcgtaatggatgcttttggtacggctcaccgtgcgcaggcttcaacttacggtgttgccgaatatgcgccggttgcttgcgcaggcccgttattagcggctgaattggatgctttgggtaaagccttaaaagaacctcaacgtcctatgcttgcaattgtaggcggttcaaaagtgtctactaaattaactgttttagacagcctttcaaaaattgccgatcaattaatcgtgggcggcggtattgccaatacctttattgccgctgaaggccataacgtcggtaaatctttatatgaagaagatttaattcctgaagcaaaacgtttagcggcagcaactaatatccctgttcctgtggatgtgcgtgtgggtacggaattctctgaaaatgcgccggcaaccgaaaaatcggtaaccgaagttcaagccgacgaatcaattttcgatatcggcgataaatccgcagaagaattggcgaaaattatcaaatccgctaaaaccattctttggaacggtccggtgggcgtgtttgaattccctaatttccgtaaaggtaccgaagtgatttctaacgcgattgcggaagcgactgcaaacggcgcattttctatcgccggtggcggtgataccttagccgctatcgatttattcggtatcaaagataaaatttcttatatttcaaccggcggcggtgcgttcttagaatttgttgaaggtaaggttttacctgcggtggaaatcttagaaaaacgtgcaaacggctaa

SEQ ID NO: 56827 - protein, 389 aa, Mannheimia succiniciproducens MBEL55E
MSVIKMTDLDLAGKRLFIRADLNVPVKDGKVTSDARIRATIPTLKLALEKGAKVMVTSHLGRPTEGEFKPEDSLQPVVDYLKDAGFNVRLAQNYLDGVEVNEGEIVVLENVRINKGEKKNDPELGKKYAALCDVFVMDAFGTAHRAQASTYGVAEYAPVACAGPLLAAELDALGKALKEPQRPMLAIVGGSKVSTKLTVLDSLSKIADQLIVGGGIANTFIAAEGHNVGKSLYEEDLIPEAKRLAAATNIPVPVDVRVGTEFSENAPATEKSVTEVQADESIFDIGDKSAEELAKIIKSAKTILWNGPVGVFEFPNFRKGTEVISNAIAEATANGAFSIAGGGDTLAAIDLFGIKDKISYISTGGGAFLEFVEGKVLPAVEILEKRANG

SEQ ID NO: 56828 - DNA, 1191 bp, Legionella pneumophila subsp. pneumophila str. Philadelphia 1
  CDS (1)..(1191): transl_table=11
atgaacctgattaaaatgagcgacattgatctgtctggcaaaagagttctgattcgtgaggatttaaatgtcccgatcaaagacggtatgattaccagtgatcaaagattgcaagcggccctgcctacaatcaaatccgctttggacagtggcgcagcagtaatcgtattgtctcatcttgggcgtccggaggaaggcaaatacgaaaaaaaattctctttggagcctgttgctgattatttaagggaaaacctggaatatcctgttcgcttcgtcaaagattacctgagcggcgtgggtgtaaaccctggggaattggtcgtatgcgaaaatgtccgatttaatcccggtgaaaaagccaatgacgaagctttggcaaaaaaactggcaagcctttgtgatgtctttgtcatggatgcttttggcacggcacacagggcacaagcgtctacctatggtgtcgctcaatatgctccagttgccgttgctggtcctctgctaatccgtgaacttgaagcgttaaaccaagtgcttaaagcgcctaaaaaacctatcgtcgctattgttggaggagccaaagtctcatccaagctcagtctattgaaacaattggtgggtatggttgatgttcttatccctggcggcggtattgccaatacttttctgaaagcccaagggtttgaaattggtatttccctttacgaacctgatttattggatgaggctcgccatatccttattctggccaaagagaaaggttgccaaattcctctacccaccgacgttgtagtaggcaaaacatttagtgaaacctgccctgctttcaacaaatctctgtctaatgtggctgcggacgatatgatccttgatattggcccagaaaccataagagattatgtagacctcatccatgacgccaacaccatcatctggaatggtccggttggtgtattcgaattcccgcagtttgcttatggaactagagccattgctatagcgattgccgagagtgatgccttttctattgctggtggtggtgataccttggctgctgttgatctttatgatttgaatcaacaaatttcttatatttccacaggaggtggggcatttctcgaatgtctggaaggaaaaaccttgcctgctgttgctattttgcaggagcgcgcaaaacatgttaagacgaactaa

SEQ ID NO: 56829 - protein, 396 aa, Legionella pneumophila subsp. pneumophila str. Philadelphia 1
MNLIKMSDIDLSGKRVLIREDLNVPIKDGMITSDQRLQAALPTIKSALDSGAAVIVLSHLGRPEEGKYEKKFSLEPVADYLRENLEYPVRFVKDYLSGVGVNPGELVVCENVRFNPGEKANDEALAKKLASLCDVFVMDAFGTAHRAQASTYGVAQYAPVAVAGPLLIRELEALNQVLKAPKKPIVAIVGGAKVSSKLSLLKQLVGMVDVLIPGGGIANTFLKAQGFEIGISLYEPDLLDEARHILILAKEKGCQIPLPTDVVVGKTFSETCPAFNKSLSNVAADDMILDIGPETIRDYVDLIHDANTIIWNGPVGVFEFPQFAYGTRAIAIAIAESDAFSIAGGGDTLAAVDLYDLNQQISYISTGGGAFLECLEGKTLPAVAILQERAKHVKTN

SEQ ID NO: 56830 - DNA, 1260 bp, Bacteroides fragilis YCH46
  CDS (1)..(1260): transl_table=11
atgcagacaattgacaatttcaattttgccggtaaaaaggcattcgttcgcgtggacttcaatgtacccttggacgaaaacttcaacattacagacgacactcgtatccgtgctgcacttcctaccctgaagaagattctggcagacggtggtagcatcatcatcggttctcacctgggccgtccgaaaggcgttgctgacaaattctctctgaaacacattgttaagcatgtatcagagttactgggcgttgaagttcagtttgccaacgactgtatgggcgaagaagctgctgtaaaagccgctgctctgcaaccgggcgaagtgctgttgcttgaaaaccttcgcttctacgctgaagaagaaggcaaaccaagaggattggctgaagacgcaaccgacgaagaaaaagccgcagccaagaaagccgtaaaagagagccagaaagaatttaccaagaaattggcttcgtatgcagactgctacgtaaacgacgcattcggtacagctcaccgtgctcatgcttctacagcactgatcgctaaatacttcgacaccaacaataagatgtttggctacctgatggaaaaagaagtgaaagccgttgataagatattgaacgacatcaagcgtccgtttactgccatcatgggtggatcaaaagtatcttctaagatcgaaatcatcgaaaacctgctgaacaaggtagacaacctgatcatcacaggcggtatgacttacactttcaccaaagcaatgggtggacagatcggtctgtctatctgcgaagatgacaaactggatctggctcgcgaactgatgcagaaagccaaagacaaaggtgtaaatctggtattagctgttgacgctaagattgctgacgctttctctaacgatgccaatactaaattctgcccggttaacgaaattcctgacggatgggaaggtcttgacatcggtccgaaatctgaagagatctttgccgaagtgatcaagaattctaagacaattctttggaatggtccgacaggtgtattcgaattcgaaaacttcactcacggctctcgttcagtaggcgaagctatcgttgaagctactaagaacggcgctttctcactcgttggcggtggcgactctgtagcttgtgtcaacaagttcggtctggcagacggtgtatcttatgtttctacaggcggtggagcactgctcgaagcaatcgaaggaaaagttcttccgggtattgccgctatccaggaataa

SEQ ID NO: 56831 - protein, 419 aa, Bacteroides fragilis YCH46
MQTIDNFNFAGKKAFVRVDFNVPLDENFNITDDTRIRAALPTLKKILADGGSIIIGSHLGRPKGVADKFSLKHIVKHVSELLGVEVQFANDCMGEEAAVKAAALQPGEVLLLENLRFYAEEEGKPRGLAEDATDEEKAAAKKAVKESQKEFTKKLASYADCYVNDAFGTAHRAHASTALIAKYFDTNNKMFGYLMEKEVKAVDKILNDIKRPFTAIMGGSKVSSKIEIIENLLNKVDNLIITGGMTYTFTKAMGGQIGLSICEDDKLDLARELMQKAKDKGVNLVLAVDAKIADAFSNDANTKFCPVNEIPDGWEGLDIGPKSEEIFAEVIKNSKTILWNGPTGVFEFENFTHGSRSVGEAIVEATKNGAFSLVGGGDSVACVNKFGLADGVSYVSTGGGALLEAIEGKVLPGIAAIQE

SEQ ID NO: 56832 - DNA, 1194 bp, Burkholderia mallei ATCC 23344
  CDS (1)..(1194): transl_table=11
atgagccaagtaaagcgtcttaccgacctgatcgccgaaggcaagctgtccggcaaacgcgtgttcatccgcgccgatctgaacgtgccgcaggacgatcacggcaacatcaccgaagacacgcgcgtgcgcgcgtcggtgcccgcgatccaggcggcgctcgacgcgggcgcggccgtgatggtcacgtcgcacctcggccgcccgacggaaggcgagttcaagcccgaggattcgctcgcgcccgtcgcgaagcgcctggccgagctgctcggccgcgatgtgccgctcgtcgcgaactgggtcgagaacggggtcgaggtcgcgcccgggcaggtcgtgctgctcgagaactgccgcgtgaacaagggcgagaagaagaactcggacgagctcgcgcagaagatggcgaagctctgcgacgtctacgtgaacgacgcgttcggcaccgcgcaccgcgcggaggcgaccacccacggcatcgcgaagtacgcccccgtcgcgtgcgcgggtccgctgctcgcggccgagctcgacgcgctcggcaaggcgctcggcaacccgaagcgcccgctggtggcgatcgtcgcgggctcgaaggtgtcgacgaagctgacgatcctgaagtcgctcgcggagaaggtcgatcaattgatcgtcggcggcggcatcgcgaacacgttcatgctcgcggcggggcttgcgatcggcaagtcgctcgccgaggccgatctcgtcggcgaggcgaaggcgatcatcgacgaagcccgcaagcgcggcgcgtcggtgccgatcccgaccgacgtcgtcgtcgcgaaggaattctcgccgacggccgccgccaccgtgaagaaggtcgccgacatcgaagccgacgacatgatcctcgacatcggcccggacaccgcgaaggcgctcgccggccagctcgagaaggcgggcacgatcgtctggaacggcccggtcggcgtgttcgagttcgaccagttcggcaacggcacgaagacgctcgccgacgcgatcgcgagctcggccgcgttctcgatcgcgggcggcggcgacacgcttgccgcgatcgcgaagtacggcatccacgacaaggtcagctacatctcgacgggcggcggcgcgttcctcgaattcctcgagggcaagaagctgcccgccgtcgaagtgctggaaacgcgcgcgtaa

SEQ ID NO: 56833 - protein, 397 aa, Burkholderia mallei ATCC 23344
MSQVKRLTDLIAEGKLSGKRVFIRADLNVPQDDHGNITEDTRVRASVPAIQAALDAGAAVMVTSHLGRPTEGEFKPEDSLAPVAKRLAELLGRDVPLVANWVENGVEVAPGQVVLLENCRVNKGEKKNSDELAQKMAKLCDVYVNDAFGTAHRAEATTHGIAKYAPVACAGPLLAAELDALGKALGNPKRPLVAIVAGSKVSTKLTILKSLAEKVDQLIVGGGIANTFMLAAGLAIGKSLAEADLVGEAKAIIDEARKRGASVPIPTDVVVAKEFSPTAAATVKKVADIEADDMILDIGPDTAKALAGQLEKAGTIVWNGPVGVFEFDQFGNGTKTLADAIASSAAFSIAGGGDTLAAIAKYGIHDKVSYISTGGGAFLEFLEGKKLPAVEVLETRA

SEQ ID NO: 56834 - DNA, 1194 bp, Burkholderia pseudomallei K96243
  CDS (1)..(1194): transl_table=11
atgagccaagtaaagcgtcttaccgacctgatcgccgaaggcaagctgtccggcaaacgcgtgttcatccgcgccgatctgaacgtgccgcaggacgatcacggcaacatcaccgaagacacgcgcgtgcgcgcgtcggtgcccgcgatccaggcggcgctcgacgcgggcgcggccgtgatggtcacgtcgcacctcggccgcccgacggaaggcgagttcaagcccgaggattcgctcgcgcccgtcgcgaagcgcctggccgagctgctcggccgcgatgtgccgctcgtcgcgaactgggtcgagaacggggtcgaggtcgcgcccgggcaggtcgtgctgctcgagaactgccgcgtgaacaagggcgagaagaagaactcggacgagctcgcgcagaagatggcgaagctctgcgacgtctacgtgaacgacgcgttcggcaccgcgcaccgcgcggaggcgaccacccacggcatcgcgaagtacgcccccgtcgcatgcgcgggcccgctgctcgcggccgagctcgacgcgctcggcaaggcgctcggcaacccgaagcgcccgctggtggcgatcgtcgcgggctcgaaggtgtcgacgaagctgacgatcctgaagtcgctcgcggagaaggtcgatcaattgatcgtcggcggcggcatcgcgaacacgttcatgctcgcggcggggctcgcgatcggcaagtcgctcgccgaggccgatctcgtcggcgaggcgaaggcgatcatcgacgaagcccgcaagcgcggcgcgtcggtgccgatcccgaccgacgtcgtcgtcgcgaaggaattctcgccgacggccgccgccaccgtgaagaaggtcgccgacatcgaagccgacgacatgatcctcgacatcggccaggacaccgcgaaggcgctcgccggccagctcgagaaggcgggcacgatcgtctggaacggcccggtcggcgtgttcgagttcgaccagttcggcaacggcacgaagacgctcgccgacgcgatcgcgagctcggccgcgttctcgatcgcgggcggcggcgacacgctcgccgcgatcgcgaagtacggcatccacgacaaggtcagctacatctcgacgggcggcggcgcgttcctcgaattcctcgagggcaagaagctgcccgccgtcgaagtgctggaaacgcgcgcgtaa

SEQ ID NO: 56835 - protein, 397 aa, Burkholderia pseudomallei K96243
MSQVKRLTDLIAEGKLSGKRVFIRADLNVPQDDHGNITEDTRVRASVPAIQAALDAGAAVMVTSHLGRPTEGEFKPEDSLAPVAKRLAELLGRDVPLVANWVENGVEVAPGQVVLLENCRVNKGEKKNSDELAQKMAKLCDVYVNDAFGTAHRAEATTHGIAKYAPVACAGPLLAAELDALGKALGNPKRPLVAIVAGSKVSTKLTILKSLAEKVDQLIVGGGIANTFMLAAGLAIGKSLAEADLVGEAKAIIDEARKRGASVPIPTDVVVAKEFSPTAAATVKKVADIEADDMILDIGQDTAKALAGQLEKAGTIVWNGPVGVFEFDQFGNGTKTLADAIASSAAFSIAGGGDTLAAIAKYGIHDKVSYISTGGGAFLEFLEGKKLPAVEVLETRA

SEQ ID NO: 56836 - DNA, 1176 bp, Methylococcus capsulatus str. Bath
  CDS (1)..(1176): transl_table=11
atggctttcaaacgcatgaccgacatcgatctcgccggcaagcgcgtcctgatccgggaagacttcaacgtccccgtcaaagatggccgggtcaccagcgacgcccgcatccgcgccgccctcccgaccatccgccacgcgctggacgccggcgctgcggtgatgctgatgtcgcatctcggccgccccaccgaaggggaatatgccgaggagttttccatgaaacccgttgccgaccggctgtccgaactattggggcagccggtgacactggtgaaggactacctgggtggcgccgacccggcggtcgggtcggtcgtgctattcgagaacgtgcgtttcaacaagggcgagaagaaggacgacgaggtcttggcgcgccagctcgccgcgctgtgcgacgtctacgtgatggatgccttcggtacggcgcaccgcgccgaggcttcgacgcacggcgtgggcaaatacgctcccaccgcctgtgccggcctgctgctggcgacggaattggatgcactgggcagagcgctccacgacccggcgcgccccttggtcgccatcgtcggcggctcgaaagtatcgaccaaactgacggttctggattccctttcgcaggtggtcgatcagctcatcgtcggtggcggtatcgccaacaccttcatcaaagccgccggcttcaatgtcgggaaatcactgtacgaggaggacctggtggccgaagccaggcgcctgatggaagccgccaaggccaagggcggggagatccccgtaccggtcgacgtggtggtcggcaaacgcttcgatgccgcggaacccgccatggtcaagagcgtcgcagacatcgccgaggacgacatgatcctcgacatcggtccggagaccagccgccgctacgccgagttcatcggccgcgccggcacggtggtctggaatggccccgtaggtgtcttcgaattcgaccagttcggggaaggcacccgccgattgggtctggccatcgccgaaagccatgcattttccatcgccggagggggagacacactggcagccatcgacaaatacggcatcgccgaccgcatctcctacatctcgacggggggcggcgccttcctggaatttctcgaaggcaagcaactgccggcggttgccatgctggagagccgcgcggactga

SEQ ID NO: 56837 - protein, 391 aa, Methylococcus capsulatus str. Bath
MAFKRMTDIDLAGKRVLIREDFNVPVKDGRVTSDARIRAALPTIRHALDAGAAVMLMSHLGRPTEGEYAEEFSMKPVADRLSELLGQPVTLVKDYLGGADPAVGSVVLFENVRFNKGEKKDDEVLARQLAALCDVYVMDAFGTAHRAEASTHGVGKYAPTACAGLLLATELDALGRALHDPARPLVAIVGGSKVSTKLTVLDSLSQVVDQLIVGGGIANTFIKAAGFNVGKSLYEEDLVAEARRLMEAAKAKGGEIPVPVDVVVGKRFDAAEPAMVKSVADIAEDDMILDIGPETSRRYAEFIGRAGTVVWNGPVGVFEFDQFGEGTRRLGLAIAESHAFSIAGGGDTLAAIDKYGIADRISYISTGGGAFLEFLEGKQLPAVAMLESRAD

SEQ ID NO: 56838 - DNA, 1233 bp, Nocardia farcinica IFM 10152
  CDS (1)..(1233): transl_table=11
atggctgtcaagacactccaggatctcctgaacgagggtgtcgaaggtcggggcgtgctggtgcgctccgacctgaacgtccccctcgacgacaacgggcagatcaccgatcccggccgcatcatcgcctcgatcccgacgctgaaggccctggtcgaggcgggcgccaaggtggtcgtcaccgcgcacctcggccgtcccaagggcgagccggacccgaagttctcgctcgcgccggtggcggcgaagctggccgaactgctcggccgcaacgtgcagctggccggtgacgtggtgggctacgacgcgctctcgcgctcggagggcctcaccgacggtgacgtgctgctgctggagaacgtgcgtttcgatccgcgcgagaccagcaaggacgaggccgagcgcggcaagctcgcggcggccctggtcgagctggtcggcgaggacggcgcgttcgtctccgacggtttcggcgtggtgcatcgcaagcaggcctcggtctacgacgtggccaagttgctgccgcactacgcgggcacgctggtcgccgccgaggtggacgtgctggccaagctcaccgacaacaccgagcggccctacgccgtggtgctgggcggctcgaaggtctccgacaagctcgccgtcatcgaggcgctggcgcccaaggtcgacaccctggtgatcggcggcggcatgtgcttcaccttccttgccgcacagggcctttcggtcggctcctcgctgctgcaggaggagatgatcgacacctgcaaggggctgctcgagcggtacgccgacgtcatccacctgccgcgcgacgtggtggtcgccgactcgttctccgccgacgcggagtcgaagtgcgtgccggccaacgagatcccggacggctggatgggtctggacatcggcgcggagtcggtggaccggttcgcggcgctgctgaccgaggccaagacggtgttctggaacggcccgatgggcgtgttcgagttcgagaagttcgccgcgggcacccgcggggtcgccgaggcgatcgtggcggccaccggcaagggggcgttcaccgtcgtcggcggcggcgactcggccgcggcggtccgcgcgctcggcctgcccgaggacggtttctcgcacatctccaccggcggcggcgcgtcgctggaatacctggagggcaaggaacttcccggcatcagtgtcctcgaggacaccgctccggagggcagctga

SEQ ID NO: 56839 - protein, 410 aa, Nocardia farcinica IFM 10152
MAVKTLQDLLNEGVEGRGVLVRSDLNVPLDDNGQITDPGRIIASIPTLKALVEAGAKVVVTAHLGRPKGEPDPKFSLAPVAAKLAELLGRNVQLAGDVVGYDALSRSEGLTDGDVLLLENVRFDPRETSKDEAERGKLAAALVELVGEDGAFVSDGFGVVHRKQASVYDVAKLLPHYAGTLVAAEVDVLAKLTDNTERPYAVVLGGSKVSDKLAVIEALAPKVDTLVIGGGMCFTFLAAQGLSVGSSLLQEEMIDTCKGLLERYADVIHLPRDVVVADSFSADAESKCVPANEIPDGWMGLDIGAESVDRFAALLTEAKTVFWNGPMGVFEFEKFAAGTRGVAEAIVAATGKGAFTVVGGGDSAAAVRALGLPEDGFSHISTGGGASLEYLEGKELPGISVLEDTAPEGS

SEQ ID NO: 56840 - DNA, 1194 bp, Rhodobacter sphaeroides 2.4.1
  CDS (1)..(1194)
atgggctggaagacactcgacgacatggatcttgccggcaaggtcgtgctggtgcgcgtggatgtgaacgtgccgatggaaaatggcgaagtcaccgacgccacccggatcgagaagatcgtccccaccgtcgaggatatcctgaagaagggcggcaagcccgtcctgctcgcccatttcggccgtccgaagggcaaggtcgtggacgagatgagcctccgcctcgtgctgcccgcgctgcagaacgcgctgcctggcaccaaggtgagctttgccgccgactgcgtgggccccgagcccgagcaggcggtggccgccatgctcgagggcgaggtgctcctcctcgagaacacccgcttccatgccggcgaggagaagaacgaccccgagctggccgccgcgatggcgaagctggggcaggtctatgtcaacgatgccttctcggccgcgcaccgcgcccatgcctcgaccgagggcctcgcccgtcttctgccctcggccgccggccggctgatggaggccgagctgaaggcgctcgaagccgctctcggccatcccgagcgccccgttgtggccgtggtgggcggggccaaggtctcgaccaagctcgaccttctgggcaatctcgtgggccgggtcgatcatctggtgatcggcggcggcatggccaacaccttcctcgtggcgcaggggatcgaggtcggcaagtcgctggccgagcgcgacatggccgatacggcgcgcgagatcctctccaaggcgaaggccgcgggctgcacgatccatcttccgctcgatgtggtggtggcgcgcgagttcaaggcgggggccgcgaacgagacggtcgagacggcggcctgcccggccgacgcgatgatcctcgatgccggtccgaagaccgtggccgccctctccgaagtgttcgcctcggctaagacgctgatctggaacggcccgctcggcgccttcgagatcgagcccttcgacgccgcgacgaatgcggcggcgcttcaggtggcgcagctcaccaaggcgggccagctcatttcggtcgcgggcggcggcgatacggtggccgccctcaacaaggcgggcgcggccgaaggcttctcctacatctcgacggcgggcggtgccttcctcgaatggatggagggcaaggagctgcccggagtggccgcgctcacggtctga

SEQ ID NO: 56841 - protein, 397 aa, Rhodobacter sphaeroides 2.4.1
MGWKTLDDMDLAGKVVLVRVDVNVPMENGEVTDATRIEKIVPTVEDILKKGGKPVLLAHFGRPKGKVVDEMSLRLVLPALQNALPGTKVSFAADCVGPEPEQAVAAMLEGEVLLLENTRFHAGEEKNDPELAAAMAKLGQVYVNDAFSAAHRAHASTEGLARLLPSAAGRLMEAELKALEAALGHPERPVVAVVGGAKVSTKLDLLGNLVGRVDHLVIGGGMANTFLVAQGIEVGKSLAERDMADTAREILSKAKAAGCTIHLPLDVVVAREFKAGAANETVETAACPADAMILDAGPKTVAALSEVFASAKTLIWNGPLGAFEIEPFDAATNAAALQVAQLTKAGQLISVAGGGDTVAALNKAGAAEGFSYISTAGGAFLEWMEGKELPGVAALTV

SEQ ID NO: 56842 - DNA, 1212 bp, Lactobacillus gasseri
  CDS (1)..(1212)
atggctaaattaatcgtttcagaccttgatcttaaaggtaaaaaagttttagttcgtgttgactttaatgttccaattaaaaatggtgttattggtgatgacaaccgtatcgttgctgcattgccaactattaagtacattattgaacatggtggtaaagcaatcttactcagtcacttaggccgtgtaaagtcagatgctgacaagaaggaattatcattacgtccagtagcagaacgcttaagtgagttattaaagaagcctgtaacttttgtaccagaaaatgaaggtaaagaagttgaagaaaccatcgataaaatgaaagatggcgacgttattgttcttgaaaacactagattccaagatattgacaatgactttggtaaacgtgaatctaagaacgatccaaaacttggcgaatactgggcaagtcttggcgatgtatttgtaaacgatgcatttggtactgctcacagaagtcacgcttcaaatgtaggtatcgcaactgctatgaagaaggctggtaaacctgcagcagctggtttcttacttgaaaaagaaatcaagttcttaggtgatgctgttgaaaacccagttcacccatttgtaactatccttggcggtgcaaaagtatcagacaagattggtgttattgaaaacttaattcctaagtcagatcacattttaattggtggtggtatggcttacacattcttagctgcacaaggccacaagattggtaaatcattatttgaagctgataaagttgaacttgcaaaagaattattagcaaaagctggcgataagattgtattgcctgtagataatgtcgcagcaactgaattctcaaacgatgcacctcacgaagttgttggtgatgatattcctgataacgaaatgggtcttgacattggtcctaagactgttgagaaatttagagacatcttaaaggatgctaagaccgtcgtatggaacggacctatgggtgcattcgaaatgccaaactacgcagaaggtaccttggaagttggtcgcgcattagctgatttgaaagatgccgttactattatcggtggtggtgactcaactgctgctgctaagcaattgggaattgctcctaagatcagccacatttctactggtggtggtgcttcacttaactaccttgaaggtaaagaattaccaggaatcgcttgtgtttctgacaagtaa

SEQ ID NO: 56843 - protein, 403 aa, Lactobacillus gasseri
MAKLIVSDLDLKGKKVLVRVDFNVPIKNGVIGDDNRIVAALPTIKYIIEHGGKAILLSHLGRVKSDADKKELSLRPVAERLSELLKKPVTFVPENEGKEVEETIDKMKDGDVIVLENTRFQDIDNDFGKRESKNDPKLGEYWASLGDVFVNDAFGTAHRSHASNVGIATAMKKAGKPAAAGFLLEKEIKFLGDAVENPVHPFVTILGGAKVSDKIGVIENLIPKSDHILIGGGMAYTFLAAQGHKIGKSLFEADKVELAKELLAKAGDKIVLPVDNVAATEFSNDAPHEVVGDDIPDNEMGLDIGPKTVEKFRDILKDAKTVVWNGPMGAFEMPNYAEGTLEVGRALADLKDAVTIIGGGDSTAAAKQLGIAPKISHISTGGGASLNYLEGKELPGIACVSDK

SEQ ID NO: 56844 - DNA, 1218 bp, Magnetospirillum magnetotacticum MS-1
  CDS (1)..(1218)
atgttccggaccatcgacagcttcgacgtcaagggcaagcgggtgctggtgcgcgccgatctcaacgttccggccaaggacggcaaggtcaccgataccacccgtatcgaccgctccgccgccaccttgaaggagctggcgggcaagggcgccaaggtcatcgtactgacccatttcggccgccccaagggccgtgacgccaagtactcccagaagctgctggtcgagccgctggcgcgggcggtgggacagcccgtcctgtgggccgatgactgcatcggcgtcgaggtcgagcagatgatcgccaagatgaaggacggcgagatcgcccttttggaaaacgtccgcttctacgagaacgaggaagagaacgacatcggctttgccaagatgctggccggtctcggcgatatctatgtcaacgacgccttctcgaccgcgcaccgcgcccatgcttccaccgaaggcgtggcccatctactgccctgtgccgccgggcgtctgatgcaggccgagttggaagcgctgggcaaggcgctggaacatcccgagaagcccgtggccgccatcgtcggcggcgccaaggtctccaccaagctggacctgctgggcaatctggtggcccgcgtcgattacctgatcatcggcggcggcatggccaacaccttcctgttcgcccagggcaagcaggtgggcaagtccttgtgcgagaaggatctggccgacaccgcgcgcgagattctggaaaaggccaaggccgcccattgccatatcgtcctgccggtcgatgccgtggtggcgggggagttcgccgagaatgccgccaatcaggtggtttccgtcgatgctgtgcccgccgacaagatgatcctggatgccggtccggcctcggccgaggccatcatcgaccgcctgggcggctgcaagaccctggtgtggaacggccccctgggcgccttcgagatcgcgcccttcgacaaggccaccaacgcggtggctcaatgggccgccgagcgcaccgttcagggcaagctgctgaccgtgggcgggggcggtgacaccgtctcggccctggccaaggcgggcgtcgaggacaagttctcctacatctccacggcgggcggcgccttcctggaatggctggaaggcaaggtcctgcccggcgtcgcggccctcgaggtcaagaactgcggctcgggctgcggctgcggcggctga

SEQ ID NO: 56845 - protein, 405 aa, Magnetospirillum magnetotacticum MS-1
MFRTIDSFDVKGKRVLVRADLNVPAKDGKVTDTTRIDRSAATLKELAGKGAKVIVLTHFGRPKGRDAKYSQKLLVEPLARAVGQPVLWADDCIGVEVEQMIAKMKDGEIALLENVRFYENEEENDIGFAKMLAGLGDIYVNDAFSTAHRAHASTEGVAHLLPCAAGRLMQAELEALGKALEHPEKPVAAIVGGAKVSTKLDLLGNLVARVDYLIIGGGMANTFLFAQGKQVGKSLCEKDLADTAREILEKAKAAHCHIVLPVDAVVAGEFAENAANQVVSVDAVPADKMILDAGPASAEAIIDRLGGCKTLVWNGPLGAFEIAPFDKATNAVAQWAAERTVQGKLLTVGGGGDTVSALAKAGVEDKFSYISTAGGAFLEWLEGKVLPGVAALEVKNCGSGCGCGG

SEQ ID NO: 56846 - DNA, 1218 bp, Leuconostoc mesenteroides subsp. mesenteroides ATCC 8293
  CDS (1)..(1218)
atggctaaattgactgtttcagatttggaactttcaggtaagaaagtattgatgcgcgttgatttcaacgtgcctatcaaggcaggcgttatcggaaacgataaccgtattgtggcagctttgccaacaatcaagtatgttttggaaaacaatggtcgcgcaattttgttctctcatttgggacgtattaagtctgaagacgataagaaagaattgtcattagcaccagttgccgcacgcttgggtgaattattgggtaaggacgttaagttcgtgccacaaactcgcggtgaagaattagaatcagcaatcaacgctttgcaagatggtgaagttttgatggttgaaaacacacgttttgaagacgttgttgatggtgaagtggtcaaaaacgaatcaaagaacaatcctgaattgggtaagtattgggcatcattgggtgatgatttgttcatcaacgatgcctttggtacagctcaccgtgcccacgcttcaaacgtaggtattgcttcaaatgtttcacaagcagctgctggcttcttgatggaaaaagaaatcaagttcttgggtgatgctgttgcgaacccagttcgtcctttcgttgctattatcggtggtgcaaaggtttctgataaaattgaaatcgtaaagtcattattgaacaaggctgataaggttatcgttggtggtggaatggcctatacattcgatgctgctaagggtaacaagattggtaattcattgtttgaagctgataaagttgaattggctaaggaattgatggcagaagctggcgacaagttggttttgccaattgattcaattgctgctgacgcattttcaaatgatgcaaagactgaagttgttgatgctgaagatggtattcctgacggctacatgggtctagatattggtcctaagtctgttaagttgttgcaagacacattgtctgatgcaaagactgttgtttggaacggacctatgggtgtgttcgaaatgtctaattttgcaaagggtactttggcaattggtgaagaattggttaaagtgactgaaaatggtggtacaacaatcgttggtggtggtgattcaactgctgcggtacaacaattgggtgttgccgacaagttgacccacatttcaactggtggtggtgcttcacttgaataccttgaaggtaaggaattgcctggaatcgcttcaatttcggaaaagtaa

SEQ ID NO: 56847 - protein, 405 aa, Leuconostoc mesenteroides subsp. mesenteroides ATCC 8293
MAKLTVSDLELSGKKVLMRVDFNVPIKAGVIGNDNRIVAALPTIKYVLENNGRAILFSHLGRIKSEDDKKELSLAPVAARLGELLGKDVKFVPQTRGEELESAINALQDGEVLMVENTRFEDVVDGEVVKNESKNNPELGKYWASLGDDLFINDAFGTAHRAHASNVGIASNVSQAAAGFLMEKEIKFLGDAVANPVRPFVAIIGGAKVSDKIEIVKSLLNKADKVIVGGGMAYTFDAAKGNKIGNSLFEADKVELAKELMAEAGDKLVLPIDSIAADAFSNDAKTEVVDAEDGIPDGYMGLDIGPKSVKLLQDTLSDAKTVVWNGPMGVFEMSNFAKGTLAIGEELVKVTENGGTTIVGGGDSTAAVQQLGVADKLTHISTGGGASLEYLEGKELPGIASISEK

SEQ ID NO: 56848 - DNA, 1161 bp, Azotobacter vinelandii
  CDS (1)..(1161)
atgaccgtgttgaagatgaccgacctcgacctcaagggtaagcgcgtactcatccgtgaagacctcaacgtgccggtgaaggacggtgtggtgaagagcgacgcccgcatcctcgcttcgctgccgaccatcaagctggcgctggagaagggcgcggcggtgatggtctgctcgcacctgggccgcccgaccgagggcgaatattccgaggagaacagcctgaagccggtcgccgactacctgtccggggccctcggtcgcgaggtgccgctgctcggggaatacctggacggggtgaaggtcgagccgggccaggtggtgctgttcgagaacgtgcgtttcaacaagggcgagaagaagaacgccgacgagctggcgcagcggtacgccgcgctctgcgacgtgttcgtcatggacgccttcggcaccgcccaccgcgccgagggttcgacccacggcgtcgccaggttcgccaaggtcgcctgcgccggtcccctgctggccgccgagctggaggcgctgggcaaggcgctggacaacccgcagcggccgatggccgccatcgtcgccggttccaaggtgtccaccaagctcgacgtgctcaactccctgagccaggtctgcgaccagttgatcgtcggcggcggcatcgccaacaccttcctcgccgcggccggatacaaggtcggcaagtcgctctacgaggccgatctggtcgacaccgccaaggccatcgccgccaaggtcagcgtgccgctgccggtggacgtggtggtcgccaaggcgttcgccgagtccgccgaagccaccgtcaaggccatcgacgaggtggccgatgacgacatgatcctcgacatcggcccgcagaccgccgcgcagttcgccgaactgctgaaatcctcccggaccatcctgtggaacggtccggtcggcgtgttcgagttcgaccagttcggcaacggcaccaaggtcctggccgaggccatcgcggcgagcccggccttctccatcgccggtggcggcgataccctggcggccatcgacaagtacggcgtgggcgagaaaatctcctacatttccaccggtgggggcgccttcctcgaattcgtcgagggcaaggtgctgccggccgtggcggtgctggaagagcgcgccaggtaa

SEQ ID NO: 56849 - protein, 386 aa, Azotobacter vinelandii
MTVLKMTDLDLKGKRVLIREDLNVPVKDGVVKSDARILASLPTIKLALEKGAAVMVCSHLGRPTEGEYSEENSLKPVADYLSGALGREVPLLGEYLDGVKVEPGQVVLFENVRFNKGEKKNADELAQRYAALCDVFVMDAFGTAHRAEGSTHGVARFAKVACAGPLLAAELEALGKALDNPQRPMAAIVAGSKVSTKLDVLNSLSQVCDQLIVGGGIANTFLAAAGYKVGKSLYEADLVDTAKAIAAKVSVPLPVDVVVAKAFAESAEATVKAIDEVADDDMILDIGPQTAAQFAELLKSSRTILWNGPVGVFEFDQFGNGTKVLAEAIAASPAFSIAGGGDTLAAIDKYGVGEKISYISTGGGAFLEFVEGKVLPAVAVLEERAR

SEQ ID NO: 56850 - DNA, 1155 bp, Desulfitobacterium hafniense DCB-2
  CDS (1)..(1155)
atgctagaggatccctctttgtgctttgttgattttaacgtacctatggatgaccatggcaatattaccaacgacacgaggattcgggcggctctgcctaccattcactatctgattgacgaaggggctaaaattatcctcgcttcccatttgggacgtcccaagggaaaaccggatccgaactattccctggctccggtggccaaacgtcttggtgaattgctcaagcgaccggtggccatggcgaccgattgtatcggtccggaggtagagaaagcagcagctcagctgcaggaaggtgaagtccttcttctagaaaatgtccgttatcatgccgaggaagaaaagaatgaaccggagtttgtcaagcaattagcccgcttagctgaagtgtatgttaacgatgctttcggtacagcccaccgggctcatgcttccacagaaggaatcgctcatcatcttcccggggtggccggctttctcctccaaaaggaaattgaaagtatgggcaaggctctggagaatccggagcggccttttgtggccatcattggcggagccaaggtcagtgacaaaatcggggtcattgagaacctgctccataaagtggacgctttgatcattggcggcggcatggccaataccttcctgaaagcccagggctattctctgggtaagtccctggtggaaggagataaattatccctggctcaggagattcttgagcaagggcgggaactccaggtggacattcttttgccccaggatgtggttgcggccaaagaatttaaagccgatgccccctatcgggtcacccctgtccgggagatcgccgaggacgaaatggctttggatatcggaccggaaagtgccggactgttcagtgcaagaatacaaaaggcccggactatcgtctggaacggccccatgggtgtctttgaaatggaacaatttgccaaggggacggagaaagttgctcaggctgtggccttatgtccgggtctgaccattgtcggcggtggagattccgtggccgccgtagaaaaaatgggtgtaggggagcaaatgagccatatctccacaggagggggggcttccctgaagctcctgaaaggcaagaacctgcccggtatagcggcactacaaaacatctaa

SEQ ID NO: 56851 - protein, 384 aa, Desulfitobacterium hafniense DCB-2
MLEDPSLCFVDFNVPMDDHGNITNDTRIRAALPTIHYLIDEGAKIILASHLGRPKGKPDPNYSLAPVAKRLGELLKRPVAMATDCIGPEVEKAAAQLQEGEVLLLENVRYHAEEEKNEPEFVKQLARLAEVYVNDAFGTAHRAHASTEGIAHHLPGVAGFLLQKEIESMGKALENPERPFVAIIGGAKVSDKIGVIENLLHKVDALIIGGGMANTFLKAQGYSLGKSLVEGDKLSLAQEILEQGRELQVDILLPQDVVAAKEFKADAPYRVTPVREIAEDEMALDIGPESAGLFSARIQKARTIVWNGPMGVFEMEQFAKGTEKVAQAVALCPGLTIVGGGDSVAAVEKMGVGEQMSHISTGGGASLKLLKGKNLPGIAALQNI

SEQ ID NO: 56852 - DNA, 1203 bp, Nostoc punctiforme PCC 73102
  CDS (1)..(1203)
atgtccaaaaaaagtttagcaagtttatcttcagctgatatatctgggaaacgtgccttagtgcgggttgactttaatgtgcctgtggacgatcaaggcaagattaccgacgatactcgcattcgcgccgctctaccaaccatccaagatttaacgcagaagggtgctaaagtcattctcgcaagtcattttggccgtcccaaaggtgtggatgacaaattacgcctaactcccgttgccaagcgtctctctgagttactggggcaagaagtcattaaaactgatgactccatcggcgatgaagttgcagcgaaagttgccgctttgcaaaatggccaagtgctattactagaaaatgtccgtttttatccagaagaagagaaaaacgatgcagaatttgccaaaaaattggcagccaatgctgatttttatgtaaatgatgcttttggtactgcacaccgcgcccatgcttctactgaaggcgtgactaaattccttagcccttctgtggctggatatttagttgagaaggaattgcaatatctgcaaaacgctattgaaaatccccaacgtcctttggcggcaattattggcggttccaaagtttccagcaaaattggtgtaattgaaaccctgctggagaagtgcgacaagctgattattggcggtgggatgattttcaccttctacaaagcccgtggtttgagtgttggtaagtcgttggtagaagaagacaagctagaactagcgaagtctttagaagctaaggctaaagaacggggtgttgctttattgctgcctacagatgtggtattggcagataactttgcccctgatgccaattctcaaaccgttagcattgagaatatccccgatggttggatgggtttggatattgggccagactcggtgaaatttttccaagaagcccttgcagataccaaaacggttatttggaacgggccaatgggtgtatttgagtttgataagtttgcggcaggtacggaagcgatcgctcatactctcgctgaaatcggtaaaactggtacaaccaccatcatcggtggtggtgactcagtagcggctgtggaaaaggttggtttagcagaccaaatgagccacatttcgaccggcggcggcgctagcttggagttacttgaaggcaaagtattgcctggaattgcagctttagatgatgcgtaa

SEQ ID NO: 56853 - protein, 400 aa, Nostoc punctiforme PCC 73102
MSKKSLASLSSADISGKRALVRVDFNVPVDDQGKITDDTRIRAALPTIQDLTQKGAKVILASHFGRPKGVDDKLRLTPVAKRLSELLGQEVIKTDDSIGDEVAAKVAALQNGQVLLLENVRFYPEEEKNDAEFAKKLAANADFYVNDAFGTAHRAHASTEGVTKFLSPSVAGYLVEKELQYLQNAIENPQRPLAAIIGGSKVSSKIGVIETLLEKCDKLIIGGGMIFTFYKARGLSVGKSLVEEDKLELAKSLEAKAKERGVALLLPTDVVLADNFAPDANSQTVSIENIPDGWMGLDIGPDSVKFFQEALADTKTVIWNGPMGVFEFDKFAAGTEAIAHTLAEIGKTGTTTIIGGGDSVAAVEKVGLADQMSHISTGGGASLELLEGKVLPGIAALDDA

SEQ ID NO: 56854 - DNA, 1206 bp, Bifidobacterium longum DJO10A
  CDS (1)..(1206)
atgaagacactcaaggaccttggagatctcaagggcaagcgcgttctggttcgcgctgatttcaatgttccgctggacggcaccaccatcaccgatgacggtcgaatcaaggctgctctgccgaccatcaagaccctgcgcgaagaaggcgccaaggtcatcctcatggcccaccttggccgcccgaagggcaaggtcgttcctgagctgagcctggccccggttgccgcccgcctcggcgagctgctcggcgccaacgtgccgctggccaaggacacctacggcgaggacgctcaggccaaggtcgccgccatgaacgatggcgacgttgtgctgcttgagaacgttcgtttcaacccggaggagacctctaaggacgccgacgaacgcgccgcttacgccaagaagatcgccgccctcggcgaggccttcgtttccgatggcttcggcgtggtccaccgcgctcagggctccaactacgacgttgccgccgatctgccggccgccgcaggcctgctggtcgagaaggaagtcaaggccttgtccaaggccaccgagaacccggagcgtccgttcaccgtggtgcttggcggttccaaggtctccgacaagctcggcgtcatcgagaacctgctcgacaaggccaaccgtctggtcatcggcggtggcatggtgttcaccttcctcaaggccaagggctacgaggtcggcacctccctgcttgaagaggaccagcttgagaaggtcaagggctacatcgagaccgccgagaagaacggcgttgagctcgtgctgccgaccgacgtcgtcgtgaacgccggcttcccggccggtgacaccccggttgctccggaagtcgttgccgccgacgccatcccggccgacaagatgggtctggacatcggcccggagtcccagaagctcttccacgacaagatcgtcgactccaagaccgtcgtgtggaacggcccgatgggcgtgttcgaggttcctgagttcgccgccggcaccaaggccgtggcccagggtctggtcgacgccaccgcagccggtgcgttcaccatcgtcggtggcggcgactccgcctccgccgtgcgcaacctcggcttcccggaggacggcttctcccacatctccaccggtggtggcgcttccctcgagttcctcgaaggcaaggagctccctggcctgaaggtgcttgagtaa

SEQ ID NO: 56855 - protein, 401 aa, Bifidobacterium longum DJO10A
MKTLKDLGDLKGKRVLVRADFNVPLDGTTITDDGRIKAALPTIKTLREEGAKVILMAHLGRPKGKVVPELSLAPVAARLGELLGANVPLAKDTYGEDAQAKVAAMNDGDVVLLENVRFNPEETSKDADERAAYAKKIAALGEAFVSDGFGVVHRAQGSNYDVAADLPAAAGLLVEKEVKALSKATENPERPFTVVLGGSKVSDKLGVIENLLDKANRLVIGGGMVFTFLKAKGYEVGTSLLEEDQLEKVKGYIETAEKNGVELVLPTDVVVNAGFPAGDTPVAPEVVAADAIPADKMGLDIGPESQKLFHDKIVDSKTVVWNGPMGVFEVPEFAAGTKAVAQGLVDATAAGAFTIVGGGDSASAVRNLGFPEDGFSHISTGGGASLEFLEGKELPGLKVLE

SEQ ID NO: 56856 - DNA, 1179 bp, Desulfovibrio desulfuricans G20
  CDS (1)..(1179)
atgaacgtactgaaaatgactgatcttgatctgcgcggaaagcgtgtgcttatccgcgaggacctgaacgctcccatcaaggacggggcggtggccaacgacaacaggctgcgcgcagccgcacctaccatccgccttgccatgcaggcaggagcacgggttatggtgatgtcgcatctgggccgcccggcagaaggcgcgtttgacgaatcggcatccatggcacctgtggcggcacggctggccgatattctgggctgccccgtgccggtggtgcgggactggctggacggggtggatgtgcccgaaggcggcgtggtgctgacagagaatgtacgcttcaacaagggcgaaaaaaagaacgacgaagagctgggcaggcgcatggcggccctgtgcgatgtttatgtgatggatgctttcggcacggcgcaccgtgcgcaggcttccacccatgccgttgccgcatttgctcccgtggcctgcgcgggtccgctgctggcggcggagctggaagctctgggcaaggctcttggcgccccgcgccaccctgtggttggcatcatcggcggttccaaggtctcgaccaagctcactctgctggaaacgctttcctccaaggtcgacaagcttattgtgggcgggggcattgccaatacgtttatccgtgccgcaggttttgccgtgggcaaatcactgtatgaagaagatctggtggccgaagccgcccgcctgatgcaggccgcagccgcagccggaggagagattcccgtgcctgtggatgtggtggtggccacggagtttgccgaaactgcaacgcctgtctgcaagccggtggatcaggtggccgataatgagatgattatggacatcgggccgcaaaccgccgccatgtatgcagaggtgctgcgcggagcaggaaccatcgtgtggaacggacctgtcggggtgttcgagtttgatgccttcggtgccggtacagaagcgctgtgcagggctgtggcgcaaagcagcgccttttccatcgccggcggcggtgacactgtggccgctgtggataaatacggcgtccgtgacggcgtatcctatatatccacgggcggaggggcttttctggagtttctggaaggcaaggagctgccggcagtggccatgctggaacagcgcgcaaaagcctga

SEQ ID NO: 56857 - protein, 392 aa, Desulfovibrio desulfuricans G20
MNVLKMTDLDLRGKRVLIREDLNAPIKDGAVANDNRLRAAAPTIRLAMQAGARVMVMSHLGRPAEGAFDESASMAPVAARLADILGCPVPVVRDWLDGVDVPEGGVVLTENVRFNKGEKKNDEELGRRMAALCDVYVMDAFGTAHRAQASTHAVAAFAPVACAGPLLAAELEALGKALGAPRHPVVGIIGGSKVSTKLTLLETLSSKVDKLIVGGGIANTFIRAAGFAVGKSLYEEDLVAEAARLMQAAAAAGGEIPVPVDVVVATEFAETATPVCKPVDQVADNEMIMDIGPQTAAMYAEVLRGAGTIVWNGPVGVFEFDAFGAGTEALCRAVAQSSAFSIAGGGDTVAAVDKYGVRDGVSYISTGGGAFLEFLEGKELPAVAMLEQRAKA

SEQ ID NO: 56858 - DNA, 1170 bp, Haemophilus somnus 2336
  CDS (1)..(1170)
atgtcagtaattaaaatgaccgacctagatttagcaggtaagagagtatttattcgtgcagatttaaatgtgccggtaaaagaggggaaagtcacttccgatgcacgtatcaaagcaactattcctacgttaaaacttgcacttgagaaaggtgctaaagtgatggtaacttctcatttaggtcgtccgacagagggggaatttaaacctgaagattcattacagcctgttgttgattatttgaaaggtgccggttttaacgttcgtttagcacaagattatctaaacggtgtagaagtcaatgaaggtgaaattgttgttcttgaaaacgtacgtgtgaataaaggtgagaagaaaaatgatccggaattaagtaaaaaatatgccgcactttgtgatgtatttgttatggatgctttcggtacggctcaccgtgcacaagcctcaacttacggtgtagcggagtttgcccctgttgcttgtgccggtccattattagcggcggaattagaggcgttaggtaaagcattaaaagagcctcagcgtccaatgttagcgattgtgggaggttcaaaagtatccactaaattaactgtcttggacagcttatcaaaaattgctgaccaactgattgttggtggcggtattgcgaatactttcattgctgcagaggggcataatgtgggtaaatccttatatgaagcggatttaattcctgaagcacaacgtttatcaaaagtaacgaatattcctgttccagttgatgtgcgtgtgggcactgaattttcagaaaccgcactatcaacagaaaaaagtgtagccgacgtttccggagaagaatccatttttgatattggtgataaatcagcagagcaattggctgatattatccgcaatgcaaaaactattctttggaatggtcctgtgggggtttttgaattccctaactttcgtaaaggtactgaaatcgtttctaatgcgattgctgaagcaaccgcaaatggtgctttctctattgctggtggtggtgatactttggcagcgattgatttattcggtatcaaagataaaatttcttatatttcgaccggtggtggtgcattcttagagtttgtagagggcaaagtattaccagcggttgaaattttagaaaaacgagcaaatggttaa

SEQ ID NO: 56859 - protein, 389 aa, Haemophilus somnus 2336
MSVIKMTDLDLAGKRVFIRADLNVPVKEGKVTSDARIKATIPTLKLALEKGAKVMVTSHLGRPTEGEFKPEDSLQPVVDYLKGAGFNVRLAQDYLNGVEVNEGEIVVLENVRVNKGEKKNDPELSKKYAALCDVFVMDAFGTAHRAQASTYGVAEFAPVACAGPLLAAELEALGKALKEPQRPMLAIVGGSKVSTKLTVLDSLSKIADQLIVGGGIANTFIAAEGHNVGKSLYEADLIPEAQRLSKVTNIPVPVDVRVGTEFSETALSTEKSVADVSGEESIFDIGDKSAEQLADIIRNAKTILWNGPVGVFEFPNFRKGTEIVSNAIAEATANGAFSIAGGGDTLAAIDLFGIKDKISYISTGGGAFLEFVEGKVLPAVEILEKRANG

SEQ ID NO: 56860 - DNA, 1176 bp, Actinobacillus pleuropneumoniae serovar 1 str. 4074
  CDS (1)..(1176)
atgtcagtgattaaaatggcagaccttgatcttgccggtaaacgtttatttatccgtgccgatttaaacgtaccggtaaaagatggcaaagtgacatctgacgcacgtattcgtgcaaccattcctaccttaaaattagctttacaaaaaggtgctaaagtaatggtgacttctcacttaggtcgtcctactgaaggtgtattcgaagaagcaaactctttacaacctgtggttgattacttaaacgcatcggatttaggcgtacctgtacgtttagtacgcgattacctagacggcgttgaagttgcggaaaacgaaatcgtagtacttgaaaacgttcgtatcaacaaaggcgaaaagaaaaacgatcctgaacttgcgaaaaaatatgcggcgctttgtgacgtattcgtgatggatgcattcggtacggcacaccgtgcggaaggttcgacttacggtgttgcggaatacgcgccggttgcttgtgcgggtcctctattagcggcggaattggatgcgctaggtaaagccttaaaagaaccgcaacgtccgatgttagcgatcgtaggcggctcaaaagtttctactaaattaaccgtattagacagcctttcaaaaattgcagaccaattaatcgttggcggcggtatcgcaaatactttcattgctgcggaaggtcacccggtaggcaaatcgttatacgaagcggatttaattcctgaagcgaaacgtttagcggcggcaaccaatattcctgttccggttgatgtacgcgtcggtaccgaattctctgaaatcgcaccggcaacggaaaaagcggtatctgaagttcaagcggacgaatcaattttcgatatcggtgacaaatctgcagaagaattggcaaatatcatcaaatcggcaaaaaccattctttggaacggtccggtcggtgtatttgaattccctaacttccgtaaaggtaccgaagtgatttcaaacgctatcgcagaagcgaccgcaaacggcgcattctcgatcgcaggtggcggtgataccttagcggcaatcgatttattcggtattgcggataaaatttcttatatctcaaccggcggcggcgccttcttagaattcgtagaaggtaaagtattaccggcggtcgaaattttagaaaaacgtgcaaacggctaa

SEQ ID NO: 56861 - protein, 391 aa, Actinobacillus pleuropneumoniae serovar 1 str. 4074
MSVIKMADLDLAGKRLFIRADLNVPVKDGKVTSDARIRATIPTLKLALQKGAKVMVTSHLGRPTEGVFEEANSLQPVVDYLNASDLGVPVRLVRDYLDGVEVAENEIVVLENVRINKGEKKNDPELAKKYAALCDVFVMDAFGTAHRAEGSTYGVAEYAPVACAGPLLAAELDALGKALKEPQRPMLAIVGGSKVSTKLTVLDSLSKIADQLIVGGGIANTFIAAEGHPVGKSLYEADLIPEAKRLAAATNIPVPVDVRVGTEFSEIAPATEKAVSEVQADESIFDIGDKSAEELANIIKSAKTILWNGPVGVFEFPNFRKGTEVISNAIAEATANGAFSIAGGGDTLAAIDLFGIADKISYISTGGGAFLEFVEGKVLPAVEILEKRANG

SEQ ID NO: 56862 - DNA, 1203 bp, Psychrobacter sp. 273-4
  CDS (1)..(1203)
atgaattttttgcgtatgagcgagctgagtttgaccaataaagtagtgttgattcgtgaagacctcaatgtgcctatcaaagaaggtaaggtcgctagtgacgcacgcttacaagccagcctgccgacgattaagatggcgttagagaagggcgcagcggtgattgtttgctcgcatttgggtcgcccgacagaaggaagttctgaagccatttattcattagcgcctgttgctgactatttaagcgataaattatcagcgcctgttacgcttaataatgactacctcgctcaaggcgtagctatcaaagcgggcgaggtcgtattgttagaaaacgtacgttttaatgaaggcgaaaagaaaaataacgcggcgctcgcgcaaaaatatgctgatttgtgcgatgtatttgtgatggacgcttttgggacagcacatcgtgctcaggcgtcgacagaaggcgtgacccaagcgatgcaccaagctggcaagacggcttgtgctggacctttattggcagccgagcttgatgcattgagtttggcgcttgaaacgccagcacagcccatgttagctatcgttggtggctcaaaagtctctaccaaattagaggttttgcatagtttggctgagctctgctcgcagattatcgttggtggcgggattgccaataccttcttagccgcgcaaggtcatagcgttggagcttcactttatgaagcagatctggtcgatacagctcgtgaaataatgggtaaaaccgagattttattacctgaatatgtcgtcgttgctaataaaaatgacattgattttgcagattttacaggctcattgcaaaaggcagttgcgaccatcaagtctgttgataatatcggcgacaatgacatgatattggatatcgcgccagacagtgctataaagttggctgctgctattaccaatgccaaaactatcttatggaatggtccagtaggggtttttgaagtggatgcgtttggtcagggcactcagatagtggcagaagcggtcaaaaatagccaaggtttttctatcgcgggcggcggtgatacgcttgctgcgattgataaatatcaagtggcagatggcgtcagctacatgtcaacgggtggtggtgctttcttagagtttgtagaaggtaaagtcttgccggcggttgctgctttacaaattaatgaataa

SEQ ID NO: 56863 - protein, 400 aa, Psychrobacter sp. 273-4
MNFLRMSELSLTNKVVLIREDLNVPIKEGKVASDARLQASLPTIKMALEKGAAVIVCSHLGRPTEGSSEAIYSLAPVADYLSDKLSAPVTLNNDYLAQGVAIKAGEVVLLENVRFNEGEKKNNAALAQKYADLCDVFVMDAFGTAHRAQASTEGVTQAMHQAGKTACAGPLLAAELDALSLALETPAQPMLAIVGGSKVSTKLEVLHSLAELCSQIIVGGGIANTFLAAQGHSVGASLYEADLVDTAREIMGKTEILLPEYVVVANKNDIDFADFTGSLQKAVATIKSVDNIGDNDMILDIAPDSAIKLAAAITNAKTILWNGPVGVFEVDAFGQGTQIVAEAVKNSQGFSIAGGGDTLAAIDKYQVADGVSYMSTGGGAFLEFVEGKVLPAVAALQINE

SEQ ID NO: 56864 - DNA, 1182 bp, Dechloromonas aromatica RCB
  CDS (1)..(1182)
atgaacgttatcaagctgaccgacctcgatgtttccggcaagcgtgttttcatccgcgccgacctcaatgtgccgcaggacgaagccggcaacatcaccgaggacacccgcatccgcgcctcgctgccgtcgatcaagtactgcctggaaaaaggcgccgccgtcatggtcacctcccacctcggccggccgaccgaaggcgaactgaatcacgaagacagcctgatgccggtcgccgtgcgtctcggccagatgctgcatacctccgtccgcctgatcaccgactgggtcgatggcggctttgaagtcaagccgggcgaagtcgtcctgctcgaaaactgccgcgtcaacaagggcgagaagaagaacaatgacgaactggcccagaagatggccaagctgtgcgacatctacgtcaatgacgccttcggtaccgcccaccgtgccgaagccaccacccacggcatcgccaagtacgccccggtcgcctgtgccggcatgctgatgggcgctgaaatcgatgcgctgtccaaggcactgcatgagcctaaacgtccgttggtcgccatcgtcggcggctccaaggtgtcgtccaagctgaccatcctcaagtcgctggccagcaaggtcgaccagttgatcgtcggtggcggcatcgccaacactttcctgcttgccgacggcaagcggattggccactcgctggccgagccggatctggtcaaggaagcccacaccatcatggacatcatgaaggaacgcggcgccgaagtccccctgccaaccgacgtcgtcgtcgccgacgaagtctcggccctggcccgcgccaacaagatttcggtcgatgacgtacacgccaacgaccgcatcctcgacgtcggtccgaagaccgccgccaagtttgccgaaatcatcgccaatgccggcaccatcgtctggaacggcccggtcggcgttttcgaattgccgcaatttgccggcggcaccaagatgatggcctccgccatcgcccactccgaggctttctcgattgccggcggcggtgacacgctggctgccatcgccaagttccatatcgccgacgatgttggctatatctcgacgggcggcggcgccttcctggagttcctcgaaggcaagaccctgccggccatcgccatcctcgaagaacgcgccgcataa

SEQ ID NO: 56865 - protein, 393 aa, Dechloromonas aromatica RCB
MNVIKLTDLDVSGKRVFIRADLNVPQDEAGNITEDTRIRASLPSIKYCLEKGAAVMVTSHLGRPTEGELNHEDSLMPVAVRLGQMLHTSVRLITDWVDGGFEVKPGEVVLLENCRVNKGEKKNNDELAQKMAKLCDIYVNDAFGTAHRAEATTHGIAKYAPVACAGMLMGAEIDALSKALHEPKRPLVAIVGGSKVSSKLTILKSLASKVDQLIVGGGIANTFLLADGKRIGHSLAEPDLVKEAHTIMDIMKERGAEVPLPTDVVVADEVSALARANKISVDDVHANDRILDVGPKTAAKFAEIIANAGTIVWNGPVGVFELPQFAGGTKMMASAIAHSEAFSIAGGGDTLAAIAKFHIADDVGYISTGGGAFLEFLEGKTLPAIAILEERAA

SEQ ID NO: 56866 - DNA, 1149 bp, Synechococcus elongatus PCC 7942
  CDS (1)..(1149)
atgcgtgtcgacttcaatgtccctttggacggcaatgggaaaattacggatgacacccgcatccgtgcggctctgccgacgattcgctacctgtcggaaagtggtgccaaggtgattctggtcagccactttggtcgtcccaaaggcaagcccgtcgagagcatgcgcttaacgccggtggctgagcgcctctcggaattgctgggtcgccctgttgttaagacaaccgatgctgtgggtgccggtgccgaagcgcaagtggcagccaccagcaatggccaagtcgtgttgttggagaacgtgcgtttccacgctgaggaagaagccaacgacgctgaatttgcgaaagcactagctagcttggccgatatctacgtcaatgatgcctttggtgctgctcaccgggctcacgcttccacggctggcgtgactgaatatctttcgccttgcgtggctggttacctgttggagaaagagttgcaatacctacaagccgcgatcgacaatccccaacggcccttggctgcgatcgtcggcggttcgaaagtttccagcaaaattggcgtgatcgaaacgctgctggataagtgcgacaaactgctgattggtggcggcatgatctttaccttctacaaagcccaaggactttcggtcggcggctcactggtagaagaggacaaactcgatctggcgcgatcgctgatggctaaagcgcaagaaaaaggcgtgcaactgttgctgcccgtggatgtagtagtggccgataagtttgcgccggatgctaatgccaaaaccgtggcgatcgatgcgattcccgatggctggatgggcctagatatcggacctgagtcggtcaagcaattcgaggaagccttggccgattgccgctcggtcatttggaatggcccgatgggcgtatttgagttcgatcaattcgctgtcggtaccgaagcgatcgctcgtagcttggcaggactgacccgcaagggtgcaaccacgatcattggtggtggtgactcggtcgctgccgttgagaaagtcggtgttgcttcggaaatgagccacatttccaccggtggtggtgccagcttggaactgctggaaggcaaagtcctgccgggtgtggctgcactggatgacgctgcctaa

SEQ ID NO: 56867 - protein, 382 aa, Synechococcus elongatus PCC 7942
MRVDFNVPLDGNGKITDDTRIRAALPTIRYLSESGAKVILVSHFGRPKGKPVESMRLTPVAERLSELLGRPVVKTTDAVGAGAEAQVAATSNGQVVLLENVRFHAEEEANDAEFAKALASLADIYVNDAFGAAHRAHASTAGVTEYLSPCVAGYLLEKELQYLQAAIDNPQRPLAAIVGGSKVSSKIGVIETLLDKCDKLLIGGGMIFTFYKAQGLSVGGSLVEEDKLDLARSLMAKAQEKGVQLLLPVDVVVADKFAPDANAKTVAIDAIPDGWMGLDIGPESVKQFEEALADCRSVIWNGPMGVFEFDQFAVGTEAIARSLAGLTRKGATTIIGGGDSVAAVEKVGVASEMSHISTGGGASLELLEGKVLPGVAALDDAA

SEQ ID NO: 56868 - DNA, 1119 bp, Ralstonia eutropha JMP134
  CDS (1)..(1119)
atgaatgtgccgcaggatgacgccggcaatatcaccgaggacacccgcatccgcgcttcggtgccggccatcgaggcctgcctggctgctggcgccgccgtgatggtcacgtcgcacctgggccgcccgaccgaaggcgagttcaagccggccgattcgctggcgccgattgccacgcgcctgtccgaactgctgggcaagccggtgaagctggtgcagaactgggtcgatggcgtggaggtcgctccgggtcaggtggtgctgctggaaaactgccgcgtgaacaagggcgaaaagaagaacagcgacgaactggcgcagaagatggccaagctgtgcgacgtgtacgtcaatgacgcgttcggcaccgctcaccgcgccgaagcgaccacgcacggcatcgccaagtacgcgccgatcgcctgcgccggcccgctgctggccgccgagatcgacgcgctgggcaaggcgctgggccagccggcgcgtccgctggtcgccatcgtggccggctcgaaggtctcgaccaagctgaccatcctgaagtcgctggccgacaaggtggacaacctgatcgtcggcggcggcatcgccaacaccttcatgctggccgccggcctgaagatcggcaagtcgctggccgaagccgacctggtggccgatgccaagaccatcatcgacatcatggccaagcgcggtgcctcggtacccattccggtcgacgtcgtgtgcgccaaggcgttcagcgccaccgccgccgccaccgtcaaggacgtcaaggacgtggccgacgacgacatgatcctcgacatcgggccgaagaccgccgcgcaattggccgaccagctcaaggctgccggtaccatcgtgtggaacggcccggtgggcgtgttcgagttcgaccagttcggcaacggcaccaaggtgctggccgaagccatcgccgattccaaggcattctcgatcgccggcggcggcgacacgctggccgccatcgccaagtacggcattgccgaccgcgtgggctatatctcgaccggcggcggcgcgttcctggagttcctggaaggcaagaagctgcccgcattcgaagtgctggagcaacgcgcagcaggctga

SEQ ID NO: 56869 - protein, 372 aa, Ralstonia eutropha JMP134
MNVPQDDAGNITEDTRIRASVPAIEACLAAGAAVMVTSHLGRPTEGEFKPADSLAPIATRLSELLGKPVKLVQNWVDGVEVAPGQVVLLENCRVNKGEKKNSDELAQKMAKLCDVYVNDAFGTAHRAEATTHGIAKYAPIACAGPLLAAEIDALGKALGQPARPLVAIVAGSKVSTKLTILKSLADKVDNLIVGGGIANTFMLAAGLKIGKSLAEADLVADAKTIIDIMAKRGASVPIPVDVVCAKAFSATAAATVKDVKDVADDDMILDIGPKTAAQLADQLKAAGTIVWNGPVGVFEFDQFGNGTKVLAEAIADSKAFSIAGGGDTLAAIAKYGIADRVGYISTGGGAFLEFLEGKKLPAFEVLEQRAAG

SEQ ID NO: 56870 - DNA, 1182 bp, Methylobacillus flagellatus KT
  CDS (1)..(1182)
atgaccgtaatcaacatgacggaccttgacctcgcgggcaagcgcgtcttcattcgcgccgatcttaacgtgccggtcagcgatggcaaagtcacttccgatgcgcgtatcaccgcctccattcccaccatacgccatgccctggatgccaaggcacgcgttatggtgacttcccaccttggtcgcccggaagaaggcgtatattcggaggaaaactccttgcagcccgtggctgacgtgctggccgacaagctgggtcagccggtgcgcctgatcaaggactgggtcgacggtggctttgaagtggcggaaggcgaagtggtcttgctggaaaattgccgcttcaataaaggtgagaaaaaaaacgccgaagaaaccgcgcgcaagtatgccgcgctatgcgatgtattcgtgatggacgctttcggtacagctcaccgcgcagaggcctccacctacggggtggcgcaatatgcaccggtcgcggcggcgggcttgctactggtcggcgagctggatgcactgggcaaggccctgtgcgaacctgcccgccccatggtcgcgattgtcggcggctccaaggtctccaccaagcttaccgtgctggaaagcctggctgaaaaggtcgaccagctcgtggtaggcggcggtattgccaataccttcctcaaggcagctggaaaaccgattggccgctcactgagcgaggacgacctggtacctactgcccaatgcctgatggaaaaaatggcgaagcgtggtgcggccgtgccaatcgcggtggatgtggtctgcggcaagcagttcgacgccaatgagcctgccgtactcaaatcggcggaggacgtggccgacgacgacatgatcttcgacattggccccgagtcggccaagcaactggccgagatcatcctcaatgcaggcaccgtggtctggaacggcccggtcggcgtattcgagttcgaccagttcggcgaaggcaccaagaccatcgccgacgccattgccaagaccaaggccttcaccctggccggcggcggcgacaccattgctgcgatccagaaatacgatatctatgacaaggtgtcttatatctcgacggcgggcggggcatttctggaattccttgaaggcaagaaattgccggcggtggagattttggaacagcgtgctaaaggttga

SEQ ID NO: 56871 - protein, 393 aa, Methylobacillus flagellatus KT
MTVINMTDLDLAGKRVFIRADLNVPVSDGKVTSDARITASIPTIRHALDAKARVMVTSHLGRPEEGVYSEENSLQPVADVLADKLGQPVRLIKDWVDGGFEVAEGEVVLLENCRFNKGEKKNAEETARKYAALCDVFVMDAFGTAHRAEASTYGVAQYAPVAAAGLLLVGELDALGKALCEPARPMVAIVGGSKVSTKLTVLESLAEKVDQLVVGGGIANTFLKAAGKPIGRSLSEDDLVPTAQCLMEKMAKRGAAVPIAVDVVCGKQFDANEPAVLKSAEDVADDDMIFDIGPESAKQLAEIILNAGTVVWNGPVGVFEFDQFGEGTKTIADAIAKTKAFTLAGGGDTIAAIQKYDIYDKVSYISTAGGAFLEFLEGKKLPAVEILEQRAKG

SEQ ID NO: 56872 - DNA, 1203 bp, Crocosphaera watsonii WH 8501
  CDS (1)..(1203)
atgtctaagaaaacgatcgccaatttatcagcagcggatctcgctggaaaacgagtattagtaagggttgattttaacgttcctttcgacaacggaagcatcaccgatgacacccgtattcgtgcagctttacccaccatcaaagaattgatcagcaatggggcaaaagttatcctctgtagccacatgggtcgtcccaagggtaaagtagttgatagcatgagtttaacgccggttgcagcccgtttaggggagttattagggcaaaaagtcaccatgtgtgatgattgtgttggagagtccgttacagccgccattggtgggctagaaaatggtcaagttgctctactggaaaatctccgtttccactcagaagaagaaggtaacgatcccgaatttgccaagcagttagcagctaacgccgatttatacgttaacgatgcctttggaactgctcaccgcgcccacgcttctactgaaggggtgacacactatttaagtcctagtgttgctggttatttgattgagaaagaactgcaatatttacaagctgcgatcgaaaacccccaacgtcctttagtggctattatcggtggttctaaagtttctagtaaaattggtgtaattgaaaccctactggaaaaatgcgataagctcatcattggcggtggcatgattttcaccttttataaagcccgtggcttaaatgttggtaagtctttggtagaagacgataagttagaattagctaagtctctcgaagccaaagccaaagagaaaggtgtggatttcttgttaccttctgatgtagttttagccgataactttgcccctgatgctaatgctaaaactaccagtattgacaacattgaagacggttggatgggcttagatattggccctgattccattaaactgttccaagacgctttatctgattgtaaagcagtcatttggaatggtccgatgggagtatttgaattcgataaatttgctgctgggaccgaagcgatcgcccgtaccttagctgagttaaccggcacaggaaccactactattatcggcggtggtgactctgttgctgctgttgaaaaagttggtgtggctgagaaaatgagccacatttctactggtggtggtgctagtttagaactgttagaaagtaaagttttacctggtattgctgccttagacgaagcgtga

SEQ ID NO: 56873 - protein, 400 aa, Crocosphaera watsonii WH 8501
MSKKTIANLSAADLAGKRVLVRVDFNVPFDNGSITDDTRIRAALPTIKELISNGAKVILCSHMGRPKGKVVDSMSLTPVAARLGELLGQKVTMCDDCVGESVTAAIGGLENGQVALLENLRFHSEEEGNDPEFAKQLAANADLYVNDAFGTAHRAHASTEGVTHYLSPSVAGYLIEKELQYLQAAIENPQRPLVAIIGGSKVSSKIGVIETLLEKCDKLIIGGGMIFTFYKARGLNVGKSLVEDDKLELAKSLEAKAKEKGVDFLLPSDVVLADNFAPDANAKTTSIDNIEDGWMGLDIGPDSIKLFQDALSDCKAVIWNGPMGVFEFDKFAAGTEAIARTLAELTGTGTTTIIGGGDSVAAVEKVGVAEKMSHISTGGGASLELLESKVLPGIAALDEA

SEQ ID NO: 56874 - DNA, 1185 bp, Exiguobacterium sp. 255-15
  CDS (1)..(1185)
atgaataagaaatcaattcgcgatatcgatgtaaaaggaaaacgcgtgtttacacgtgtggacttcaacgtaccgctagaagacggcaaaatcacagatgatacacgcatccgtgctgcccttccgacaatcaaacacttggttgacggtggagcgaaagtcatcctcgcaagccatatgggacgtccaaaaggcgagaaaaaccctgagttctcacttgcaccagtcgtagcacgccttagcgaactgcttggtaaggacatcaagctcgttgaagaagcatacggtccggtcgctgaagaagcagtcagcaagcttgaagaaggagacgtcatcgttcttgaaaacgttcgtttctacccaggcgaaacgaaaaacgatcctgaactcgcagaaggttttgcgaaacttgcagacgttttcgtcaacgacgcatttggtgcagcgcaccgtgcgcacgcttctacagaaggaatcgcccatcatgtcgagactgctgtagcaggattgttgatcgaaaaagaacttcaagttctcggtaaagctctctcaaacccggatcgtccgtttacagcgatcatcggtggttcgaaagtcgctgacaaaatcggcgtcatcgatcacttgcttgatatcgtcgacacgttgatcatcggcggaggattatcttatacattcctcaaagctcaaggttatgaagtcggtacgtcacttcttgaagtcgacaaaatcgaacaggcgaaggaattcatgaaaaaagcagaagacaaaggcgtgaaattcttgatgccggttgactgtgtcatcacgaaggaattcggcgaagaaacatatgttggatcacgcgacatcgacagtatcccagcggatcacatgtcactcgatatcggtccaaaaacggtagaactgtatgcagaagcaatcaaggcttcgaaacttgttgtctggaacggaccaatgggtgtgttcgaacttgataaatatgcaaacggaacaaaaggtgtcgctcaagcattagcggacagcgatgcatactcgatcatcggtggtggagattctgctgcagcggctgagaagtttggtcttgcagataaaatgagtcacatttcaacaggtggcggcgcaagcctcgagttcatggaaggaaaagctcttccaggtgtcgaagcgcttaacgacaagtaa

SEQ ID NO: 56875 - protein, 394 aa, Exiguobacterium sp. 255-15
MNKKSIRDIDVKGKRVFTRVDFNVPLEDGKITDDTRIRAALPTIKHLVDGGAKVILASHMGRPKGEKNPEFSLAPVVARLSELLGKDIKLVEEAYGPVAEEAVSKLEEGDVIVLENVRFYPGETKNDPELAEGFAKLADVFVNDAFGAAHRAHASTEGIAHHVETAVAGLLIEKELQVLGKALSNPDRPFTAIIGGSKVADKIGVIDHLLDIVDTLIIGGGLSYTFLKAQGYEVGTSLLEVDKIEQAKEFMKKAEDKGVKFLMPVDCVITKEFGEETYVGSRDIDSIPADHMSLDIGPKTVELYAEAIKASKLVVWNGPMGVFELDKYANGTKGVAQALADSDAYSIIGGGDSAAAAEKFGLADKMSHISTGGGASLEFMEGKALPGVEALNDK

SEQ ID NO: 56876 - DNA, 1179 bp, Rubrobacter xylanophilus DSM 9941
  CDS (1)..(1179)
atggacaagcggagcgtgagggacctcgagctgcgcgggaagaaggtgctcgtccgggtggacttcaacgtgccggtaaagggcggcgaggtgaccgacgacacccgcatccggcgggcgctgcccaccatccgctacctgctgcagcggggggcgagggtcgccctgatctcccacctgggccgcccgaagggcgagcccgacccccgctacaggatggaccccgtggcccggcggctcgaggagctgctcggggagccggtcaggaagctggataccgccacgggccctgaggtcggcagggcgctggaggagctggagcggggcgtgatcctgctggagaactcccgcttctaccccggggagacaaagaacgaccccgccttcgccgccgagctggccgggcccttcgacctctacgtcaacgacgccttcggggcggcccacagggcccacgccaccaccgtgggggtcgccgagcggctgcccgccgccgccggcttcctgctggagcaggagctggactacctggatggggtgctgcgcagcccggagcggcccttcgtggccatcctcggcggggccaaggtctcggacaagctgggggtcatcgagagcctgctcggggtggccgaccgcctcctcgtcgggggggcgatgtgcttcaccttcctgaaggccaggggcctcggggtcggagcctcgctggtcgaggacgactacctcggggaggcgcgtcgcctcatggagggggccgccgacaggctcgtgctcccggtggacgtggtcgtcgccgagaggatggaggagggggcccggacccggaccgtcccggtggaggagatcccggagggctggatgggcctggacatcggcccccggacggtcgagctcttccgccggcacatcctgcaggccaggaccatcttctggaacggccccatgggggtcttcgagatcgacgcgttcgccaggggcaccgagggcgtggccagggccgtcgccgagagcggggccacgagcgtcgtggggggcggcgactcggtcgccgccgtcaggaagctcggcctggaggacaggatgagccacatctccaccggcggcggggcctcgctggagtacgtcgagggcagggagctgcccggcgtggccgtgctgcccgagagggaggaggtctag

SEQ ID NO: 56877 - protein, 392 aa, Rubrobacter xylanophilus DSM 9941
MDKRSVRDLELRGKKVLVRVDFNVPVKGGEVTDDTRIRRALPTIRYLLQRGARVALISHLGRPKGEPDPRYRMDPVARRLEELLGEPVRKLDTATGPEVGRALEELERGVILLENSRFYPGETKNDPAFAAELAGPFDLYVNDAFGAAHRAHATTVGVAERLPAAAGFLLEQELDYLDGVLRSPERPFVAILGGAKVSDKLGVIESLLGVADRLLVGGAMCFTFLKARGLGVGASLVEDDYLGEARRLMEGAADRLVLPVDVVVAERMEEGARTRTVPVEEIPEGWMGLDIGPRTVELFRRHILQARTIFWNGPMGVFEIDAFARGTEGVARAVAESGATSVVGGGDSVAAVRKLGLEDRMSHISTGGGASLEYVEGRELPGVAVLPEREEV

SEQ ID NO: 56878 - DNA, 1197 bp, Mesorhizobium sp. BNC1
  CDS (1)..(1197)
atggccggtttcaagacattggacgatttgaaggatgtagcgggaaagcgtgtgcttctgcgcgtggacttgaatgtgccggtaaaggatggggaggttacggacacgacccgcatcgagcgtgttgcgccgaccattacggagctttccgacaagggtgccaaggttatcttgcttgcccatttcggtcggcccaagggcaagccggatgcagaggcttctctacagccgattgcacatgcggtggaagcagtcctcgatcggcgcgtccacttcgcatccagctgcataggcgaaccggcgaagaaggccgtggacgaaatgacgggcggggacatcctgcttctggaaaacacccgctttcacgcgggcgaggaaaagaacgacccggaatttacgaaggcgctcgcggcaaatggcgacatctatgtcaacgatgccttttctgccgcccatcgcgcgcatgcctcgacggaagggctggcgcatctccttcccgcttatgcgggacgcaccatccaggcggagctcgaagctctccagcgcggtcttggagatccgaaacgccctgtggtggcgatcgtcggcggcgcgaaagtctccaccaaaatcgatctgctcaccaatctcgtgaagaaggtcgactgtctcgttatcggaggcgggatggccaacaccttccttgcagcgcgcggcacttccgtcggcaagtcgttatgcgagcacgatcttagggaaacagccaaacagatcatgatcgatgcggctgaggccggctgtgcgatcatcctgccagtcgacgcggtggtggcacggaaattcgaagctggggcggaaaccgagacggtcgacatcgacgccgtgccggaagatgctatgatcctcgatgtcgggccgaagtcggtcgaaaaggtgaaagagtggctggaccgggccgacacgctggtttggaatgggcctctcggcgctttcgagctttcgcctttcgacaaggctaccatggaggtagcaaagtatgccgcccggcgaacccgtgagagcctcctggtgtcggtcgcaggcggcggcgatacggtagcagcactcaaccaggcggatgtgtctgatgacttcagctatgtctcgaccgccggtggcgctttccttgagtggatggaaggcaaggaccttccgggcgttgcagcgcttcagaagtga

SEQ ID NO: 56879 - protein, 398 aa, Mesorhizobium sp. BNC1
MAGFKTLDDLKDVAGKRVLLRVDLNVPVKDGEVTDTTRIERVAPTITELSDKGAKVILLAHFGRPKGKPDAEASLQPIAHAVEAVLDRRVHFASSCIGEPAKKAVDEMTGGDILLLENTRFHAGEEKNDPEFTKALAANGDIYVNDAFSAAHRAHASTEGLAHLLPAYAGRTIQAELEALQRGLGDPKRPVVAIVGGAKVSTKIDLLTNLVKKVDCLVIGGGMANTFLAARGTSVGKSLCEHDLRETAKQIMIDAAEAGCAIILPVDAVVARKFEAGAETETVDIDAVPEDAMILDVGPKSVEKVKEWLDRADTLVWNGPLGAFELSPFDKATMEVAKYAARRTRESLLVSVAGGGDTVAALNQADVSDDFSYVSTAGGAFLEWMEGKDLPGVAALQK

SEQ ID NO: 56880 - DNA, 1185 bp, Ehrlichia canis str. Jake
  CDS (1)..(1185)
atgttaaggtctcatgattttactttttgtaatatgaaaaaaatacaagatttcagttgtagtggtaagacagtgttactgcgtgcagacttaaatgtaccaatggataatggtgtagtgttggatgatactaggattgttagattgactacaactattaagtacttactgagtaatgatgcaaagattgtaataatgtcgcactatggccgccctaagtcttatgataaagaattttctttgaagtttttgattgagtacctaaataagatatttacaacaaatgtaatatttatagatggtgtaattggggattatgtagaacaaactatacaatctgcttcattaggttcaatattattactagaaaatttgagattttatgcagaagaagaaacaaatgatttagcgtttgctaaacagcttgctttattggctgatatatatgttaatgatgctttttcttgtttacaccgtaaacatgcatctatagatgcgattactagattaattccttcttttattggctttaattttcaggaagaaatgaaatatttgaattgtgttgtttctaatagtgaaaaaccagttgcagttatagttggtggctcaaaaatatcaacaaaaattcacatgttgaaaaatctgactaaaaaggtggattttttaatagtaggtggagctattgcaaataactttttactatcgcaaggtctgaaaataggaagatcattatatgaagaattagaaaaagatcttgtaaaagaaataatggatcttgctaaaagacatgagtgtaaaattattgttccagttgattatgtagtggctaagaattctatttatgggaaaagttcaataaaagataatgatactatagaatctgatgatgtaatattagatataggacctcaaacgattaatatagttactgcaacagtaaataagtgtagaacgattttatggaatggtccatgtggtatgtttgaaaaggagcagttttcaaaaggaacatttagtgttgcaaacttattagcaaaattaactaaggcaggtaaacttaaaagtattgttggtggtggtgatagtatatgtgcaatcaagttatctggtctttcaaatgatgactttacttatatttcaacaggtggaggtgctttactgcactttcttagtattgcgtag

SEQ ID NO: 56881 - protein, 394 aa, Ehrlichia canis str. Jake
MLRSHDFTFCNMKKIQDFSCSGKTVLLRADLNVPMDNGVVLDDTRIVRLTTTIKYLLSNDAKIVIMSHYGRPKSYDKEFSLKFLIEYLNKIFTTNVIFIDGVIGDYVEQTIQSASLGSILLLENLRFYAEEETNDLAFAKQLALLADIYVNDAFSCLHRKHASIDAITRLIPSFIGFNFQEEMKYLNCVVSNSEKPVAVIVGGSKISTKIHMLKNLTKKVDFLIVGGAIANNFLLSQGLKIGRSLYEELEKDLVKEIMDLAKRHECKIIVPVDYVVAKNSIYGKSSIKDNDTIESDDVILDIGPQTINIVTATVNKCRTILWNGPCGMFEKEQFSKGTFSVANLLAKLTKAGKLKSIVGGGDSICAIKLSGLSNDDFTYISTGGGALLHFLSIA

SEQ ID NO: 56882 - DNA, 1191 bp, Listeria monocytogenes str. 1/2a F6854
  CDS (1)..(1191): transl_table=11
atggctaaaaaagttgtaactgatttagatttaaaagacaaaaaagttttagttcgtgttgactttaacgtgccaatgaaagacggtaaaatcactaacgataaccgtattgtagctgcacttccaacaattgagtacatcttagaacaaaacggtaaagcaattctattttctcaccttggaaaagtaaaaacagaagaagataaagaaggaaaatctcttcgtccagtagccgctcgtttaagcgaattacttggaaaagaagtgaaattcgttcctactactcgtggtccagaacttgaagcagcaattgctgagttaaaagacggcgaagtacttctttttgaaaatacacgttttgaagatattgatggtaaaaaagaaagcaaaaatgatccagaacttggaaaatactgggctagccttggcgacgttttcgtaaatgacgcttttggtactgctcaccgtgcgcacgcgtctaacgttggaatcgcttctaacttagaatcagcggccggatttttgatggaaaaagaaattaaattcatcggcggtgtagttgataatccagcacgtccactagtagcaatcctaggtggtgcaaaagtttctgacaaaatcggtgttatcgaaaacttacttacaaaagcagacaaagtacttgtcggcggcggaatgactttcactttcatggcagctcaaggtcaagaaattggtaaatctcttttagaagcagataaagttgaacttgctaaaggcttacttgaaaaagctggcgataaattagtattaccagttgatgcagttgtatctaaagaattcagtaacgatgctcctttccatacagttagtgcagatagcattccagctgatgaaatgggactagatattggtcaagctacaatcgacttatttacaaaagaacttcaaggcgctaaaacagttgtatggaatggtccaatgggcgtattcgaacttagcaactttgctaaaggtacaattggcgtttgtgaagctattgcaaacttaactgatgcaacaactatcatcggtggtggggattctgcagcagcagctatggacttaggttttgctgataaattcacacatatttctactggtggcggcgcatctttagagtatcttgaaggtaaagagcttcctggtgttgcttctattagcgacaaataa

SEQ ID NO: 56883 - protein, 396 aa, Listeria monocytogenes str. 1/2a F6854
MAKKVVTDLDLKDKKVLVRVDFNVPMKDGKITNDNRIVAALPTIEYILEQNGKAILFSHLGKVKTEEDKEGKSLRPVAARLSELLGKEVKFVPTTRGPELEAAIAELKDGEVLLFENTRFEDIDGKKESKNDPELGKYWASLGDVFVNDAFGTAHRAHASNVGIASNLESAAGFLMEKEIKFIGGVVDNPARPLVAILGGAKVSDKIGVIENLLTKADKVLVGGGMTFTFMAAQGQEIGKSLLEADKVELAKGLLEKAGDKLVLPVDAVVSKEFSNDAPFHTVSADSIPADEMGLDIGQATIDLFTKELQGAKTVVWNGPMGVFELSNFAKGTIGVCEAIANLTDATTIIGGGDSAAAAMDLGFADKFTHISTGGGASLEYLEGKELPGVASISDK

SEQ ID NO: 56884 - DNA, 1182 bp, Rubrivivax gelatinosus PM1
  CDS (1)..(1182)
atggccttcatgaccctggaccagatcaacctgcgcggccagcgggtgttcatccgctgcgacttcaacgtgccgctcgatgccgccggtcgcatcaccgacgacacccgcatccgcgccagcatccccggcatccgccacgcgctgacccagggggcgcgcgtcatgctcgcctcgcacctcggtcgacccggcgagggcgcactgacgccggccgactcgctcgcaccggtagcgcgccgtgtcggtgaactgctcgaccgcgaggtgccgctggtcggcgactggctcgcacggcctttcgacgtcacccccgggcaggccgtgatgctggagaactgccgcgccaatgtgggcgaaaaggccaactcgcgcgagctggcgctgcgcatggccgaactgtgcgatgtctatgtgaacgacgccttcggcaccgcccaccgcgccgaggccacgacggaagccctggcgcgcgttgccccggtggcctgcgccggcccgctgatggcgtcggagctgaacgcgctcggacgcgcactggctcggccggcccggcctctggcggccatcgtcggcggttcgaaagtgtcgaccaagctgtcggtgctgaagtcgctggccgaccaggtcgagttgctggtggtcggtggcggcatggccaacaccttcctgctggccgcggggcagaaggtgggcaagtcgctgtgcgagccggacatggtcgagacggccgcgcaggtggcctcgacgctcgccgcgcgcggcgccgagctcttcatgccgatcgacgtggtgaccgccaccgagttctccgaggacgccatcccggcgatcaaggcgctgagcgaggtcgggcccgacgacctgatcctcgacttcggtcctcggtcgatgcaggccctcgtcgagcgactggcgccctgcaagaccatcgtgtggaacggcccgctgggcgtgttcgagatcgagcagttctcctacggcacccgcacgctggccaccgccatcgccgcatcgcaggccttctcgatcgccggtggcggcgacaccgtcgccgcgatcaaccgcttcgacgtggccaaggacatcgactatgtctccaccgccggcggtgccttcctcgagttcctcgagggcagaacgctgcccgctgtgaaggcgctccaggaccgcgccgcctga

SEQ ID NO: 56885 - protein, 393 aa, Rubrivivax gelatinosus PM1
MAFMTLDQINLRGQRVFIRCDFNVPLDAAGRITDDTRIRASIPGIRHALTQGARVMLASHLGRPGEGALTPADSLAPVARRVGELLDREVPLVGDWLARPFDVTPGQAVMLENCRANVGEKANSRELALRMAELCDVYVNDAFGTAHRAEATTEALARVAPVACAGPLMASELNALGRALARPARPLAAIVGGSKVSTKLSVLKSLADQVELLVVGGGMANTFLLAAGQKVGKSLCEPDMVETAAQVASTLAARGAELFMPIDVVTATEFSEDAIPAIKALSEVGPDDLILDFGPRSMQALVERLAPCKTIVWNGPLGVFEIEQFSYGTRTLATAIAASQAFSIAGGGDTVAAINRFDVAKDIDYVSTAGGAFLEFLEGRTLPAVKALQDRAA

SEQ ID NO: 56886 - DNA, 1194 bp, Rubrivivax gelatinosus PM1
  CDS (1)..(1194)
ttgaaggttctgcggttctccgatctcatccagcaaggtcgcgtcgccggccaacgtgtcttcatccgggccgatctgaacgtgccgcaggacgacgccgggcgcatcaccgaggacacccgcatccgcgcctcgatcccctgcatcgagatggcgctggcggccggtgcggccgtgatggtgacctcgcacctgggccgtccgaccgagggcgagttcaaggccgaggactccctggcgccggtcgcgcgccgtctggccgagttgctgggccgcaaggtgccgctgctgcaggactggaccggcggtgtcgaagtcgcgccgggtgaactggtgctgctcgagaactgccgcgtcaacaagggcgagaagaagaacgacgaaacgctggcccggaagatggccgcgctctgcgacatcttcgtgcacgacgccttcggcaccgcgcaccgcgccgaggcctcgacctatggcattgcgcagttcgccaaggtggcctgtgccggcccgctgctggcggccgagatcgacgccatcaccaaggccctgaagagcccgaagcgcccgctggtggccatcgtggcgggctccaaggtcagcaccaagctgtcgatcctgaagtcgctggcggccaacgtcgaccagctgatcgtcggcggcggcatcgccaacacgttcatgctggcggtcggtctgtccatcggcaagtcgctggccgagcccgatctggtggatgaggcgcgcgccatcatcgacatgatgaaggcgcgtggcgccgcggtgccgatcccgatcgacgtggtcgtggccgacgagttctctgccatcgcacgcgccaacaaggtgaccgccaccgaggtgcggcccgatgacctgatcctcgacatcggcccgcgcaccgcggccgagctggccggcatcatcgcgcgcgccggcacggtggtctggaacgggccgatgggcgtgttcgaatacgaccagttcgccggcggaacgcgcacgctggctgcggccatcgcccattcgccggctttcagcatcgccggcggcggcgacacactggcggcgatcgcaaagtacggcatcgagaaggacatcggctacatctccaccggtggcggcgccttcctcgaggtgctggagggcaagaccctgccggccttcgagatcctcgagcagcgggccgccggctga

SEQ ID NO: 56887 - protein, 397 aa, Rubrivivax gelatinosus PM1
MKVLRFSDLIQQGRVAGQRVFIRADLNVPQDDAGRITEDTRIRASIPCIEMALAAGAAVMVTSHLGRPTEGEFKAEDSLAPVARRLAELLGRKVPLLQDWTGGVEVAPGELVLLENCRVNKGEKKNDETLARKMAALCDIFVHDAFGTAHRAEASTYGIAQFAKVACAGPLLAAEIDAITKALKSPKRPLVAIVAGSKVSTKLSILKSLAANVDQLIVGGGIANTFMLAVGLSIGKSLAEPDLVDEARAIIDMMKARGAAVPIPIDVVVADEFSAIARANKVTATEVRPDDLILDIGPRTAAELAGIIARAGTVVWNGPMGVFEYDQFAGGTRTLAAAIAHSPAFSIAGGGDTLAAIAKYGIEKDIGYISTGGGAFLEVLEGKTLPAFEILEQRAAG

SEQ ID NO: 56888 - DNA, 1164 bp, Pseudomonas fluorescens PfO-1
  CDS (1)..(1164)
atgaccgtgttgaagatgtccgacctcgatctgcaaggtaagcgcgtattgatccgcgaagacctcaacgtcccagtcaaggacggtgttgtcaccagcgatgcgcgtatcctggcttcgctgccgaccatcaagctggccctggaaaaaggcgcggccgtgatggtctgctcgcacctgggtcgtccgaccgaaggcgaattctctgccgagaacagcctcaagcctgtcgccgactacctgagcaaggccctgggccgcgaagtgccgctggtggccgactacctgggcggcgttgacgtcaaggccggcgacatcgtgctgttcgaaaacgtgcgcttcaataagggcgagaaaaagaacgccgacgaattggcccagcaatatgccgccctgtgcgacgtgttcgtgatggacgctttcggcaccgctcaccgtgctgaaggttcgacccacggcgtcgccaagttcgccaaagtcgccgctgccggcccgctgctggctgctgagctcgacgcactgggcaaagccctgggcgccccggccaagccgatggcggccatcgttgccggctccaaggtctcgaccaagctcgacgtactgaacagcctgagccagatctgcgatcaactgatcgtcggcggcggcatcgccaacaccttcctcgcggcggccggtcacccggtcggcaagtcgctgtacgagccggacctgctggacaccgcgcgcgccatcgccgccaaggtcagcgtgccgctgccggtcgacgtggtggttgccaaggaattcgctgaaagcgccgaagcgaccgtgaaactgatcgctgacgtcgctgccgacgacatgatcctcgacatcggcccgcaaaccgcggccaacttcgccgaactgctgaagtcgtcgaaaaccatcctgtggaacggcccggtcggcgtgttcgaattcgaccagttcggcaacggcaccaaagtgctggccgaagccatcgcagaaagcgcggcgttctcgattgccggcggtggcgacaccctggcggccatcgataaatatggcgtagcggaaaagatctcctacatttccaccggcggcggcgcgttcctcgaattcgtcgaaggcaaggtgctgccggccgttgaagtcctggaaagccgggccaaggcctga

SEQ ID NO: 56889 - protein, 387 aa, Pseudomonas fluorescens PfO-1
MTVLKMSDLDLQGKRVLIREDLNVPVKDGVVTSDARILASLPTIKLALEKGAAVMVCSHLGRPTEGEFSAENSLKPVADYLSKALGREVPLVADYLGGVDVKAGDIVLFENVRFNKGEKKNADELAQQYAALCDVFVMDAFGTAHRAEGSTHGVAKFAKVAAAGPLLAAELDALGKALGAPAKPMAAIVAGSKVSTKLDVLNSLSQICDQLIVGGGIANTFLAAAGHPVGKSLYEPDLLDTARAIAAKVSVPLPVDVVVAKEFAESAEATVKLIADVAADDMILDIGPQTAANFAELLKSSKTILWNGPVGVFEFDQFGNGTKVLAEAIAESAAFSIAGGGDTLAAIDKYGVAEKISYISTGGGAFLEFVEGKVLPAVEVLESRAKA

SEQ ID NO: 56890 - DNA, 1194 bp, Rhodospirillum rubrum
  CDS (1)..(1194)
atggccagcttcaagacgattgacgacctggatgtgaacggcaagcgcgtgctggtgcgcgccgacctcaacgtgccgatccgcgatggtgtggtcactgataccacccgcatcgaccgctcggccgaaaccatcctggccctggccagcaggggcgcctgcgtggtcgtctgctcgcacttcggccgccccaagggcaagcgcgttcccgagatgagcctgaggccgatcgtcgagccgctgtcgcgggccctgggcggcgttccggtggccttcgccgaggattgcgtcggtccggccgccgaattggtggtcaatggtctggcgccgggcgaagtcgccctgcttgaaaacctgcgcttccacgacgaagaagaaaagaacgatccggccttcgcccagaagctggccgatctgtgcgatctctacgtcaacgacgctttttcgtcggcccaccgcgcccacgcctcgaccgaatatatcgcccgtctggtgcccgctgccgccggccggctgatgcaggccgagttggaggccctgggcaaggcgctggataatcccgaacgcccggtcgcggccatcgtcggcggcgccaaggtctcgaccaagctagagctgctcggcaatctggtgtccaaggtcgatatgatcatcatcggcggcggcatggccaataccttcctcttcgcccagggcatcgagatcggcgccagcttgtgcgagaaggatatggccgataccgcccgcgccatccttgaaaaggccgccgcggcgaagtgcgagatcgtgctgccgatcgacgccgtggtcgcctcggccttcaaggaaggggccgaaaaccatgtggtggcgatcgatgccgtgccggccgacaagatgatccttgatgtcggcccgcaaaccgcccaggcggtgatcgccaaactcggcgagtgcaagaccctggtgtggaacggtcccttcggcgccttcgagatcaaacccttcgacgccgccaccaatacggtggcccaggccgccgcccaggcgaccgccgagggccggctgctgaccgtggccggcgggggcgatacggtctcggccctggccaatgccggggtggaagacaagttctcctatgtctcgacggccggcggcgccttcctggaatggctggagggcaaaacgctgccgggtgtcgccgccttgctgtag

SEQ ID NO: 56891 - protein, 397 aa, Rhodospirillum rubrum
MASFKTIDDLDVNGKRVLVRADLNVPIRDGVVTDTTRIDRSAETILALASRGACVVVCSHFGRPKGKRVPEMSLRPIVEPLSRALGGVPVAFAEDCVGPAAELVVNGLAPGEVALLENLRFHDEEEKNDPAFAQKLADLCDLYVNDAFSSAHRAHASTEYIARLVPAAAGRLMQAELEALGKALDNPERPVAAIVGGAKVSTKLELLGNLVSKVDMIIIGGGMANTFLFAQGIEIGASLCEKDMADTARAILEKAAAAKCEIVLPIDAVVASAFKEGAENHVVAIDAVPADKMILDVGPQTAQAVIAKLGECKTLVWNGPFGAFEIKPFDAATNTVAQAAAQATAEGRLLTVAGGGDTVSALANAGVEDKFSYVSTAGGAFLEWLEGKTLPGVAALL

SEQ ID NO: 56892 - DNA, 1194 bp, Burkholderia fungorum LB400
  CDS (1)..(1194)
atgaacaaggtattgcgtctctccgatctgatcgccgaaggcaagctatccggcaaacgcgtgttcatccgcgccgatctgaacgtgccgcaggacgatcaaggcaacatcaccgaagacacccgtatccgcgcttccgtgccggccatcaaggccgcgctcgacgcgggcgccgccgtgatggtcacgtcgcacctgggccgtcccacagagggtgatttcaagcctgaagactcgcttgcgccggtcgcgaaacgtctggccgaactgctcggccgcgaggtgccgctggtggcgaactgggtcgaaaacggcgtgaacgtcgcgccgggctcggtcgtgctgctggaaaactgccgcgtcaacaagggcgaaaagaaagattccgacgagctcgcgcagaaaatggcgaagctctgcgacatctacgtgaacgacgcattcggcaccgcgcaccgcgccgaagccaccacgcacggtattgccagatacgcgccggtggcgtgcgccggcccgctgctcgcggccgaactcgaagcgctcggcaaggcgctgggcgcgccgaagcgtccgctggtggcgatcgtcgccggctcgaaggtgtcgaccaagctgaccattctgaagtcgctcgccgacaaggtcgatcaactgatcgtgggcggcggcattgccaacacgttcatgctggccgcgggcctgaagatcggcaagtcgctcgccgaagccgatctggtgaacgaagccaaagccatcatcgacgcggcgaaagcccgcggcgcctcggtgccgatcccgaccgacgtggtcacggcgaaagagttttccccgaccgccaaggcagaagtcaaagcagtcgccgacgttcaggacgacgacctgatcctcgacatcgggccggaaacggccaaagtgctcgccgcgcaactggaaaaggccggcacgatcgtgtggaacggtccggtcggcgtgttcgaattcgaccagtttggcaacggcacgaagacgctggcggaggctatcgccaaatcgtcggcgttctcgattgccggcggcggcgatacgcttgctgcgatcgccaagtacggcatccacgacaaggtcagctatatctcgacgggcggcggcgctttcctcgaattcctcgaaggcaagaagctgccggcggtcgaagttctggaatcgcgggcttaa

SEQ ID NO: 56893 - protein, 397 aa, Burkholderia fungorum LB400
MNKVLRLSDLIAEGKLSGKRVFIRADLNVPQDDQGNITEDTRIRASVPAIKAALDAGAAVMVTSHLGRPTEGDFKPEDSLAPVAKRLAELLGREVPLVANWVENGVNVAPGSVVLLENCRVNKGEKKDSDELAQKMAKLCDIYVNDAFGTAHRAEATTHGIARYAPVACAGPLLAAELEALGKALGAPKRPLVAIVAGSKVSTKLTILKSLADKVDQLIVGGGIANTFMLAAGLKIGKSLAEADLVNEAKAIIDAAKARGASVPIPTDVVTAKEFSPTAKAEVKAVADVQDDDLILDIGPETAKVLAAQLEKAGTIVWNGPVGVFEFDQFGNGTKTLAEAIAKSSAFSIAGGGDTLAAIAKYGIHDKVSYISTGGGAFLEFLEGKKLPAVEVLESRA

SEQ ID NO: 56894 - DNA, 1254 bp, Magnetococcus sp. MC-1
  CDS (1)..(1254)
atgaccctctatgcgagccctgtttttctaatgaatgcgtctccaaaaagtgatgaggttctcatgaacaagcgtaccatccgtgatattgacatcaaaggtaagcgggttttcatgcgtgtggattttaatgtgcccctcaatgaggatggcacggtccgcagcgataagcgcattcagggtgcgctgcccaccattcgttatgccattgagcagggggctaaagtaattttggcttctcacttggggcgcccctcaggggataagtttgaacccgaattttcactaaagcctgcgggtgaagcgcttgccgcgctgttgggccaaccggtcaagctggccccagattgtgtaggggccgaggtcgaagcaatggtggccgccatgcaggatggtgatgtggtgttgctggagaatgtgcgttttcacaagggtgaaaccaaggcggatgttgagctttccaagggttttgccaagttggccgatgtggtggtaaacgatgcctttggcacggcacaccgggcccattcgtccaatgtgggcattaccgagtttgtgcgccctgcggtggccgggtttttgatggccgatgagatggactattttgataaggtattgggtgcgcccgagcgtccggtcatggccattttggggggggccaagatctcaggcaagattgatgtgatcgaggcgctgctggacaaaatggataagatcattattggcggtggcatgtccttcaccttcttcaaagccatgggttatgaaattggcaactcgttgtgtgaagatgagatgttgccggtggcagaaaaaaccttggctaaagccaaagagaagggggtatccctgatcctgccagtggattgcgtggcggcggacgcctttcgtgaggatgccaatacccagatctgctcggtagaagcactacccgctggctggatggggctggatatcgggcctgagagcgtcaagctgtttgccaaggcgttggagggggttaaaaccgtcatttggaacggccccatgggggtgtttgaaatggccccctttgccagtggcaccaaccatttggcccatttgttggcggagagtgattgtctttcggtgatcgggggtggtgatacggcggcggcggttaaacaagcgggcgtggccaagcaactctcttacatctccactggtggtggggcctcgctggagttgatggagggcaaacagctgcccggtatcacctcgctggatgataaatag

SEQ ID NO: 56895 - protein, 417 aa, Magnetococcus sp. MC-1
MTLYASPVFLMNASPKSDEVLMNKRTIRDIDIKGKRVFMRVDFNVPLNEDGTVRSDKRIQGALPTIRYAIEQGAKVILASHLGRPSGDKFEPEFSLKPAGEALAALLGQPVKLAPDCVGAEVEAMVAAMQDGDVVLLENVRFHKGETKADVELSKGFAKLADVVVNDAFGTAHRAHSSNVGITEFVRPAVAGFLMADEMDYFDKVLGAPERPVMAILGGAKISGKIDVIEALLDKMDKIIIGGGMSFTFFKAMGYEIGNSLCEDEMLPVAEKTLAKAKEKGVSLILPVDCVAADAFREDANTQICSVEALPAGWMGLDIGPESVKLFAKALEGVKTVIWNGPMGVFEMAPFASGTNHLAHLLAESDCLSVIGGGDTAAAVKQAGVAKQLSYISTGGGASLELMEGKQLPGITSLDDK

SEQ ID NO: 56896 - DNA, 1188 bp, Thermobifida fusca
  CDS (1)..(1188)
atgcggacgatcgaggatctcgacgtcgcgggcaagcgcgtcttcgtccgagccgatctcaacgtgccgctcgacggtgaccgcatcaccgacgacggtcgtatccgggccagcctgcccaccatcactgcactgcgcgagcggaacgcgcgcgtgatcatcggcgcccacttgggccgccccaaaggcaaggtcgaccctgcctactcgctgaagccggtcgccgcccgcctgggtgagctgctgggcaccgaggtgcgcttcgcctccgacaccgcaggcgaatccgcccaggccatcagccgcgagctggccgacggcgaggtcgccctcgtggagaacctgcgttttgagccgggcgagaccagcaaggacgacgccgaacgcggtgagttcgccgatcggctcgccgcactggctgagctgtacgtcggcgacggtttcggcgccgtgcaccgcaagcacgccagcgtctacgacctgccgaagcgtctgccgcacgccgccggcggactggtgctggccgaagtcaacgtgctgcgcaagctgaccgagtccccgcagcgcccctacgtggtcgtactgggcggctccaaggtctccgacaaactcggcgtcatcgacaacctgctcaacaccgccgaccgcatcctcatcggcggcggcatggcctacaccttcctcgccgcgcagggctacgaggtgggcgccagcctgctggagcgggaccagatcgacaccgtcaaggggtacctgcgccgggctgaggagcgcggtgtggaactcgtgctcccggtggacgtggtggccgcagagaagttcgctgcggacgccgcccacgacgtggtcgacgtccgggagatccccgcggaccggatggggctggacatcggaccggcctcggctgagctcttcgcgtcgaaactggcggacgccgcgaccgtgttctggaacggcccgatgggcgtgttcgaaatggagccgtacgcgaagggcacccgctccgtggcgcaggccctagccgactcctcggcgttcaccgtggtcggcgggggcgactcggccgcagccgtccgggcactcggcttcgacgagaaggcgttcagccacatctccaccggtggcggtgccagcctggagtacctcgaaggaaagaccctgcccggcatcgcggcattggaggaatag

SEQ ID NO: 56897 - protein, 395 aa, Thermobifida fusca
MRTIEDLDVAGKRVFVRADLNVPLDGDRITDDGRIRASLPTITALRERNARVIIGAHLGRPKGKVDPAYSLKPVAARLGELLGTEVRFASDTAGESAQAISRELADGEVALVENLRFEPGETSKDDAERGEFADRLAALAELYVGDGFGAVHRKHASVYDLPKRLPHAAGGLVLAEVNVLRKLTESPQRPYVVVLGGSKVSDKLGVIDNLLNTADRILIGGGMAYTFLAAQGYEVGASLLERDQIDTVKGYLRRAEERGVELVLPVDVVAAEKFAADAAHDVVDVREIPADRMGLDIGPASAELFASKLADAATVFWNGPMGVFEMEPYAKGTRSVAQALADSSAFTVVGGGDSAAAVRALGFDEKAFSHISTGGGASLEYLEGKTLPGIAALEE

SEQ ID NO: 56898 - DNA, 1242 bp, Methanosarcina barkeri str. fusaro
  CDS (1)..(1242)
atgtctcagaaaataactggaaaggattatttgacgatgagtgatgtcgtactggacaataaaagagtacttgtaagggtggactttaactcaccaatggatgataatggaaacatcctggacgataagaaaattaagagccatttgcctacgttgcagtccctggagcactcaaaagtggtcctgatgtctcatcagggtcgacctggagatgaagactataccaccctggaagcccatgcaaagctggcaacagagcttttgggtcgagaagtaacctacgaggatgatatattcagctcatgcgcaaggaatgctataaaatcccttgcccagggagagatcctgctccttgagaacacgcgtttcaatgccgaagagatcacgaaccgcccgcctgagaaacaggctaaaagccagatggtcaagaagttgtatccactatttgatctctttataaacgatgctttttcagtttctcacagatctcagtgttctgtggtagggtttacagaagtcttgcctagcgttgctggcatacttatggataaggaaattacaggcttggataaagccttgaaatgtcgtgagcacccagcaatcttcatactgggaggagcgaaagccaacgactccataaaggcgatttctaatattctcaaacgggctggagctgataagatccttaccacaggggtagtagctacaatatttatgatggcaatgggcgtcgatgtaagcgaggtcaacaggaaattcattgaagataagaaatatatggaccagatttcgattgcttccaagctactcaaggattactcaggcaagatcatcgtgcctcaggatgtagcgttaaacagtggtggagaacgtcaagaagtcgaagtggacaagataaaaaaaggaaatcttccaatagctgatattggccgagagaccatcgaaaattattccaaatatcttaaggaagcaaaactatgtgtttttcatggcccaaccggtatttttgaactagataatttcaggcttggtacggatgaacttcttaaggctgcggctcaagcaagctattctgtcgcaggaggagggcataccttagatgccattgatcaactcggtctgggctctaaattttctcatataagcatgggtggaggtgcaagtataacctatatctctggcgagcccttgccaggaatcacagctctgaaaaaaaatgcattcaggtaccatcaaggttaa

SEQ ID NO: 56899 - protein, 413 aa, Methanosarcina barkeri str. fusaro
MSQKITGKDYLTMSDVVLDNKRVLVRVDFNSPMDDNGNILDDKKIKSHLPTLQSLEHSKVVLMSHQGRPGDEDYTTLEAHAKLATELLGREVTYEDDIFSSCARNAIKSLAQGEILLLENTRFNAEEITNRPPEKQAKSQMVKKLYPLFDLFINDAFSVSHRSQCSVVGFTEVLPSVAGILMDKEITGLDKALKCREHPAIFILGGAKANDSIKAISNILKRAGADKILTTGVVATIFMMAMGVDVSEVNRKFIEDKKYMDQISIASKLLKDYSGKIIVPQDVALNSGGERQEVEVDKIKKGNLPIADIGRETIENYSKYLKEAKLCVFHGPTGIFELDNFRLGTDELLKAAAQASYSVAGGGHTLDAIDQLGLGSKFSHISMGGGASITYISGEPLPGITALKKNAFRYHQG

SEQ ID NO: 56900 - DNA, 1239 bp, Methanosarcina barkeri str. fusaro
  CDS (1)..(1239)
atgacttctagagactttcttacaatcgatgattttgacacgcacggaaagacaattcttgtaagggttgacctgaactcccctatggatccacagggtaatattctggatgatatgcggatccgaagccatattgccaccttgaaggatcttgaggacgcaaaagttgttttgcttgcacaccagagcaggcccggaaaaaaagactttactacaatgaagcctcatgccaacctgatgtccaaatacctgggaaagcaggttctttatgtagatgatatttttggaacttatgcaaagaccaggattgcttctatggaaaatggagatgtcatcctgctcgaaaatgtaaggttctattctgaagaaagcctcgaaagaactccagcagaacaggcaaaaacttatccggttaaaaaactggcaccttttgtagatatcttccttaatgatgcctttgccgtatctcacaggtctcaactttccgtagtaggatttacagaggttctccctaccggagccggaagggtcatggaaaaggaactcacgtctttggatcgggggatcaaaggaggggaacggccaacgattttcgttctcggaggggcaaaagtcgatgattcgctccatgtggcggaaaatgtgctttcaaatggaggagctgaccgggtactcctgaccggagtagtagcaaatgtggcacttgcggcatccggtatagatatcggaaaagtaaatctggacttcatcaaatcccagggctacgaagaccagatcgaaaaagcaaaaagtatacttacgaaattcaaagataaagttggtcttccaagggatgtggctttaaacgacaataagaagcgggtcgaattgcctgtttcagaacttaattctaattctcttcctataaacgatattgggcttgaaaccattgtggactttaccagtgaaatcgcaagtgcaaaaactgttatcttaaacggccctgcggggatttccgaagttgctgagtttgcccttggaacgcacgagattataaaagctgctattaaatccgagttttcaatcattggcggtgggcatatttcggcagaagttgagcatctcgggcttgcacaccgtttctctcacatcagtacaggtggcggggcactaattgattatctctcaggagtaaagctgcctggtgtagaggccctgaaatctgcagctaagagatatgaagaagctaagaaaatctaa

SEQ ID NO: 56901 - protein, 412 aa, Methanosarcina barkeri str. fusaro
MTSRDFLTIDDFDTHGKTILVRVDLNSPMDPQGNILDDMRIRSHIATLKDLEDAKVVLLAHQSRPGKKDFTTMKPHANLMSKYLGKQVLYVDDIFGTYAKTRIASMENGDVILLENVRFYSEESLERTPAEQAKTYPVKKLAPFVDIFLNDAFAVSHRSQLSVVGFTEVLPTGAGRVMEKELTSLDRGIKGGERPTIFVLGGAKVDDSLHVAENVLSNGGADRVLLTGVVANVALAASGIDIGKVNLDFIKSQGYEDQIEKAKSILTKFKDKVGLPRDVALNDNKKRVELPVSELNSNSLPINDIGLETIVDFTSEIASAKTVILNGPAGISEVAEFALGTHEIIKAAIKSEFSIIGGGHISAEVEHLGLAHRFSHISTGGGALIDYLSGVKLPGVEALKSAAKRYEEAKKI

SEQ ID NO: 56902 - DNA, 1197 bp, Geobacter metallireducens GS-15
  CDS (1)..(1197)
atggcaatccgctatatcgacgaaatcgaaagtctcaaggggaaaaaggtatttatcagggtcgacttcaacgttcctctggatgaacatcagaatataaccgaagacacccggatccgggccgtccttcccactatcaactttgcccttgatgcgggcgccaaggtaattcttgcatcccacttgggtcgcccaaagggtgagcgaaaaccgaagtattccatggctccggcggccaagcgcctctcgcgcctgctcaacaaggaagtgcaactggctcccgactgcatcggcgatgaagtcaagaagatgatcgacgccatgaaaccgggcgaagtccttctactcgaaaacgtccgtttctacgagggcgaagagaaaaatgacgccgatttcgccaaggccctggccaacgactgtgaaatatacatcaacgacgcctttgccgtctcccacagggcccacgcatccgtcgaagccatcacgaagtttttcccggtcgtcgctgccggtttcctcatgaacaatgagattaattatttcgagaaggcgatgcaaaagcccatcaggcccttggtcgccattctcggcggggccaaggtttccggaaaacttgaggtattggaaagcctggtcaacaaggtagacaagattatcattggcggcggcatggccttcacgttcctcaaagccctcggctataacgtcggcaaatcgctggtggaggaagaactgctggaaatcgccctcactacctacaccaaggcccgtgaaaaaggcgtgaaattctatctaccggtcgactgcgttgcggccgaccgcttcaaccccgaggctgaaaccaaagtgacgaccattcaggaaatccccgaggagtggatggcactcgacatcggaccggcaaccgtgaccctcttcacggaagcgctccagaacgccaaaaccattatctggaatggtcccatgggcgtattcgagatggatgccttctcccgcggaacctttgccatggtttcggccgtggccaactcctatgctctcaccatcgtcggaggaggagacaccgattcagccgtccatcgcgcgggggaatacgcgaagatcagctacatttccacaggcggcggcgcgttcctggaactcctcgaagggaagcatcttcccggcatcaaagtgctggaagaaaacggcaagtag

SEQ ID NO: 56903 - protein, 398 aa, Geobacter metallireducens GS-15
MAIRYIDEIESLKGKKVFIRVDFNVPLDEHQNITEDTRIRAVLPTINFALDAGAKVILASHLGRPKGERKPKYSMAPAAKRLSRLLNKEVQLAPDCIGDEVKKMIDAMKPGEVLLLENVRFYEGEEKNDADFAKALANDCEIYINDAFAVSHRAHASVEAITKFFPVVAAGFLMNNEINYFEKAMQKPIRPLVAILGGAKVSGKLEVLESLVNKVDKIIIGGGMAFTFLKALGYNVGKSLVEEELLEIALTTYTKAREKGVKFYLPVDCVAADRFNPEAETKVTTIQEIPEEWMALDIGPATVTLFTEALQNAKTIIWNGPMGVFEMDAFSRGTFAMVSAVANSYALTIVGGGDTDSAVHRAGEYAKISYISTGGGAFLELLEGKHLPGIKVLEENGK

SEQ ID NO: 56904 - DNA, 1188 bp, Novosphingobium aromaticivorans DSM 12444
  CDS (1)..(1188)
atgagcttcaagacccttgacgacatcggcgacctgaccggcaagaccgtgctggtgcgcgaggacctcaacgtgccgatgcaggacggcgcggtcaccgacgacacgcgtctgcgcgccaccatcgcgacgctgaacgagctgtccgacaagggcgcgaaggtgctcgtgctggcgcactttggccgccccaagggccagccgtcggaagaattttctttgaagaagctcgctgccccgctcgcgcacgtactgggccgtccggtcagctacatcgactgggaaagcgacaaggccgctgtggctgctctgacgcccggtgcgattgccgtgcttgagaacacccgcttcttcgacggcgaggaaaagaacgacccagccgtgatcgagcgtttcgccagcctcggcgacatttacgtcaatgatgccttttccgccgcccaccgcgcccacgcttcgaccgaaggcctggcacacgtgctgccggcctatgcaggccgcgccatggaggccgagctcaaggcattgcagaaggcgttgggggaacccgaacgtccggtggcagccgttgttggcggggccaaggtgtcgaccaagctcgacgtgctcaagcaccttgtcagcaaggtcgatcacctgatcatcggtggtggcatggccaacacgttccttgcggcgcgcggcgtgaacgtgggcaagtcgctgtgcgaacacgaccttaccggcaccgccgaggaaattctcgacaatgccgacaagtcgggctgcaccgttcacctgccgtacgacgtggtcgtttcgaaggagttcaccgcaaacccgccgagcctgcggacctgcaatgttcatgaggtcgctgcagacgagatgatcctcgacgtgggcccggccgcggtcgaggcgcttgctgatgtgctcaagacctgcaagacgctggtgtggaacggtccgatgggggcgttcgagaccgagccgttcgacgccgccaccgtggcgttggcgcgcacggctgcagctctgaccaaggaaggttcactcgtgtcggtggcgggcgggggcgataccgtggctgccctgaaccatgcgggcgtggttggtgatttctcttacatctcgactgcaggcggcgccttccttgagtggatggaaggaaaggaattgcccggcgtcgcggcgctggaaggatag

SEQ ID NO: 56905 - protein, 395 aa, Novosphingobium aromaticivorans DSM 12444
MSFKTLDDIGDLTGKTVLVREDLNVPMQDGAVTDDTRLRATIATLNELSDKGAKVLVLAHFGRPKGQPSEEFSLKKLAAPLAHVLGRPVSYIDWESDKAAVAALTPGAIAVLENTRFFDGEEKNDPAVIERFASLGDIYVNDAFSAAHRAHASTEGLAHVLPAYAGRAMEAELKALQKALGEPERPVAAVVGGAKVSTKLDVLKHLVSKVDHLIIGGGMANTFLAARGVNVGKSLCEHDLTGTAEEILDNADKSGCTVHLPYDVVVSKEFTANPPSLRTCNVHEVAADEMILDVGPAAVEALADVLKTCKTLVWNGPMGAFETEPFDAATVALARTAAALTKEGSLVSVAGGGDTVAALNHAGVVGDFSYISTAGGAFLEWMEGKELPGVAALEG

SEQ ID NO: 56906 - DNA, 1239 bp, Ferroplasma acidarmanus
  CDS (1)..(1239)
atggataggtccccgttttacactatggacgattttgatttcaatggcaagagagtgtatcttagaatagatataaattccccaattaaccctataaccggagaagtagtggatgatacaagattcattcattatttgaggacaattaacgaacttaaaaactcaaaggttgttattattgcccaccagggaaggccgggcgacagtgattttgtaagtttgcggcaacatgcagggcatcttggcaggctgttaggcagagatgttttattcgttgattcattgatagggtctgcagtggaaacagctataaggaacatgaaaaatggagatattatcatgctggagaactccagattctatagcgaagaaatacttataaaagatgatggggctgcccagaaaaacacatttattgtcaggaatttatcaaaattatttgattactttataatcgatgcttttcctgcgatacacagggaccagacaacacttaccggattcaaggatataaaacccaatatagctggcaggcttatggaaactgaaattaatagcatagacaggttcatgaattctaaatcacatccgaaactggctataatgggtggagccaaaataagggatgctataaaggtaacaggcccattcctggagaaagggatagtggacaatataatttttggtggtgtggcagcaaacatattcctgtgggcttccgggatagacatagggaaaaggaacatggaattcatcgaaaaacaggataaaaattataagaaattgctggaggaatgcaaatcgttgttatcccgattctccgatcgcatatacctccctgaagatttcatgcttaatcccttacagacagaaataaaaacaggtgagaaggttccagatgggcagttgctggcggatattggatttgagtccattaaaacttttagcagtattatagaaaaagcaaaaaatatatttctcaatggcccgatgggaatgtatgaaataaatgaatactcacttggaaccagggaaatatttaatgcagtttcccagagccctgcatcaaaaatagtcgggggagggcacacaataaatgcaattaatgaattcgggctttcagattccatgggatatatatcaaccgggggtggcgccctgataaattatttatccggtgagcctatacctgtaatagactcacttgtttataacaggaaaaaatttggaggtaattaa

SEQ ID NO: 56907 - protein, 412 aa, Ferroplasma acidarmanus
MDRSPFYTMDDFDFNGKRVYLRIDINSPINPITGEVVDDTRFIHYLRTINELKNSKVVIIAHQGRPGDSDFVSLRQHAGHLGRLLGRDVLFVDSLIGSAVETAIRNMKNGDIIMLENSRFYSEEILIKDDGAAQKNTFIVRNLSKLFDYFIIDAFPAIHRDQTTLTGFKDIKPNIAGRLMETEINSIDRFMNSKSHPKLAIMGGAKIRDAIKVTGPFLEKGIVDNIIFGGVAANIFLWASGIDIGKRNMEFIEKQDKNYKKLLEECKSLLSRFSDRIYLPEDFMLNPLQTEIKTGEKVPDGQLLADIGFESIKTFSSIIEKAKNIFLNGPMGMYEINEYSLGTREIFNAVSQSPASKIVGGGHTINAINEFGLSDSMGYISTGGGALINYLSGEPIPVIDSLVYNRKKFGGN

SEQ ID NO: 56908 - DNA, 1188 bp, Cytophaga hutchinsonii
  CDS (1)..(1188)
atgaaaacagtagacagttttaacttttcaggtaaaaaagccctgatacgcgttgattttaacgtccctcttaataagagttttgaaattacagatgatacaagattaaaagcagtattacctactgtttcgaaagtattaaaagatggtggttcagcaattttgatgtcacacttaggtagaccaaaaggtggaccggaagaaaaatattctttaaaacacatccttccttatctgaacaaaatgttcggacaggaagtattgtttgcggcggattgtatcggtgaagatgcaaaagcaaaagcagcagcattaaaaccaggtcaggtattattacttgagaacttacgtttctatccggaagaagaaaaaggcgatgttgaattcgcaaaaaaactttctgtattaggtgatgtatgggtgaatgatgcatttggtaccgcacacagagcacatgcttcaacagcggtaatcggacaattcttcaaagataaagtttgcgggtatgtaatgcaggctgaacttgacaatgcaaataaattattaaagcaaggtgaaaaaccaatcacagctgttatgggaggttctaaaatctctgataaaatcatggtgattgaaaacttattagatacggttgacaacctgataatcggtggcggtatgtcttataccttcacaaaagcattaggcggaaagattggcaaatcaatcaacgaaccagataaattagagcttgcgctttcgttaattgaaaaagctaaagcgaaaaatgttaaattatatttaccgttagataacgttgttgcagatgatttcagcaacgatgcaaacaagcagacagtaaaaacgggtgaaattccggatggctgggaagggctggatatcggacctgaaactgttaagttattcagcgaagtagttgcaaactctaaaactgttttatggaacggaccaatgggcgtgtttgaatttgcaaactttgctactggtacgattgctattgctaaagcagttaaagaagcaacacaaaaaggagctttctcattaatcggtggtggcgactcagctgctgcaatcaacaatttaggtttcggtaacgatgtatcttacgtttctacaggcggcggtgcattacttgaatacttcgaaggcaaaacacttccgggtgtggcggcgttggagaaatag

SEQ ID NO: 56909 - protein, 395 aa, Cytophaga hutchinsonii
MKTVDSFNFSGKKALIRVDFNVPLNKSFEITDDTRLKAVLPTVSKVLKDGGSAILMSHLGRPKGGPEEKYSLKHILPYLNKMFGQEVLFAADCIGEDAKAKAAALKPGQVLLLENLRFYPEEEKGDVEFAKKLSVLGDVWVNDAFGTAHRAHASTAVIGQFFKDKVCGYVMQAELDNANKLLKQGEKPITAVMGGSKISDKIMVIENLLDTVDNLIIGGGMSYTFTKALGGKIGKSINEPDKLELALSLIEKAKAKNVKLYLPLDNVVADDFSNDANKQTVKTGEIPDGWEGLDIGPETVKLFSEVVANSKTVLWNGPMGVFEFANFATGTIAIAKAVKEATQKGAFSLIGGGDSAAAINNLGFGNDVSYVSTGGGALLEYFEGKTLPGVAALEK

SEQ ID NO: 56910 - DNA, 1194 bp, Clostridium thermocellum ATCC 27405
  CDS (1)..(1194)
atggcaatgatgaacaagaaaaccattgaggatattgacgtaaaaggtaaaaaggttatagtcagggttgattttaatgtgcctttggacgaaaacagaaagattaccgatgacaagagaatagttggtgcgcttccaaccatcaagtatctggttgaacacggtgcaaaaactatattggtttcacacctgggaagaccaaaagaaggttttgaggaaaagtacagcatggctccgactgccgtaagattgggagaacttcttggaaaagaagtaataatggcgaaagatgttattggtcctgatgcaaaggcaaaagcagcggcattaaaagaaggagaagttttaatgctcgaaaatgtcagattccacaaggaagagactaaaaacgatcctgcttttgcaaaagaattggcaagcatggctgaaatttatgtaaatgatgcgttcggaactgcccacagagcccacgcttcaacggcaggtcttgccgactatctgccggcggtatgcggatacctcatccaaaaggaaattgaggttatgggcaaggctctgtcaaatcctgaaagaccgtttgtggcaatattgggcggtgccaaggtttcagacaaaataggcgttattgagaaccttattgacaaagttgacactcttataatcggcggaggtatggcatataccttctttaaagcaaagggatacagcataggaacatccctgtgtgaagatgataaagttgagcttgcaaagagccttatggataaagcagagaaaaagggagtaaaactcttgcttcctgtggacaatgttgtaggcaaagagttcagcaatgatacagaacgcaagactgttccgtctgaccagattccggacggatggatgggtatggacatcggtgaggaaacaatcaagttgtattctgaggcaatcaagaatgccaaaaccgtggtatggaacggtcctatgggcgtatttgagttctccaactttgccaacggtacaagggaagttgcaagagcggttgccgagtccggagcaatttcaataatcggaggcggagattctgccgcagctatagaacagcttggttttgccgataagattacccacatttcaaccggaggcggcgcgtctttggagtttcttgaaggaaaagtattgccgggaattgatgtattaatggataaataa

SEQ ID NO: 56911 - protein, 397 aa, Clostridium thermocellum ATCC 27405
MAMMNKKTIEDIDVKGKKVIVRVDFNVPLDENRKITDDKRIVGALPTIKYLVEHGAKTILVSHLGRPKEGFEEKYSMAPTAVRLGELLGKEVIMAKDVIGPDAKAKAAALKEGEVLMLENVRFHKEETKNDPAFAKELASMAEIYVNDAFGTAHRAHASTAGLADYLPAVCGYLIQKEIEVMGKALSNPERPFVAILGGAKVSDKIGVIENLIDKVDTLIIGGGMAYTFFKAKGYSIGTSLCEDDKVELAKSLMDKAEKKGVKLLLPVDNVVGKEFSNDTERKTVPSDQIPDGWMGMDIGEETIKLYSEAIKNAKTVVWNGPMGVFEFSNFANGTREVARAVAESGAISIIGGGDSAAAIEQLGFADKITHISTGGGASLEFLEGKVLPGIDVLMDK

SEQ ID NO: 56912 - DNA, 1197 bp, Microbulbifer degradans 2-40
  CDS (1)..(1197)
atgactcaagaggaaatatccatggctgttattcagatgaaggacctcgatcttaaaggcaaacgcgttcttattcgccaagatctaaacgtacccctacaggatggtgaaatcacctccgatgtacgtatccaagcatcattgcctaccatcaaagccgcagtagacgcgggtgctaaagtgatgttgatgtctcacttgggccgccctaccgaaggcgaatacgctgacgaattttctttaaagcctgttgctgcacgcttaaccaaattgttgggcaaagaagtgggcttggtaaaaaactggcaagaaggcgttgctgttgctgaaggcgaagttgtattgctagaaaacgtgcgctttaacgtgggcgagaaaaaagacgacgaaacattagctaaagcgtacgcagcattgtgcgacgtatttgtgatggatgcattcggtaccgcgcaccgcgcgcaagcatctacccacggcgtcgcgaaatttgcaccggttgcctgcgcaggcccgctattgtctggcgagttgagtgcattagaaaaagccctagccaaccctgcgcgcccaatggttgcggtggtaggtggctctaaagtttctacaaaattaaccgtattagatgcgctttctaaaattgttgatgtaatggttgtgggtggcggtatctccaacactttcgttgctgctgccggtaacgaagtaggcaactctttatacgaaaaagatttaattccagaagcgcaacgcttgtgtgcagaaactgaagttatttacgcgcacgatgtgcgagtaactaaagagggcttcagcgattggaatcacaactctgtaactgaagttaaagtacctgcagatattcaagccgacgaagaaattattgactacggcccagaaactgcgcaaaaagttgccgctattttgaaagatgctaaaaccattatttggaacggcccgtgtggcgttttcgagtttgatgcgtttgctaaaggtaccgaagtggttgcgcgcgcaattgcagaaagcgaaggcttctctattgccggcggcggtgacaccttagcggcaattgataaattcggtttggccgacggcgtttcttacatttctaccggtgggggtgctttcttggaatacgtagaagggaagccgttacccgctgtagtgatgttagaagagagagctaagggttaa

SEQ ID NO: 56913 - protein, 398 aa, Microbulbifer degradans 2-40
MTQEEISMAVIQMKDLDLKGKRVLIRQDLNVPLQDGEITSDVRIQASLPTIKAAVDAGAKVMLMSHLGRPTEGEYADEFSLKPVAARLTKLLGKEVGLVKNWQEGVAVAEGEVVLLENVRFNVGEKKDDETLAKAYAALCDVFVMDAFGTAHRAQASTHGVAKFAPVACAGPLLSGELSALEKALANPARPMVAVVGGSKVSTKLTVLDALSKIVDVMVVGGGISNTFVAAAGNEVGNSLYEKDLIPEAQRLCAETEVIYAHDVRVTKEGFSDWNHNSVTEVKVPADIQADEEIIDYGPETAQKVAAILKDAKTIIWNGPCGVFEFDAFAKGTEVVARAIAESEGFSIAGGGDTLAAIDKFGLADGVSYISTGGGAFLEYVEGKPLPAVVMLEERAKG

SEQ ID NO: 56914 - DNA, 1215 bp, Oenococcus oeni PSU-1
  CDS (1)..(1215)
atgacaaaattaactgtaaaagaccttgacttaaaaggcaaaaaagttttgatgcgggttgatttcaacgtaccgattaaggatggcgttattggcaatgacaaccgtgttgttgctgctttgccaacgattaaatatgttcttgaacagggtggaaaggctattctttttagccatctcggtcgtattaagaaggctgaggacaagccaggcttgagtttggccccggtggccaagcatctgagcgatttgcttaatcaagaagttgttttccctggaaaaaccgaggggaaagagctcgaagatgctatcgacaaattaaaagacggccaggtattaatggttgaaaatacacgctatgaggacgtcgacgccaatggcgagtacgttaaacgcgaatccggcaacgaccctgaattaggtaaatattgggctgatttgggggatgatttgtttgtcaacgatgcttttggaacagcacatcgttcccatgcgtcgaatgttggcattgcctcgaatgtttcgaaaactgctgctggatttctaatggaaaaagaaatcaagtatttggatgaggctgttaataatccaaagcgtccattcgtggctgtcttaggaggcgccaaagtttctgataaaatcgaagttatcaaaaatttgttgtcaaaagccgacaaagttattgttggtggtgggatgagttacactttttccaacgccaagggcgtgaagattggtaattctttgtttgaagccgataaagtctctttggccaaagaaattatgaaagaagcaggtgacaagctcgttttgcctgaggattcggttgcagctgaaagctttgcaaacgatgttccaacaaaggtttttgaaaacggtattcctgatggttggatgggtcttgatattggaccaaaaacgatcgagaaattcaaaaataccctaaaaggggccaagacagttgtttggaacggtccgatgggtgtctttgaaatgagtaatttcgctaacggaactttggaattaggaaagtttattggatccctaacttctgaaggagcggcaacaattgttggtggtggtgattcaactgccgcagtttctcaacttggaattgctgatcaatttactcacatttctacaggtggtggagctagtcttgaatatctggaaggtaaaactcttcctggcattgctgctatttctgataagtga

SEQ ID NO: 56915 - protein, 404 aa, Oenococcus oeni PSU-1
MTKLTVKDLDLKGKKVLMRVDFNVPIKDGVIGNDNRVVAALPTIKYVLEQGGKAILFSHLGRIKKAEDKPGLSLAPVAKHLSDLLNQEVVFPGKTEGKELEDAIDKLKDGQVLMVENTRYEDVDANGEYVKRESGNDPELGKYWADLGDDLFVNDAFGTAHRSHASNVGIASNVSKTAAGFLMEKEIKYLDEAVNNPKRPFVAVLGGAKVSDKIEVIKNLLSKADKVIVGGGMSYTFSNAKGVKIGNSLFEADKVSLAKEIMKEAGDKLVLPEDSVAAESFANDVPTKVFENGIPDGWMGLDIGPKTIEKFKNTLKGAKTVVWNGPMGVFEMSNFANGTLELGKFIGSLTSEGAATIVGGGDSTAAVSQLGIADQFTHISTGGGASLEYLEGKTLPGIAAISDK

SEQ ID NO: 56916 - DNA, 1203 bp, Pediococcus pentosaceus ATCC 25745
  CDS (1)..(1203)
ttggctaaattaactgtttcagatttagatgttaagaacaagaaagttttgatgcgcgttgactttaacgtgccagttaaaaatggtgtgattggtgatgacaaccgtgtcgttgctgctcttccaacaattaaatacattatcgaaaacggtggaaaggcaattcttttctctcacttaggtcgtatcaagactgaagaagacaaaaaagaattgactcttcgtccagttgctcaacgcctttcagatcttcttggcaaaccagttacatttgttcctgtaacacgcggtgcacaacttgaagatgctgttaatggcatgaacgacggcgatgtattattgttcgaaaacacacgttttgaagacttagatggcaagaaggaaagtaaaaacgatcctgaacttggcaaatactgggcatcacttggcgacatgttcgtaaacgatgctttcggtacagctcaccgtgcccacgcttcaaacgttggtgttgctgaagcaatgaaggctgacggcaagcaagttgctgctggtttccttatggaaaaagaaatcaagttcttgggtgaagctgttgacgaacctaagcatccatttgttgctattttaggtggcgcaaaggtttctgacaagattggtgtaattgatcacttacttaataaagctgacaaagttattattggtggtggtatgacatacacattctacgctgctaaaggcatgagcattggtaactcacttgttgaagctgacaagattgatgttgctaaagaaatccttgctaagggtggcgacaagattgttcttccttcagacagtatcgttgctgaaaaatttgataacgatgttcctaacaaagttgtcgaaggcgatattcctgatggttacatggctcttgatattggacctaagtcagttgcagaatttaaggatgtccttaaagatgctaagactgttgtatggaacggaccaatgggtgtattcgaaatgagcaactatgctaacggtacacttgaagttggtaagttcttaggtacattatcagacgctacaacaattgttggtggtggtgactcaactgctgctgttaagcaattaggcgttggcgaccaattgacacatatctcaactggtggtggagcttcacttgaataccttgaaggtaaagaacttcctggtatcgctgctatttcaaacaaataa

SEQ ID NO: 56917 - protein, 400 aa, Pediococcus pentosaceus ATCC 25745
MAKLTVSDLDVKNKKVLMRVDFNVPVKNGVIGDDNRVVAALPTIKYIIENGGKAILFSHLGRIKTEEDKKELTLRPVAQRLSDLLGKPVTFVPVTRGAQLEDAVNGMNDGDVLLFENTRFEDLDGKKESKNDPELGKYWASLGDMFVNDAFGTAHRAHASNVGVAEAMKADGKQVAAGFLMEKEIKFLGEAVDEPKHPFVAILGGAKVSDKIGVIDHLLNKADKVIIGGGMTYTFYAAKGMSIGNSLVEADKIDVAKEILAKGGDKIVLPSDSIVAEKFDNDVPNKVVEGDIPDGYMALDIGPKSVAEFKDVLKDAKTVVWNGPMGVFEMSNYANGTLEVGKFLGTLSDATTIVGGGDSTAAVKQLGVGDQLTHISTGGGASLEYLEGKELPGIAAISNK

SEQ ID NO: 56918 - DNA, 1197 bp, Trichodesmium erythraeum IMS101
  CDS (1)..(1197)
atgacaaaaaaaactgtagcaagtttatcaaaatctgacttatctggcaaaaaggtacttatgcgggctgattttaatgtacctgttgataatggtagtattacagacgatactagaattcgggcagctcttcccacaattcaagatttaactgagaaaggtgcaaaagttatcttgactagtcattttggacggccaaagggaaaggttaatgaaaagatgcgtctgactcttgtgggggagagactctctgaagtattgggtaaagaagttaaaaagtgtgacgactgcattggtgatgaagtaacttctactgtggcggaaatgaaagatggtgatgtagttttgctagaaaatgttcgcttctactctggagaggaggggaatgatccagagtttgccaaacaacttgcttctgtggcagatttatatgtgaatgatgcttttggaactgctcatcgtgctcatgcttcgactgagggcgtgactaaatatttgagtccttctgttgctggttatttaattgaacaggaactaaaattcctccaaggtgcaattgatagtcctcaaaaacctttagctgcaattattggtggttctaaggtttctagtaaaattggtgtaatagaagctttgttggataagtgtgataagttgctcttgggtggtggtatgattttcactttctacaaagctcgtggtttaagtgtgggtaagtctctggttgaggaagataagatagaattggcaaagtctttggaagctaaggcaaaagagaaaggtgtaacaatgttgttacctactgatgtggttgtagctgataagtttgacccagaggcgaatactcaaactgttagtattgaagctattccggatggttggatgggtttggatatcggacctgagtctgcaaaggtttttcaagatgctttagcagactgtaaaactgtaatttggaatggtccgatgggggtatttgagatggagaaatttgctaaaggtactgaagcgatcgctcagactcttgctgataagcaggatgctattactattattggtggtggtgactctgttgctgcggtggagcagttaggtttgggtgaaaaaatgagtcacatttctactggtggtggtgctagtttggaattgttggaaggtaagaagttacctggtattgttgctttagatgatcaataa

SEQ ID NO: 56919 - protein, 398 aa, Trichodesmium erythraeum IMS101
MTKKTVASLSKSDLSGKKVLMRADFNVPVDNGSITDDTRIRAALPTIQDLTEKGAKVILTSHFGRPKGKVNEKMRLTLVGERLSEVLGKEVKKCDDCIGDEVTSTVAEMKDGDVVLLENVRFYSGEEGNDPEFAKQLASVADLYVNDAFGTAHRAHASTEGVTKYLSPSVAGYLIEQELKFLQGAIDSPQKPLAAIIGGSKVSSKIGVIEALLDKCDKLLLGGGMIFTFYKARGLSVGKSLVEEDKIELAKSLEAKAKEKGVTMLLPTDVVVADKFDPEANTQTVSIEAIPDGWMGLDIGPESAKVFQDALADCKTVIWNGPMGVFEMEKFAKGTEAIAQTLADKQDAITIIGGGDSVAAVEQLGLGEKMSHISTGGGASLELLEGKKLPGIVALDDQ

SEQ ID NO: 56920 - DNA, 1182 bp, Moorella thermoacetica ATCC 39073
  CDS (1)..(1182)
atggccaagttaaccctcaaagatctggagcttaacaataaacgggtcctggtgcgggtcgatttcaacgtccccctggaggcaggccgggtgactgacaatacccgtatccgggcggccctgcctaccattgaatacctgctggaccacggcgcccgggtgattcttatgtcccacctgggccggcccaagggtaaggtcaaggaagagctgcgcctggacccggtggccagggaactggaaagcctcctgggccggcaggtacataaggtcaacgactgcgtcggtcccgaagttgaggccgcagccgccgccctcaagcccggcgaggttctcctcctggaaaacctgcgcttccatcccgaagaagaaaagaacgaccccggtttcgcccggcagctggccagcctggccgatgtctatgtgaacgacgcctttggcgccgcccatcgcgcccatgcttccaccgagggcgtagcccactacctgccggcggcggccggtttcctgctccaaaaggagatcgagaccctgggcaaggccctggctgatcccgagcggccctttgtggccattattggcggggccaaggtatccgacaagatcagcgttatccgtaacctccttaccaaagtagacaccctgattatcggcggtggcatggccaacaccttcctgaaggcccagggctatgccatgggtaaatccctggtcgaagaagatcaggtacccctggcccaggagttgatccagcttgccgcccagaagggggtaaaaatgctcctgccccgggacctggtagtggcccaggagtttaaggccgatgccccccaccaggtagttgctgtaaatgccgtgcctgacggctggatggccctggatatcggcccggaaacggcccgggcctacgccggcgccctggagggagcccgtaccgtcgtctggaacggccccatgggcgtctttgagatggaggcctttgcccacggcaccgaggctgtagcccgggcagtggccgccgtcgacggcatgaccatcgttggtggcggcgattccgtcgctgccgtggaaaagatgggcgtggccggaaagatcgggcatatctccaccggtggcggcgcctccctggagttcctggaaggcaaagcccttcccggcgttgtcgccctgacggaaaagtaa

SEQ ID NO: 56921 - protein, 393 aa, Moorella thermoacetica ATCC 39073
MAKLTLKDLELNNKRVLVRVDFNVPLEAGRVTDNTRIRAALPTIEYLLDHGARVILMSHLGRPKGKVKEELRLDPVARELESLLGRQVHKVNDCVGPEVEAAAAALKPGEVLLLENLRFHPEEEKNDPGFARQLASLADVYVNDAFGAAHRAHASTEGVAHYLPAAAGFLLQKEIETLGKALADPERPFVAIIGGAKVSDKISVIRNLLTKVDTLIIGGGMANTFLKAQGYAMGKSLVEEDQVPLAQELIQLAAQKGVKMLLPRDLVVAQEFKADAPHQVVAVNAVPDGWMALDIGPETARAYAGALEGARTVVWNGPMGVFEMEAFAHGTEAVARAVAAVDGMTIVGGGDSVAAVEKMGVAGKIGHISTGGGASLEFLEGKALPGVVALTEK

SEQ ID NO: 56922 - DNA, 1182 bp, Thiobacillus denitrificans ATCC 25259
  CDS (1)..(1182)
atggcattcatccgcgtcaccgatctcgatctggcgggcaagcgcgtcttcatccgcgccgacatgaacgtgcccgtcaaggacggcaaggtcacgtccgacgcgcgcatcaccgcctcgatgcgcaccatcgagcactgcatgagggccggcgccaaggtcatggtgacctcgcacctcggccgcccgaccgaaggcgagttcaaggaagaggattcgctgaagcccgtcgtcgacgtgatcgcgcagaagctcggcaaaaacgtgcgcctgatccgtgaatggaccgagggcggtttcgacgtcgcgaacggcgaactcgtcgtgctcgagaactgccgcgtcaacaagggcgagaagaagaacgtcgacgagaccgcgaagaaatacgccgcgctgtgcgacgtcttcgtgatggacgccttcggcaccgcgcaccgcgccgaagcctcgacccacggcatcgccaaattcgcgccgaccgctgccgccggcattctgctcaccgaagagctcgacgcgctggccaaggcgctcgccaacccggcgcggccgatggtcgcgatcgtcggcggctccaaggtctcgaccaagctgaccgtgctcgaggcgctgtccgagaaggtcgaccagttggtcgtcggcggcggcatcgccaacaccttcctcgccgcgatgggcaagaacgtcggcaagtcgctgtgtgaacacgacctgatcccgactgccaagacgctgatcgagaagatggccgcgcgcggcgcctcgatcccgatcgccgtcgacgtggtgtgcggcaagaagttcgacgccaacgagcccgccgtgctgaagagcgccgacgaggtggccgacgacgacatgatcttcgacatcggcccgaagagcgcgcaggagcttgccgacatcatcgccaaggccggcacgattgtgtggaacggcccggtcggcgtgttcgagttcgaccagttcggcgaaggcaccaagaccgtctcgatggcgatcgccaacgccccgggcttcagcctggccggcggcggcgacaccatcgccgcgatccagaaatacgacatctacgacaaagtgagctatatctcgaccgccggcggcgccttcctcgaatacctggaaggcaaggtgttgccggccgtggcgattctggaggaacgcgcgcaaggctaa

SEQ ID NO: 56923 - protein, 393 aa, Thiobacillus denitrificans ATCC 25259
MAFIRVTDLDLAGKRVFIRADMNVPVKDGKVTSDARITASMRTIEHCMRAGAKVMVTSHLGRPTEGEFKEEDSLKPVVDVIAQKLGKNVRLIREWTEGGFDVANGELVVLENCRVNKGEKKNVDETAKKYAALCDVFVMDAFGTAHRAEASTHGIAKFAPTAAAGILLTEELDALAKALANPARPMVAIVGGSKVSTKLTVLEALSEKVDQLVVGGGIANTFLAAMGKNVGKSLCEHDLIPTAKTLIEKMAARGASIPIAVDVVCGKKFDANEPAVLKSADEVADDDMIFDIGPKSAQELADIIAKAGTIVWNGPVGVFEFDQFGEGTKTVSMAIANAPGFSLAGGGDTIAAIQKYDIYDKVSYISTAGGAFLEYLEGKVLPAVAILEERAQG

SEQ ID NO: 56924 - DNA, 1191 bp, Silicibacter sp. TM1040
  CDS (1)..(1191)
atgggctggaagacactcgacgacatggatctgcaaggcaaaagcgttttgacccgcgtggatatcaacgtcccgatggaagacggcaaagtcaccgatgacacccgcatccgccgcctcgtgccgacgatttccgacctgctctccaagggtgcaaaacctgtgctgctggcgcattttggccgcccgaagggcaaggtggtgcccgagatgtcgttgcagccgctggtccccgcgctggaggccgcctttggcgcgccggtgatgtttgtggccgattgccgaggccccgctgcaaaaggcgccgttgacgcgctcgcgcccgggcagatcctgctccttgagaacacgcgcttttatcccggcgaagaacaaaacgatgccgatctcgccaaagagatggccgcgcttggtgatatctactgcaatgatgccttctctgccgcccaccgcgcccatgcctccaccgaggcgctggcgcgcctgctgcctgcctgcgcgggccgcctgatggaggcagaactgaaagcgctcgaaggctctctggccacgcctgaacgccccgtcactgcggttgtgggcggcgccaaagtttcgaccaaactggaccttctgggcaatctggtggccaaggtagacacgcttgtgatcggcggcggcatggccaatacctttcttgcggcccaaggcatcgacgtgggcaaatcgctttgcgaacatgacatgacaggcaccgccaaggacatcatggcccgcgccgaggcggcaggctgcaccatcctgctgccgtcggacgtggtggtcgcgcgcgaattcaaggccggcgccgacaatgaaaccgtacccgcggacgcctgccctgcggatgcgatgatcctggatgctggccccgcctcggttgcggccatttccacagtctttgccgagagcaagaccctgatctggaacggcccgcttggtgcctttgaaatcgcgccctttgatattgcgaccaatacagcggcgcaaaaggcggcagaactcaccaaggccggccagctgatttccgttgcgggcggaggcgacaccgtcgctgcgctcaatcaggccggagcggcagaggcctttagctacatctccaccgccgggggcgccttccttgagtggatggagggcaaggtcctgcccggcgtcgctgccctgcagacctga

SEQ ID NO: 56925 - protein, 396 aa, Silicibacter sp. TM1040
MGWKTLDDMDLQGKSVLTRVDINVPMEDGKVTDDTRIRRLVPTISDLLSKGAKPVLLAHFGRPKGKVVPEMSLQPLVPALEAAFGAPVMFVADCRGPAAKGAVDALAPGQILLLENTRFYPGEEQNDADLAKEMAALGDIYCNDAFSAAHRAHASTEALARLLPACAGRLMEAELKALEGSLATPERPVTAVVGGAKVSTKLDLLGNLVAKVDTLVIGGGMANTFLAAQGIDVGKSLCEHDMTGTAKDIMARAEAAGCTILLPSDVVVAREFKAGADNETVPADACPADAMILDAGPASVAAISTVFAESKTLIWNGPLGAFEIAPFDIATNTAAQKAAELTKAGQLISVAGGGDTVAALNQAGAAEAFSYISTAGGAFLEWMEGKVLPGVAALQT

SEQ ID NO: 56926 - DNA, 1242 bp, Methanococcoides burtonii DSM 6242
  CDS (1)..(1242)
atgaataccttgactgctaaagattttctcacgatagacgattttgatataggggatagaacaattcttgtgagggtggacctgaactctccaatgagtcctggcggtggcatacttgatgatatgaggatcaaaagccatataccgacccttatggacctggaggatgcgaaggtagtgctgttagctcaccagagccgaccaggaaagaacgatttcactactatgcaactacatgctgatgtgatgtccagttcactgggtcggaaagttacctatatcgatgatatttttggtacccatgcaagagatagcatcgcttcaatggaaaagggggatgttatccttctggagaatgtgcgtttctattctgaagaaagcttgagaagacctgttgatgaacatcaggggactcatatggtgcgaaaacttgctccgcttttcgatattttcctgaacgatgcatttgcggtgtcccatcgttcccatctttcgatcacagggttttctggagttcttccgtctggagcaggtcgtcttatggagagggaaataacttctcttgatgtgagccttaaaggatctgaatctccatgcatatttgttcttggcggtgcgaaggtcgatgattctctcaaggtggctgagcatgtcctttcaagtggcggtgctgacagggttctggttacaggagtggtcgcaaatgtcgtgcttgctgcatcaggtgttgatattggtggacctaatatgaagttcatcgaatcccagggatatcttgaccagatagataaggcgaaaaatatcctggagagattcgatggtaagctcggttttccaagggatgttgctcttaatgataatggagaacgtatcgaggcaaacatcgatgatgtggcttcgtcaaatcttccaattaatgatatcggtcttgagaccattgtagcgtattcaagcgagattgaaaatgcgaagacggttgttttaaatggtcctgcgggcgtttctgagatagagggctttgagataggcacctctgagatcatcaaggcagcaacaaatgccggttattcaattgctggcggtggccacattactgctgaagtgcgtaatatgggttatgagaagatgttctcacacataagcacaggtggcggggcatgtattgattatcttgccggggacctcttgcctggcattgaagctttaaaggttgctgcaaaaagatatagggaatttgaatga

SEQ ID NO: 56927 - protein, 413 aa, Methanococcoides burtonii DSM 6242
MNTLTAKDFLTIDDFDIGDRTILVRVDLNSPMSPGGGILDDMRIKSHIPTLMDLEDAKVVLLAHQSRPGKNDFTTMQLHADVMSSSLGRKVTYIDDIFGTHARDSIASMEKGDVILLENVRFYSEESLRRPVDEHQGTHMVRKLAPLFDIFLNDAFAVSHRSHLSITGFSGVLPSGAGRLMEREITSLDVSLKGSESPCIFVLGGAKVDDSLKVAEHVLSSGGADRVLVTGVVANVVLAASGVDIGGPNMKFIESQGYLDQIDKAKNILERFDGKLGFPRDVALNDNGERIEANIDDVASSNLPINDIGLETIVAYSSEIENAKTVVLNGPAGVSEIEGFEIGTSEIIKAATNAGYSIAGGGHITAEVRNMGYEKMFSHISTGGGACIDYLAGDLLPGIEALKVAAKRYREFE

SEQ ID NO: 56928 - DNA, 1203 bp, Chloroflexus aurantiacus
  CDS (1)..(1203)
atgaacaagaagaccatccgtgatgtggattgggccggaaaacgtgcgctggtacgagttgatttcaacgtgccactcgatgatcagggtcagattaccgatgatacccggattcgggcggcattaccgaccattcgctatctgctggaacacggtgccagtgtggtcttgatgtcgcacctggggcgtccgaagggtaaacccaatccgaagtacagtttacgtccggttgttgagcgtttgtttgaattgctgcccgaagcgaaagaggtcaagaagaccgaggcgatcaccgggccggcggctgaagcggctgtggcgatgctgaaaccagggcaggtcctggtactcgaaaacacccgcttcgatccccgtgaagagccaaacgatccagcgatggccgctgaactggcgaaattgggtgatgttttcgttaacgatgccttcggcaccgctcaccgggccaatgccagcactgagggtgtagcgcactacctgccggcagttgccggttttcttatggaaaaggaactgacgtacatcggtggcgccctgaataatccgcagcgtccattcgtaaccgtcatcggtggtgcgaaaatcagtgacaagatcggcgtgatcgaaaatctgctgggtaaggtcgatgcactgctcattggtggtggtatggccaacacctttctgcttgccaaagggctgaatgttggtgattcgctggtcgaaccggacagtgtaccggtggcccagcagttgatggcccgtgctgaagagcggggtgcccggctgcttttgccggttgacgtggtgattgccgatgcgtttagtgccgatgcccagcgccaggttgttgatgtaagtgacattcctgccggctggcgtgtgctcgatattggccccaagaccatcgaacgatacagtgccgagattcgggctgcccgcacggttatctggaatgggccaatgggtgtctttgaactagagccgtttgccgtcggtacacgcgctatcgcccaggcaatggccgaagcggctgccaatggcgcaatcacaattgttggtggtggcgatagtgtggccgcagtggaacaggccggcctggccgataagatgtcgcatgtgagtaccggcggtggtgcctcacttgagttacttgagggacgagtcttacccggtgtggctgcgttgcaagatgcagagtag

SEQ ID NO: 56929 - protein, 400 aa, Chloroflexus aurantiacus
MNKKTIRDVDWAGKRALVRVDFNVPLDDQGQITDDTRIRAALPTIRYLLEHGASVVLMSHLGRPKGKPNPKYSLRPVVERLFELLPEAKEVKKTEAITGPAAEAAVAMLKPGQVLVLENTRFDPREEPNDPAMAAELAKLGDVFVNDAFGTAHRANASTEGVAHYLPAVAGFLMEKELTYIGGALNNPQRPFVTVIGGAKISDKIGVIENLLGKVDALLIGGGMANTFLLAKGLNVGDSLVEPDSVPVAQQLMARAEERGARLLLPVDVVIADAFSADAQRQVVDVSDIPAGWRVLDIGPKTIERYSAEIRAARTVIWNGPMGVFELEPFAVGTRAIAQAMAEAAANGAITIVGGGDSVAAVEQAGLADKMSHVSTGGGASLELLEGRVLPGVAALQDAE

SEQ ID NO: 56930 - DNA, 1194 bp, Polaromonas sp. JS666
  CDS (1)..(1194)
atgaatttcatccgtttttccgacctgtgtgccagcggcaaggccgccggccagcgcgttttcatccgtgccgacctgaacgtgccgcaggatgacagcggcgccatcaccgaagacacgcgcatacgtgcctccattccctgcctgcaaatggcgctggacgcgggtgcggccgtgatggtgacctcccacctcgggcgtccggtggagggcgaattcaagccggccgactcgctggccccggtggccaaacgcctgggcgagctgatgaagcgcgagattccgctggtcacccagtgggtggacggcgtggacgtccagcccgggcagctggtgttgctggagaactgccgcctcaaccccggcgagaagaaaaacagcgaagcgctggcccgcaagatggccgccctgtgcgacatctttgtgcacgacgcgtttggcaccgcccaccgcgccgaggcctcgacctatggcattgcgcaatacgccaaggtagcgagcgccgggccgctgctggccgccgagatggacgcgatttcgacggcgctgtccaacccgcgcaggccgctggtcgcgatcgtcgcgggcagcaaggtctcgaccaagctgaccatcctcaagtccctggccagcaatgtggaccagctgatcgtgggcggcggcatcgccaacaccttcatgctggcggccggcctgaagattggcaaaagcctggcggaggccgacctgctgcccgaggcccgtgccgtgatcgaggccatgaaggcacgcggcgctgcggtgcccatccccaccgacgtggtcacggccaagaccttcgcggccgatgccacggccaccgtcaaggccgccaccgacgtggaagacgacgacctgatcctggacatcggccccgagaccacggcccggttggcggcgcagctcaaggcggctggcaccattgtctggaatggcccggtgggcgtgttcgagtttgatgctttttcgcgcggtaccgaaggcattgcccgggcgatcgccgacagcagcgccttttcgattgccggtggtggcgacacgctggctgccatcgccaaatacggcatcgagaaacaggtgggctacatctccacggggggcggcgcattcctggaggtgctggaaggcaagacgctgccagccttcgaaatcctgcagaagcgggccgccggctag

SEQ ID NO: 56931 - protein, 397 aa, Polaromonas sp. JS666
MNFIRFSDLCASGKAAGQRVFIRADLNVPQDDSGAITEDTRIRASIPCLQMALDAGAAVMVTSHLGRPVEGEFKPADSLAPVAKRLGELMKREIPLVTQWVDGVDVQPGQLVLLENCRLNPGEKKNSEALARKMAALCDIFVHDAFGTAHRAEASTYGIAQYAKVASAGPLLAAEMDAISTALSNPRRPLVAIVAGSKVSTKLTILKSLASNVDQLIVGGGIANTFMLAAGLKIGKSLAEADLLPEARAVIEAMKARGAAVPIPTDVVTAKTFAADATATVKAATDVEDDDLILDIGPETTARLAAQLKAAGTIVWNGPVGVFEFDAFSRGTEGIARAIADSSAFSIAGGGDTLAAIAKYGIEKQVGYISTGGGAFLEVLEGKTLPAFEILQKRAAG

SEQ ID NO: 56932 - DNA, 1530 bp, Trypanosoma brucei
  CDS (1)..(1530): transl_table=4
atgtccactgcaccgaatgcgaagaacaacataagcctgaagaagtctgtgggcgatgtttggccgttaaccggaaaacgagtgcttatgcgtgtcgatttcaacgttcctatgcaaaatggccatattactaacgattatcgaatccgtgcggcgattccaacgatacgacgggttattgatcagggtggtatttgtattctcctgagccatcttggacggcccagaggcgtttcaatggttgcgggtgtgcgagatataagacggcgatatcacgaggctcagtttcacgacaacaaaggtaaaacagcgttttttagtgttctaccgggagaggagaaagttaaaatattagcgaaatccagtgcacgggaagaggcaacgcacatatcacctgaggtgaaatctggaaaaacaatgctgtttgcgcgccttcctgaggacgagaagaaatctttgctcatgcagtacttaaacgaaaacaaagacagtgcgttaccgcagatgagtgttagtgcaggctacgaagagcaatacagatctcgtccagttgctgtaaggcttgccgaattactcggccaacatgtatattttgctcacgactgcttggatgccagagtagaggtttcgcggttaaagcgtggaaatgttatgttacttgaaaatgtacggttctacagcgaagaaaacggtgaaaatgctgaggaacgtgaagccatggccaagatccttgcgtcatatggtgatgtttacatcagtgatgcttttggtgcagctcaccgtgacagtgctaccatgaccggaattccaaagattttgggtcacggtgctgccggttatttgatggagaaggagatttcatacttcgctaaggtacttggtaacccgccgcgtccgctggttgctatcgttggtggagcgaaagtgagcgaaaagatccaacttctggataacatgttgcagcgcatcgattatctcttaattggtggtgcaatggcatacacatttctgaaggctcagggttacagcattggaatatcgaagtgcgaggaaagtaaacttgaatttgctcgatccctgctgaagaaggcggaggaccgcaaggtgcaggttattcttccaattgatcatgtttgccacacggaattcaaagctgtggattctccattgataactgaggatcaaaacatccctgaagggcatatggctctggatattggtcccaagactattgaaaaatatgttcagacgattgggaagtgtaagagcgccatttggaacggtcccatgggtgtatttgaaatggttccttattccaaaggtacatttgcaattgcgaaagccatgggtcgaggaactcagaaacgtggactcatgagtatcatcggtggtggcgagagtgcgggtgcggctgaactctgtggtgaagctgcacgtatttctcatgtttcaactggtggtggtgcgtctttggaactcctcgagggcaaaacgcttcccggtgttgcagtattggatgataaggagtaa

SEQ ID NO: 56933 - protein, 509 aa, Trypanosoma brucei
MSTAPNAKNNISLKKSVGDVWPLTGKRVLMRVDFNVPMQNGHITNDYRIRAAIPTIRRVIDQGGICILLSHLGRPRGVSMVAGVRDIRRRYHEAQFHDNKGKTAFFSVLPGEEKVKILAKSSAREEATHISPEVKSGKTMLFARLPEDEKKSLLMQYLNENKDSALPQMSVSAGYEEQYRSRPVAVRLAELLGQHVYFAHDCLDARVEVSRLKRGNVMLLENVRFYSEENGENAEEREAMAKILASYGDVYISDAFGAAHRDSATMTGIPKILGHGAAGYLMEKEISYFAKVLGNPPRPLVAIVGGAKVSEKIQLLDNMLQRIDYLLIGGAMAYTFLKAQGYSIGISKCEESKLEFARSLLKKAEDRKVQVILPIDHVCHTEFKAVDSPLITEDQNIPEGHMALDIGPKTIEKYVQTIGKCKSAIWNGPMGVFEMVPYSKGTFAIAKAMGRGTQKRGLMSIIGGGESAGAAELCGEAARISHVSTGGGASLELLEGKTLPGVAVLDDKE

SEQ ID NO: 56934 - DNA, 1263 bp, Trypanosoma brucei; identical to SEQ ID NO: 10528
  CDS (1)..(1263): transl_table=4

SEQ ID NO: 56935 - protein, 420 aa, Trypanosoma brucei; identical to SEQ ID NO: 10529

SEQ ID NO: 56936 - DNA, 1254 bp, Pongo pygmaeus
  CDS (1)..(1254)
atgtcgctttctaacaagctgacgctggacaagctggacgttaaagggaagcgggtcgttatgagagtcgacttcaatgttcctatgaagaacaaccagataacaaacaaccagaggattaaggctgctgtcccaagcatcaaattctgcttggacaatggagccaagtcagtagtccttatgagccacctaggccggcctgatggtgtccctatgcctgacaagtactccttagagccagttgctgtagaactcaaatctctgctgggcaaggatgttctgttcttgaaggactgtgtaggcccagaagtggagaaagcctgtgccaacccagctgctgggtctgtcatcctgctggagaacctccgctttcatgtggaggaagaagggaagggaaaagatgtttctgggaacaaggttaaagccgagccagccaaaatagaagctttccgagcttcactttccaagctaggggatgtctacgtcaatgatgcttttggcactgctcacagagcccacagctccatggtaggagtcaatctgccacagaaggctggtgggtttttgatgaagaaggagctgaactactttgcaaaggccttggagagcccagagcgacccttcctggccatcctgggcggagctaaagttgcagacaagatccagctcatcaataatatgctggacaaagtcaatgagatgattattggtggtggaatggcttttaccttccttaaggtgctcaacaacatggagattggcacttctctgtttgatgaagagggagccaagattgtcaaagacctaatgtccaaagctgagaagaatggtgtgaagattaccttgcctgttgactttgtcactgctgacaagtttgatgagaatgccaagactggccaagccactgtggcttctggcatacctgctggctggatgggcttggactgtggtcctgaaagcagcaagaagtatgctgaggctgtcactcgggctaagcagattgtgtggaatggtcctgtgggggtatttgaatgggaagcttttgcccagggaaccaaagctctcatggatgaggtggtgaaagccacttctaggggctgcatcaccatcataggtggtggagacactgccacttgctgtgccaaatggaacacggaggataaagtcagccatgtgagcactgggggtggtgccagtttggagctcctggaaggtaaagtccttcctggggtggatgctctcagcaatatttag

SEQ ID NO: 56937 - protein, 417 aa, Pongo pygmaeus
MSLSNKLTLDKLDVKGKRVVMRVDFNVPMKNNQITNNQRIKAAVPSIKFCLDNGAKSVVLMSHLGRPDGVPMPDKYSLEPVAVELKSLLGKDVLFLKDCVGPEVEKACANPAAGSVILLENLRFHVEEEGKGKDVSGNKVKAEPAKIEAFRASLSKLGDVYVNDAFGTAHRAHSSMVGVNLPQKAGGFLMKKELNYFAKALESPERPFLAILGGAKVADKIQLINNMLDKVNEMIIGGGMAFTFLKVLNNMEIGTSLFDEEGAKIVKDLMSKAEKNGVKITLPVDFVTADKFDENAKTGQATVASGIPAGWMGLDCGPESSKKYAEAVTRAKQIVWNGPVGVFEWEAFAQGTKALMDEVVKATSRGCITIIGGGDTATCCAKWNTEDKVSHVSTGGGASLELLEGKVLPGVDALSNI

SEQ ID NO: 56938 - DNA, 1173 bp, Thermus thermophilus HB8
  CDS (1)..(1173): transl_table=11
atgcggacccttttggacctggaccccaagggcaagcgggtcctggtgcgggtggactacaacgtccccgtccaagacgggaaggtccaggacgagacccggatcctggaaagcctccccaccctccgccacctcctcgccgggggggcttccctcgtcctcctctcccacctgggccgccccaagggcccggaccccaagtactccctggccccggtgggggaggccttgagggcccacctcccagaggcccgcttcgcccccttccctccgggctcggaggaggcgaggcgggaggcggaggccctgaggcccggggaggtcctcctcctggagaacgtccgctttgagccgggagaggagaagaacgaccccgagctttccgcccgctacgccaggctcggggaggccttcgtcctggacgccttcgggagcgcccaccgggcccacgccagcgtggtgggggtggcgaggctcctccccgcctacgccggcttcctcatggagaaggaggtgagggccctttcccgcctcctcaaggacccggaaaggccctacgccgtggtgctgggcggggccaaggtctcggacaagatcggggtcattgagagcctccttccccgcatagaccgcctcctcattggcggggccatggccttcaccttcctcaaggccctagggggagaggtggggaggagcctggtggaggaggaccggctggacctggccaaggacctcttggggcgggccgaggccttgggggtcagggtctacctccccgaagacgtggtggcggcggagcgcatagaggcgggggtggagacccgggtcttcccggcccgggccatccccgtcccctacatgggcctggacatcggccccaagacccgggaggccttcgcccgggccctggaaggggcgaggacggtcttctggaacgggcccatgggggtctttgaggtgcctccctttgacgaggggaccttggccgtggggcaggccatcgccgccctcgagggcgccttcaccgtggtgggcgggggcgactcggtggcggcggtgaaccgcctgggccttaaagagcgcttcggccacgtctccaccgggggcggggcgagcctggagttcctggaaaagggcaccctgcccggcctcgaggtcctggaaggctaa

SEQ ID NO: 56939 - protein, 390 aa, Thermus thermophilus HB8; identical to SEQ ID NO: 10507

SEQ ID NO: 56940 - DNA, 1203 bp, Haloarcula marismortui ATCC 43049
  CDS (1)..(1203): transl_table=11
atgactttccagacgctcgatgacctcgacgacggacagcgcgttctcgtccgactcgacctcaactcaccggtggaggacggcacggtacaggacaatcgacggttcgaccgccacgcggagacggtcagcgaactcgtcgaccgtgggttcgaggtcgcggtgctggcccatcagggccgcccgggccgcgacgacttcgtctcgcttgcgcaacacgccgagatcctcgccgaccatatcgaccacgacgtggacttcgtcgacgagacctacgggccacaggcgattcacgacatcgctgacctcgacggcggcgacgtactcgtgcttgagaacacgcggatgtgcgacgatgaactgcccgaggaagaccccgaagtcaaatcacagacagagttcgtccagacgttgaaagacgagttcgacgcatacatcaacgacgcctactctgcggcccaccgctcacacgcctcactcgtcggcttcccgctggtgatggacgcctacgctggccgcgtgatggaaaccgagtacgaggccaacaccgccatcgccgagaaggagttcgacgggcaggtgacgatggtcgtcggcggaacgaaggcaacggacgttatcgacgtgatgacccacctcgatgagaaggtcgacgacttcctgcttggcggtatcgccggggagctgttcctgcgggccgctggctacccggtcggctacgacatcgacgacgcgaacctctacgacgagcagtgggaggaaaacagcgagaaaatcgagtccatgctcgaagaccaccgcgaccagatcacgctcgcggtcgatctggcctacgaagacgacggtgaccgcgccgagcaggccgtcgacgacatcgaggaaaaaagcgtctcctacctcgacgttgggagcgagaccgtcatggagtattcgccggtcatccgcgactccgaggccgtcttcgtgaagggcgcgctggggatgttcgaagacgagcggttctcggtcggcactgccggcgtcctcgaagccattgccgacaccgactgcttctccgtcgtgggcggcggcgacacttcgcgagctatcgagatgtacgggatggaagaagacgagttcggccacgtctctatcgcgggcggggcctacatccgggcactgaccggcgcggaactggtcggcgtcgaagtgctgcagcgttaa

SEQ ID NO: 56941 - protein, 400 aa, Haloarcula marismortui ATCC 43049
MTFQTLDDLDDGQRVLVRLDLNSPVEDGTVQDNRRFDRHAETVSELVDRGFEVAVLAHQGRPGRDDFVSLAQHAEILADHIDHDVDFVDETYGPQAIHDIADLDGGDVLVLENTRMCDDELPEEDPEVKSQTEFVQTLKDEFDAYINDAYSAAHRSHASLVGFPLVMDAYAGRVMETEYEANTAIAEKEFDGQVTMVVGGTKATDVIDVMTHLDEKVDDFLLGGIAGELFLRAAGYPVGYDIDDANLYDEQWEENSEKIESMLEDHRDQITLAVDLAYEDDGDRAEQAVDDIEEKSVSYLDVGSETVMEYSPVIRDSEAVFVKGALGMFEDERFSVGTAGVLEAIADTDCFSVVGGGDTSRAIEMYGMEEDEFGHVSIAGGAYIRALTGAELVGVEVLQR

SEQ ID NO: 56942 - DNA, 1185 bp, Bacillus clausii
  CDS (1)..(1185)
atgaacaaaaaaacgctttatgactacgattttgcaggcaaaacggtattttgccgagtcgatttcaatgttccgatgaaagatggaaagattactgatgaaacgcggattcaagcagctttgcctacgattaaatacttaagtgaacaaggggcgcgcgttttgctagcaagccatcttggccgcccgaaaggcgaagtggtagaaagcttgcgcttggcgcctgtcgcgacacgccttagcgagctgttaggaaaagaagtacaagccgtccaggaagcgcacggtccagtagcaaaacaagcagtggaaggtcttgaagacggtggcgtgttgctgcttgaaaatgtccgcttttacccaggggaagaaaagaacgatcctgaattagcgaaagcgtttgctagcctagccgacatttttgtcaatgatgcatttggggcggcacaccgtgcccacgcttcaacggaaggcattgcccactatttgccgtcagcagctggttttctaatggaaaaagaactggatgtactcggcaaagcgttaagcaaccctgaacgtccgtttacagcagtcattggtggcgcaaaagtaaaagacaagattggcgttattgacaacttgctagataaagtcgacaatttaattattggcggcggtctcgcatacacgtttgtcaaagcgcaaggctatgaagttggcaaatcgttgcttgaagaagataagctcgatttagccaagcagtttatggaaaaggctgaacaaaaaggcgttaagttttatatgcctgaagatgtcattgttgccgatgatttttctgacgacgccaacaaaaaagaagtggccattagcggcattccagctgattgggaagcgcttgacattgggccaaaaacacgaaaaacctatgaagctgtattaaaagcttcaaaattagtgatttggaacgggccaatgggtgtgtttgagctcgaatcgtttgcaggtggcacaaaagcagttgcaaatgcgttggcagaggcgtcagatacgtattcagtcattggtggcggcgattcagcggcagccgttgaacaatttggccttgccgacaaaatgagccatatttcaacaggcggaggcgccagccttgaatttatggaaggcaaggaacttccaggcgttgtcgcactatcagaaaaataa

SEQ ID NO: 56943 - protein, 394 aa, Bacillus clausii
MNKKTLYDYDFAGKTVFCRVDFNVPMKDGKITDETRIQAALPTIKYLSEQGARVLLASHLGRPKGEVVESLRLAPVATRLSELLGKEVQAVQEAHGPVAKQAVEGLEDGGVLLLENVRFYPGEEKNDPELAKAFASLADIFVNDAFGAAHRAHASTEGIAHYLPSAAGFLMEKELDVLGKALSNPERPFTAVIGGAKVKDKIGVIDNLLDKVDNLIIGGGLAYTFVKAQGYEVGKSLLEEDKLDLAKQFMEKAEQKGVKFYMPEDVIVADDFSDDANKKEVAISGIPADWEALDIGPKTRKTYEAVLKASKLVIWNGPMGVFELESFAGGTKAVANALAEASDTYSVIGGGDSAAAVEQFGLADKMSHISTGGGASLEFMEGKELPGVVALSEK

SEQ ID NO: 56944 - DNA, 1248 bp, Toxoptera citricida
  CDS (1)..(1248)
atggcactaaacaaactaagcatcaagagtttagaagtggcaaacaaacgagttttgatcagagttgattttaatgttccattaaaagatggaaaaataaccaataaccaacgtattgttgctgcattagatagcatcaattatgtccttgaaaatggtgccaaatctttagttctcatgtcccatcttggacgtccagatggattaccaaattcaaagtactctatgaaaccagttgcagaggaactccaaaaactccttaataagaatgttacatttttgtctgactgtgttggcccagaagtagaaaatgcttgtgcagatcctgctcctggttcaatatttcttctggagaatcttcgattccatattgaagaagaaggaaaaggtgtaaatgctgctggggaaaaagctaaggctgacaaagaagatgtgaaaaaattcagagagtcattacaaaaattgggagatgtgtatgttaacgatgcttttggtactgcacacagagcccacagttctatgatgggtgaagggtttgaaaagcgtgctgccggcattttgttgaacaaagagctcacttattttgctaaagctttggataatcctgaaaggcctttcttagctatcttaggaggagctaaagttgctgataagattcaacttattgaaaatcttttagataaagttgatgaaatgattattggaggaggtatggcttacactttcttgaaagagtcaaaggggatgaaaattggcgattccttatatgatgaagctggagccaaaattgttggcaaattattagataaagctaatgctcgcaatgttaaaattcatttgccagttgattttgtcactgctgataaatttgatgaaaatgctaataccagttctgcaactgttgaagaaggtattcctgagggttggatgggtttggattgcggaccagaatctaggaaattgttttctgaacctattgctcgtgctaaggtcattgtatggaatgggcctgctggagtttttgagtttgataaatttgcttttggaactaaagcattaatggatgatgttgtacaggccactaaaaatggaactgtcactataattggaggtggtgatactgcaacttgtgctgctaaatgggggactgaaagtcaaataagccatgtgagcactggaggtggtgcaagtcttgaactacttgaaggaaaagtcttaccaggagttgcagctttgactgatgcataa

SEQ ID NO: 56945 - protein, 415 aa, Toxoptera citricida
MALNKLSIKSLEVANKRVLIRVDFNVPLKDGKITNNQRIVAALDSINYVLENGAKSLVLMSHLGRPDGLPNSKYSMKPVAEELQKLLNKNVTFLSDCVGPEVENACADPAPGSIFLLENLRFHIEEEGKGVNAAGEKAKADKEDVKKFRESLQKLGDVYVNDAFGTAHRAHSSMMGEGFEKRAAGILLNKELTYFAKALDNPERPFLAILGGAKVADKIQLIENLLDKVDEMIIGGGMAYTFLKESKGMKIGDSLYDEAGAKIVGKLLDKANARNVKIHLPVDFVTADKFDENANTSSATVEEGIPEGWMGLDCGPESRKLFSEPIARAKVIVWNGPAGVFEFDKFAFGTKALMDDVVQATKNGTVTIIGGGDTATCAAKWGTESQISHVSTGGGASLELLEGKVLPGVAALTDA

SEQ ID NO: 56946 - DNA, 1215 bp, uncultured archaeon GZfos1D1
  CDS (1)..(1215)
atgaacgataaattaaaggagttcttgacgatagatgattttgatctatacggaaaaacagtgctcttccgggcggacataaactcggtgattatagacgggcaagtgcagatgaaggagcggatagtggagaatgcgaagacgatacagaagcttttggataaaaaagcaaaggtggttatcctcgcgcatcaaggtcgtgcagggcaagcggattttctacatctggagcagcatgcgcaattgctcaggaatttcatggatttgaaatacattgacgatataatgggcccgagtgcgagggcggcgataaagggtcttgatcatggagaagttttgttgctcgataacgtgcggatgctagcagaggagacacttaacaaaacaccggaggagcattcgcactccttttttgtgaagagtcttgcacctcttgccgatatctacataaatgatgccttctccgtggctcaccgatcgcacgcatcagtgcttggcttcccggcggttctggatgcgggaatagggcgattgatggagcgggagttgaaaactctggaaagagcggtatataaaataaaaagtccgtgtgtttatatccttggtggtgtaaaacccgaggaagtgtttgatataatagatgtcacattgaaacgtaaaagagtagatactatactcacaacaggagctcttggcactcttttcctatatgctcgaggtataattgagccaggggaagaacaaaaagtggatacgcattttatgtggaatgtggagcaagccaaaagattcctggagatgggtaaggacataataaagtatcccgaagatgttgccgtggcggtagatggcgagagaagagaaatacccgtggcacagttgaagcctaaccaaccagcatatgatataggagagaagacgagtgaggaatattcagaacaaataaaaaatgcgagaacggtgataatgaaagggccggcagggttatatgaaaataaggcatttgcaaagggcacgcgcgatatttttgaagcgatttcgcattccaaagcatattctcttctcggtggtggccatacatcagcagcaataagtgaagtgggaatagataggaagactatgtctaatgcccacgtcagccttgcgggtggtgcattcctgcgatattttgtcgataagcatctacccgggatagaagtgttaaagaaacattaa

SEQ ID NO: 56947 - protein, 404 aa, uncultured archaeon GZfos1D1
MNDKLKEFLTIDDFDLYGKTVLFRADINSVIIDGQVQMKERIVENAKTIQKLLDKKAKVVILAHQGRAGQADFLHLEQHAQLLRNFMDLKYIDDIMGPSARAAIKGLDHGEVLLLDNVRMLAEETLNKTPEEHSHSFFVKSLAPLADIYINDAFSVAHRSHASVLGFPAVLDAGIGRLMERELKTLERAVYKIKSPCVYILGGVKPEEVFDIIDVTLKRKRVDTILTTGALGTLFLYARGIIEPGEEQKVDTHFMWNVEQAKRFLEMGKDIIKYPEDVAVAVDGERREIPVAQLKPNQPAYDIGEKTSEEYSEQIKNARTVIMKGPAGLYENKAFAKGTRDIFEAISHSKAYSLLGGGHTSAAISEVGIDRKTMSNAHVSLAGGAFLRYFVDKHLPGIEVLKKH

SEQ ID NO: 56948 - DNA, 1245 bp, Euglena gracilis
  CDS (1)..(1245)
atgcctggaagcgctttgggcccaaagttgagcattgatgatttggacatcaaggataaaaatgtcctcgttcgagtggatttcaacgtcccaatgaaagatggcaaaatcttggacgatttccgtatgaggtcggctttgccgaccttggagaaggttatcaattccggtgggaaacttatcattatgagccacatgggtcgcccagcggagaccggctatgaagccaagtattccttgaagccaatcgcagatcatctgggcacccttttgggcaaacctgtgaccttcgctgctgattgcatggatgccgctgcagaggttgccaagttgacacctggcgacgtccttgttttggagaacttgcgtttctaccctcatgagggaagcaaggacaaggaccaacgccttgaaatggcgaaaaagttggcatcctatgctgatttgtacgtcagtgacgcatttggcactgcacatcgggatgctgcatccatgactggtgttcctgaggtgatgggacagggtgcctctggctatttgatgaagaaggagattgactacttttcaaaggctctgaaggagcctgaaaagccagttgttgctatcgttggtggtgcaaaggtgtctgacaagattcaacttctggagaacatgctgaagactgtcaatcaaatggtcattggtggcgccatggcatacacctttttgaaggctcaaggcaagagcactgggaaatccaagtgtgagacagaagcggagacgaagaaagggaagattgatattgtggagttggcagggaagcttctttcaaaggcaaaggagcagggggttgagatctaccttcctgtggaccaccgctgctctgctgaattcaaggatgttgagcctgtcatcacgtccgatgagaacattcctgatgatttgatggcacttgatattgggccaaagactgaagaactgtactgcagcgttgactttgccaaggcaaagacggccatctggaatgggccgatgggagtgtttgagcttgagcatttcaagccaggaacttgggcggtcgcaagaccactggcggaccactctgactcatgctgctccatcgtgggcggaggggactccgagcgccgcgagaagtcgggatatgcccccaagctgtcccacatctccactggtggcggggcctccctggagctcctggagggcaaggtgctgcctgggctggccatcttgaccgacaagccttga

SEQ ID NO: 56949 - protein, 414 aa, Euglena gracilis
MPGSALGPKLSIDDLDIKDKNVLVRVDFNVPMKDGKILDDFRMRSALPTLEKVINSGGKLIIMSHMGRPAETGYEAKYSLKPIADHLGTLLGKPVTFAADCMDAAAEVAKLTPGDVLVLENLRFYPHEGSKDKDQRLEMAKKLASYADLYVSDAFGTAHRDAASMTGVPEVMGQGASGYLMKKEIDYFSKALKEPEKPVVAIVGGAKVSDKIQLLENMLKTVNQMVIGGAMAYTFLKAQGKSTGKSKCETEAETKKGKIDIVELAGKLLSKAKEQGVEIYLPVDHRCSAEFKDVEPVITSDENIPDDLMALDIGPKTEELYCSVDFAKAKTAIWNGPMGVFELEHFKPGTWAVARPLADHSDSCCSIVGGGDSERREKSGYAPKLSHISTGGGASLELLEGKVLPGLAILTDKP

SEQ ID NO: 56950 - DNA, 1254 bp, Xenopus laevis
  CDS (1)..(1254)
atgtctctgtccaacaagctgaccctggataaggtggatgtgaaagggaagcgggtagtcatgagggttgacttcaatgtcccaatgaaaaataataagattacaaacaaccaaaggattaaggctgctgttcccagcatccagcactgcttggacaatggtgctaaatctgtggttcttatgagccacttgggcagaccagatggtgtccctatgcctgacaagtactctctggcaccagctgctgaggaactcaaagctctgatgaagagagagattgtcttcctgaaggactgtgtgggcccagaggtggaagctgcatgtgctgacccagcccctggaacagtgttgcttctggagaaccttcgcttccatgtggaggaagaagggaagggtaaagacgcttctgggaacaagatcaaagcagatgctgccaaagtagatacatttagagcatctctttctaaacttggcgatgtttacatcaatgatgcatttggaactgcacacagagctcacagctccatggttggcgtaaagctgccccagagggctgctggctttttaatgaagaaggagcttgattactttgctaaggctttggagaaccccgagagacctttccttgctatccttggaggtgctaaagtaaaagacaaaatccagctaatctctaacatgctggataaagtgaatgagatgattattggtggagggatggcctttacattcctaaaggttctcaacaatatgtccattggaacctctctatatgatgaagagggagcaaccattgttaaggacttgatggccaaggctgagaagaatggagtgaaaattacacttcctgtagactttaccaccgctgagaagtttgatgaaaatgccagtacaggacaagccagtgtctctgctggaattcctgatggatggatgggacttgactgtggcccagagagtgtgaagctatttgtggaagctgtgggcagagccaagcagattgtgtggaacggtcccgttggggtgtttgagtgggacaattttgccaaaggaaccaaagctgttatggataaagtggtagaggtcactggcaaaggctgcattacaatcattggtggaggagacactgctacctgctgtgcaaagtgggatacggaggacaaagttagtcacgtcagtacaggaggaggagccagtctagagctgttagaaggaaaggtcctacctggagttgatgctttgagcaatgtgtaa

SEQ ID NO: 56951 - protein, 417 aa, Xenopus laevis
MSLSNKLTLDKVDVKGKRVVMRVDFNVPMKNNKITNNQRIKAAVPSIQHCLDNGAKSVVLMSHLGRPDGVPMPDKYSLAPAAEELKALMKREIVFLKDCVGPEVEAACADPAPGTVLLLENLRFHVEEEGKGKDASGNKIKADAAKVDTFRASLSKLGDVYINDAFGTAHRAHSSMVGVKLPQRAAGFLMKKELDYFAKALENPERPFLAILGGAKVKDKIQLISNMLDKVNEMIIGGGMAFTFLKVLNNMSIGTSLYDEEGATIVKDLMAKAEKNGVKITLPVDFTTAEKFDENASTGQASVSAGIPDGWMGLDCGPESVKLFVEAVGRAKQIVWNGPVGVFEWDNFAKGTKAVMDKVVEVTGKGCITIIGGGDTATCCAKWDTEDKVSHVSTGGGASLELLEGKVLPGVDALSNV

SEQ ID NO: 56952 - DNA, 1254 bp, Brachydanio rerio
  CDS (1)..(1254)
atgtctctttcgaacaaacttcatttggacaaggtggacgtgaaaggaaagcgggtgatcatgagggtggacttcaatgtccctatgaagaacaatgtgatcacaaataaccagagaatcaaggctgcagtaccatctatccagcactgtttagataattgtgccaaagctgtggtcctgatgagccacttgggccggcctgatggagtccctatgccagacaaatactctctggagcctgtggctgcagaactcaagaacctgctgggaaaagacgttcagttcctgaaagactgtgtgggtccagatgtggagaaagcctgtgcagaccctcctgcaggatctgtcattctgctggagaatctgcgctttcatgtggctgaggagggcaagggcaaagatgcatcgggtaacaagaccaaagcaagtcaggcagagatcgatgctttccgagcctccctgtccaaactgggtgacgtatacgtcaacgatgctttcggaactgcacatagagctcacagctctatggttggagtgaatctccctcagaaggctgctggttttctgatgaagaaagagctagactactttgccatggcccttgagaaaccacagaggcctttcttggccatcctcggaggggccaaggtcaaagataagattcagctgatcaacaacatgttggacaaggtgaatgagatgatcattggtggaggaatggcctttaccttcctcaaggttctcaagaacatggagatcggcacttccctgtttgatgaagagggttccacaattgtgaaagatctcatggccaaagcagaaaagaatggtgtaaagatcacacttccagtcgactttatcactgcagacaaattcgatgagaaggcgacaacagggaccgcaacggtagcagaaggtattcctgctggctggatgggtctagactgtggtcctgagagctcaaagctctatgcagaggctgtggccagagccaagcagattgtgtggaacggacccgttggcgtgttcgagtgggacaactttgctcatggaaccaagaacatgatggacaaagttgtagaagcgaccaaaaatggctgcatcaccattatcggtgggggagacacagctacctgctgtgccaagtgggacactgaggacaaggtcagccatgtgagcacagggggcggagccagtctggagctgctggagggtaaagtgctgcccggtgtcgatgccctcagtaacgtataa

SEQ ID NO: 56953 - protein, 417 aa, Brachydanio rerio; identical to SEQ ID NO: 10817

SEQ ID NO: 56954 - DNA, 1254 bp, Sus scrofa
  CDS (1)..(1254)
atgtctctttctaagaagttaactttggacaaactggacgtgaaagggaaacgagtcatcatgagagtagacttcaatgttcccatgaagaggaaccaagttacaaacaaccaaagaatcaaggcttccctcccaagcatcagatactgcctagataacggagccaggtcagtagttctcatgagtcatttaggtagacctgatggtgttgcgatgcctgataaatactccttagagccggtggctgctgaactcaaatccttgctggggaaagacgttctgttcctaaaagactgtgtgggctcagaagcagagcaagcttgtgccaacccacctgcgggttcagtcatcctactggagaaccttcgctttcatgtggaagaggaagggaagggccaagatccttctgggaataagctgaaagctgagccagataaagtagaagccttccgcgcatcgctctccaagctgggggatgtgtatgtcaatgatgcttttggcacggctcaccgggctcacagttccatggtgggagtgaatctgccgcagaaggcatctggattcctgatgaaaaaggagctggattactttgccaaagccttggaaaacccagagagaccctttctggctatccttggtggagctaaagtggcagacaagatccaactcatcaaaaatatgctggacaaagtcaatgagatgattattggtggcggaatggcctttaccttccttaaggtactcaacaacatggagattggtgcctccctgttcgacaaagagggagccacgattgtcaaagagatcatggccaaagctgaaaagaatagggtgaacattacctttcctgttgactttgtcattgctgacaagtttgaggaaaatgctaaggttggccaggccacggtagcgtcaggtatacctgccggctgggtggctttggactgtggtcctgagaccaacaagaagaatgcacaagttgtggcccgagccaagctaattgtgtggaatggacctttaggggtctttgaatgggatgcctttgctaatggaacgaaagccctcatggatgaaattgtgaaagccacctccaagggctgtatcactattataggaggtggagacacggccacttgctgtgccaaatggaacactgaagataaagtcagtcatgtgagcactggaggaggtgccagtctagagcttctggaaggtaaagtccttcctggagtggaggctctcagcaatctgtag

SEQ ID NO: 56955 - protein, 417 aa, Sus scrofa
MSLSKKLTLDKLDVKGKRVIMRVDFNVPMKRNQVTNNQRIKASLPSIRYCLDNGARSVVLMSHLGRPDGVAMPDKYSLEPVAAELKSLLGKDVLFLKDCVGSEAEQACANPPAGSVILLENLRFHVEEEGKGQDPSGNKLKAEPDKVEAFRASLSKLGDVYVNDAFGTAHRAHSSMVGVNLPQKASGFLMKKELDYFAKALENPERPFLAILGGAKVADKIQLIKNMLDKVNEMIIGGGMAFTFLKVLNNMEIGASLFDKEGATIVKEIMAKAEKNRVNITFPVDFVIADKFEENAKVGQATVASGIPAGWVALDCGPETNKKNAQVVARAKLIVWNGPLGVFEWDAFANGTKALMDEIVKATSKGCITIIGGGDTATCCAKWNTEDKVSHVSTGGGASLELLEGKVLPGVEALSNL

SEQ ID NO: 56956 - DNA, 1221 bp, uncultured bacterium 106; identical to SEQ ID NO: 10560
  CDS (1)..(1221): transl_table=11

SEQ ID NO: 56957 - protein, 406 aa, uncultured bacterium 106; identical to SEQ ID NO: 10561

SEQ ID NO: 56958 - DNA, 1188 bp, Fritschea bemisiae; identical to SEQ ID NO: 10570
  CDS (1)..(1188): transl_table=11

SEQ ID NO: 56959 - protein, 395 aa, Fritschea bemisiae; identical to SEQ ID NO: 10571

SEQ ID NO: 56960 - DNA, 1461 bp, Chlorarachnion sp
  CDS (1)..(1461)
atgctcgtcaaggcactctctgtgtctgccgttgctctctccatggttctttgctaccaggcagtatccatggcaaatcagcaagttgctgtcgagcctctcgttggaggtgggttctccatggcaggtgtccgccctgtttcccgcatggctgttgctcctatgcactccgtttctcctatgaacgttggccgcttctccaagccttctgttaccaagttctctgcagtctcccgccctcagcagcttaaggttaacgttgaaaagaagatgtctgttggtgacttgaagaaggaagagctcgacggaaaggttgctctcgttcgttgcgacctcaacgttcctcttgacggaaagaccatcactgatgacacccgtatccgcgcttccatcccaaccatcaagcacctggttgagagcggcgctaaggttctccttacctcccaccttggacgtcctaaagacggacctgaggataagttctccctcgctcctgtcgctgctcgtctttccgagctcctcggacaggacgtgaccttcgtcaaggactgcattggagagcctgtcaaggaggctgttgccaccatgacacctggatccgtcgctctcctcgagaacgttcgtttctacaaggaagagaccaagaacgaaccagagttcgctaagaagctcgctgctaacgctgacctcttcgtgaacgatgctttcggaaccgctcaccgtgctcacggatccaccgagggagtaccgctcacctcaagccttccgtcgctggattccttcttcagaaggagctcgactaccttcaggcgctgtgcagaacctgctcgtcctttcgctgctatcgttggtggatccaaggtttcctccaagatcggtgttatcgagtccctcctcgagaaggttgacaagctcgtcatcggaggcggtatggttttcaccttcctcaaggctcgcggcctcgaagtaggaagctccctcgtcgaggaggacaagctcgagctcgctaaggaccttgagcgcatcgcaaaggagaagggcgttgaactcatcctccctaccgacgttgtcctcgctgatgcattcgccaaggatgctaacacccaggtcgctgatgctaccgcaatccctgagggatggatgggacttgaccaggggcctaaggctaccgaggagatcattgctgctctcaaggactgcaagactgttatctggaacggacctatgggtgtcttcgaattcgaggcgttctccaagggaaccttcggagttgctgacgctctcgctgatctcaccaagggaggcgcaaccaccatcatcggcggaggagactccgttgctgctgtagagcaggctggccttgctgaccagatgtcccacatctctaccggaggtggagcttccctcgagctcctcgaaggaaaggtccttcctggagttgctgcccttaacgcagcttaa

SEQ ID NO: 56961 - protein, 486 aa, Chlorarachnion sp; identical to SEQ ID NO: 10573

SEQ ID NO: 56962 - DNA, 1263 bp, Schistosoma japonicum
  CDS (1)..(1263)
atgggtttgtcgaagcttagtatctccgatgtagatttaaaggataaacttggcttactcctaatgctttgtagggttgattttaacgtccctatgaaagatggaaaagtcactaatacccaacggattgcagctgctataccaactattaaatatgccttggataagggagctaaaagcgtagtcctgatgtctcacttaggtagacctgatgggtataaagttgaaaaatattcgctgaaacccgtttgctctgaagtttccaagttgttaggcaaagaagttactttccttagtgactgtgttggtcctgatgtcattagtgcgtgttctaatcctgctcctggcagcgtcttcttacttgagaatttacgctttcatatagaagagaaaggaaaaggtgtctcaccatctgaagataaaacaaaggccactgctgatcaaatcaaagctttcagtgaaagtttaacaaaacttggggatgtttatgtcaatgatgccttcggaacagcacatcgtgctcatgcctctatggtcggctgccaattgccacaaaaagcttgtggatttctcatgaataaagagttgacatatttcgctaaagctctggaaaatcctgaacgtcctttcttagctattttgggcggcgctaaggttagcgataagatccagttgatcaataatatgctggacaaggttaacgaattgatcattgggggcggcatggcgtatactttccttaagcaaatacacaatatgcatataggagctagtttatttgacgcaccaggtgcagaaattgttcagaaggtaatggaaactgcaaaggctaaacacgtggcaattcacttacctgttgattttgtaactgctgataaatttgctgaagatgctaacaccggaacagcaactatagaatctggaattccagatggttggatggggctggatattggtccgaaaaccatagaggaattccgtaaagtgataagtcgtgccaaaacaatagtttggaatggtccgatgggtgtttttgaaatggataagtttgctgcagggacaaaagcagcaatggatgcggtagttgaagctactaaaaacggtgctacaactattattggtggcggtgatacagcgacttgttgtgccaagtggaacacagaagataaagtcagtcatgtcagtaccggtggtggtgctagccttgaacttttagaaggtaaacaactgccaggagtcgttgcacttacggatgctcactaa

SEQ ID NO: 56963 - protein, 420 aa, Schistosoma japonicum; identical to SEQ ID NO: 10575

SEQ ID NO: 56964 - DNA, 1254 bp, Xenopus laevis
  CDS (1)..(1254)
atgtctctgtccaacaagctgaccctggataaggttgatgtgaaagggaaaagggtagtcatgagggttgacttcaatgtcccaatgaaaaacaatcagattacaaacaaccaaaggattaaggctgctgttcccagcatccagcactgtttagaccatggtgctaaatctgtggttcttatgagccacttgggcagaccagatggggtccctatgcctgacaagtactctctggccccagtggctgaggaactcaaatctctgatgaagagagagattgtcttcttgaaagactgtgtgggtccagaagtggaagctgcatgttctgacccagccactggaacagttttacttctggagaaccttcgcttccatgtggaggaagaagggaagggtaaagatgctgctgggaacaagatcaaagcagatgctgccaatgtagattcatttagagcatcactttctaaactaggagatgtttacatcaatgatgcttttggaactgcacacagagctcacagctccatggttggtgtaaagctgccccagagggctgctggctttttaatgaagaaggagcttgattactttgctaaggctttggagaaccctgagagacctttccttgctatccttggaggtgctaaagtaaaggacaaaatccagctaattagtaacatgctggatcaagtgaatgagatgattattggtggtgggatggcctttacattcctgaaggttctcaacaatatgtccattggaacctccctatatgatgaagagggagcaaacattgttaaggacttgatggccaaggcagagaagaatggagtcaaaattacacttcctgtagactttactactgctaacaagtttgatgaaaatgccagtacagggcaagccagcgtctctactggaattcctgatggatggatgggacttgactgtggcccagagagtgtgaagctgttcgtggaagctgtgggcagagccaaacagattgtgtggaatggtccagttggggtgtttgaatgggacaattttgctaaaggaaccaaagccgtaatggacaaagtggtagaggtcactggcaaaggttgcattacaatcattggtggaggagacactgctacctgctgtgctaaatgggataccgaggacaaagttagccatgtcagtacaggaggaggagccagtctagagctgctagaaggaaaggtcctaccaggagttgatgccctgagcaatgtgtaa

SEQ ID NO: 56965 - protein, 417 aa, Xenopus laevis
MSLSNKLTLDKVDVKGKRVVMRVDFNVPMKNNQITNNQRIKAAVPSIQHCLDHGAKSVVLMSHLGRPDGVPMPDKYSLAPVAEELKSLMKREIVFLKDCVGPEVEAACSDPATGTVLLLENLRFHVEEEGKGKDAAGNKIKADAANVDSFRASLSKLGDVYINDAFGTAHRAHSSMVGVKLPQRAAGFLMKKELDYFAKALENPERPFLAILGGAKVKDKIQLISNMLDQVNEMIIGGGMAFTFLKVLNNMSIGTSLYDEEGANIVKDLMAKAEKNGVKITLPVDFTTANKFDENASTGQASVSTGIPDGWMGLDCGPESVKLFVEAVGRAKQIVWNGPVGVFEWDNFAKGTKAVMDKVVEVTGKGCITIIGGGDTATCCAKWDTEDKVSHVSTGGGASLELLEGKVLPGVDALSNV

SEQ ID NO: 56966 - DNA, 1257 bp, Chondrus crispus
  CDS (1)..(1257)
atgtctttctccaagctctgtatcgacgctctcgatctcgctggcaagcgcgtcttcatccgtgtcgacttcaacgtccccttcgacaaggagaccggcaagaccatcaccaacacccagcgtatcgacgccgccctccccaccatcaaatacgctctggaaaagggcgccaagtccgtcgtcctcgcttcgcatctcggacgcccgtccggccgtgttaaccccaagttctcgctcaagcccgtggcagacgtcgtctcggagaagatcggcaagacggtcaccttcctcgaagatgccgtcggctccgctactgaggaggcttgcaaggaccccgagaccggatccgtcttcttgctcgagaatttgcgcttccacatcgaggaggagggcaagggcgttgatgctgatggcaacaagatcaaggctgatgctgctaaggtgacggagtttcggaagagtctcagcactttggctgatgtttacgttaacgacgcctttggcactgctcaccgcgctcactcgtccatggtcggcgtggatctcccacaaaaggcctctggctttctcatgaagaaggagcttgagtattttggaaaggccctgcaggaaccccaacgcccgtttcttagcattttaggaggatccaaggtgtccgataagatccaactcattgagaacttacttgataaggtcgatgagatgatcattggaggaggtatggcattcacattcaagaaagccgtcgagggaatggccattggacagtcgcttttcgacgaagccggtgcaaagatcgcgcaggaaattgtggacaaagctaaggcgaagaatgtcaagcttcatttccccgtcgacttcacgattgctgacaagtttgccccagtggctaacacaagagttgcgacggactcagagggcattccggatgaatggatgggtctcgatgcaggtccgaagagccaagaggcaatgcgcgaggtcgtgttgcgggcgaagacagtcgtgtggaacggtcctgtcggcgtgtttgagtttgaagcgtttgcaaaaggaacaaaggccgtggtcgatgctgtcgtggaagctacttcatctggagctgtgacgatcattggtggaggtgacacggccactgcagtaaaagagatgggtgcagcggattctgtgtctcacgtttccacgggcggtggtgcgagcctcgaactgctcgaaggaaagactctacccggcgtggccgcattgacagacgcatga

SEQ ID NO: 56967 - protein, 418 aa, Chondrus crispus; identical to SEQ ID NO: 10581

SEQ ID NO: 56968 - DNA, 1371 bp, Chondrus crispus
  CDS (1)..(1371)
atggtcaccggcttcgtaccctgcgccgctcccctgcgcgccaccacccgccagacggccgccgtgtccgttgtctcccgctctgccagcaccttcgttgccccctcgcgccgcgtcacggcccctgccgcccccgtccccaccgtccgcatgaccactgccgccgccaccaccaagaagtccattaaggacctcagccccgcggacatcgccggcaaacgcgtccttgtccgctgcgatctcaacgtcccgctcgatggcaagaccatcaccgacgacacacgcatccgcgcatctgtccccaccatcaagttcctcatggaagccggcgcaaaggtcctcctctcctcccatctcggccgccccaaggatggtccggaggataagttctccctcagccccgtcgccgcccgccttacccaactgctgggcaaggacgttaccatggctccagattgcattggtgacggagtcacaaaaatcgtgtccggcatggctaacggtgatgtcactcttctcgagaacgttcgcttctacaaggaggagacgaagaacgaccctgactttgctaagaaacttgctgctaacgctgattttttcgtcaacgatgcttttggtaccgcccatcgcgcccatggctcgaccgccggtgttacggcgcatcttaagccctctgttgccggcttacttctggagaaggagcttgcatacctcgcaggcactgtgtcggaccccgcgcgcccgtttgctgcaattgttggtggttccaaggtatcttccaagattggcgttatcgactcgcttctccagaaggttgacaagctcatcattggaggcggtatggtcttcaccttcctcaaagcaaagggcctcaacgttggttcttcccttgttgaggatgataagctcgagcttgcgagggagcttgtcaaaacggccgaagccaagggtgtctccatcatccttcccactgacgtcgtcctcgctgacaagttcgccgctgatgccaacactcaggtgacctctgttgactctatccccgatggatggatgggtctggaccaaggagaagacagcacaaagctcattcagaatgagcttaaggagtgcaagaccgtaatctggaacgggccgatgggtgtgtttgagatggagaagttcgcgaagggtacgttcgccattgctgacacattagccgatctcactgaatccggctgcattaccatcatcggtggtggtgactctgtcgcagctgtcgagaaggctggtctggctgagaagatgtcccatatctctactggtggtggtgcctcgctcgagcttttggaaggaaaggtgcttcctggcgtggctgctttggatgacaattag

SEQ ID NO: 56969 - protein, 456 aa, Chondrus crispus; identical to SEQ ID NO: 10583

SEQ ID NO: 56970 - DNA, 1245 bp, Phytophthora infestans
  CDS (1)..(1245)
atggccaagctcagcatcaagaacgtggacgtcaagggcaagcgcgtgctcatccgcgtggatttcaacgttcctttcgcacaggacggctccatctccaacacgcagcgcatcgacgccgcgctgcccactgtgcagtacgtgctggaccagggtgctaaggctgtggtgctcatgtcccatttgggccgccccgagggcaagcccaaggccaaggactcgctggcccctgtggctgtggctgtggaacagaagctcggtcgtaaggtgacgttcctgaaggactgtgttggccccgaggttgaggctgcctgcgccaacccgactgagggcagcattattctgcttgagaaccttcgttttcacgtcgaagaggagggtaagggcaaggatgccgagggcaacaagaccaaggcgtcgtctgaggctgtggcagctttccgcgcctcgctgagcaagcttggcgacgtgtacgtcaacgacgcgttcggtacggcccaccgcgctcacagctccatggtgggcgtggatctccctattaaggccgctggctttctgctggacaaggagctagtgtacttcgccaaggctctggacgcccctcagcgccccttcgtgtcgattctgggtggtgccaaggttgctgacaagatccagctcatcatgaatatgctggacaaggtggacgagatggtcatcggtggcggcatggcctacacgttcaagaaggtgatcaacaacatggagatcggtggatcgctgtacgacgaggaaggcgccaagatcgtgcctcagatcgtggagaaggccaaggccaagggcgtgacgcttcacctgcctgtggacttcgtcatcgccgacaagttcgccgcggatgctgctacgaagatctcgacggaagaggagggcatccctgctggctggatgggtctggacgtcggccccaagtcgcaggaagcgttcagcgccgctgtggcgaaggccaagaccgtcgtctggaacggacccatgggcgtgttcgagttcgatgcttttgctgacggcacgaaagttgtcatggacgctgtggtcaaggccaccgagtcgggcgccactacgatcattggcggcggcgacacggccacgtgctgcgtcaagttcaacacggaggacaaggtctctcatgtgagcacgggcggcggtgccagtctggagcttctggagggcaagattctgcctggtgtggacgccctgtcctcggcgtga

SEQ ID NO: 56971 - protein, 414 aa, Phytophthora infestans; identical to SEQ ID NO: 10585

SEQ ID NO: 56972 - DNA, 1197 bp, Streptococcus agalactiae; identical to SEQ ID NO: 10590
  CDS (1)..(1197): transl_table=11

SEQ ID NO: 56973 - protein, 398 aa, Streptococcus agalactiae; identical to SEQ ID NO: 10591

SEQ ID NO: 56974 - DNA, 1347 bp, Drosophila melanogaster
  CDS (1)..(1347)
atgcttccaattcggcagagtttataccaaagagctcaaactcgatttacaaaattaagatttccaagattttttagcaaagacgattgcaatggaaagcaagtaaagaagttgagcttaaaaaatgtagatgtggctgggaaaagggtttttatgagagtggactttaatgtacccatgaaagatggcaaaataaccaacaaccaacgaattgtttccgcacttcccagtattaaatatgccttggacaagaaatgtaagtccttggttttggcatcccacttggggcgtccggatggcaaaaagaacaaaaagtttagcctggaacccgtggccaaggagctggagagtgtgctgggccagccggttcaattcctggacgactgcgtgggtgatagcaccctgaaagctttgaaggatccctccgacggcactgtgttcctgttggagaatcttcgtttctatgccgaggagacgggcagcagcaaggacgataacaagaagaaggtcaaagcagatcccgcgaaggtgaaggaattccgagccaagttggcgcagctgggcgagatctatgtgaacgatgcctttggaacagcacatcgtccgcatagttccatgatgggcgatggctacaaggtgcgagcggctggtttcctgctggacaaggaactggagtactttgccaaggttctccacgatccggccaagccctttttggccattctgggtggcgccaagatagccgataaaattccactgataacgaacctcctgaacaatgtaacggccatgatcatatccggtggcatggccttcacctttctcaaagtgctcaatggcatggagattggaaagtccctcttcgacgagaagggatccgagttggtcaacgacatagtctgcaaggcgaaggagaaggacgtgaatatactatttccgattgactttgtcatagccaataagatcgacaaggagccggataaagtggaacatgtggatgccacacagggcataccggaggacatgatgggtctggaccacggccaggcatccagtcagatgtttgctggcgctatttgtgcatccaaaaccatcgtctggaacggaccgccaggcttgttcgaaaacgagctattctccaaaggcaccgagtccatgctggaggcagtaatcggggccactaaccgaggagccaccacaatcgttggtggtggggatacggccaccgcttgcttgaagttcggaggcgccgacaaggtctcgcatgtgtccaccggtggaggagcttccctggagttgctggagggtaaggttctgcctggagtggctgccctttcggatgcctaa

SEQ ID NO: 56975 - protein, 448 aa, Drosophila melanogaster
MLPIRQSLYQRAQTRFTKLRFPRFFSKDDCNGKQVKKLSLKNVDVAGKRVFMRVDFNVPMKDGKITNNQRIVSALPSIKYALDKKCKSLVLASHLGRPDGKKNKKFSLEPVAKELESVLGQPVQFLDDCVGDSTLKALKDPSDGTVFLLENLRFYAEETGSSKDDNKKKVKADPAKVKEFRAKLAQLGEIYVNDAFGTAHRPHSSMMGDGYKVRAAGFLLDKELEYFAKVLHDPAKPFLAILGGAKIADKIPLITNLLNNVTAMIISGGMAFTFLKVLNGMEIGKSLFDEKGSELVNDIVCKAKEKDVNILFPIDFVIANKIDKEPDKVEHVDATQGIPEDMMGLDHGQASSQMFAGAICASKTIVWNGPPGLFENELFSKGTESMLEAVIGATNRGATTIVGGGDTATACLKFGGADKVSHVSTGGGASLELLEGKVLPGVAALSDA

SEQ ID NO: 56976 - DNA, 1248 bp, Aedes aegypti
  CDS (1)..(1248)
atggctctcaataaactcagcatcgagaatgttgatttgaagggcaaacgagtttttatgcgtgtggatttcaatgtccctatcaaagagggaaagatcaccagcaaccagcgtatcgtagctgccctggacagtattaaatatgccttggaaaagggtgccaagtccgttgtccttgcctcccaccttggacgtccggacggcaacaagaatgccaaatacaccctagccccggtggccgaggagatgacgaagctgttgggtcgtgatgtgaccttcctgaacgactgtatcggtgctgaggttgaagccgcatgcaaagaccctgcacccggttcgatcattttgttggagaatgtccgattctacgttgaagaggagggcaagggcgttgacgcctccggcaataaggttaaggctgataaggacaaggtcaaggccttccgcgaaagtcttgctaaattgggagatttgtatgtcaacgatgctttcggaactgctcatcgtgcgcatagttccatgatgggtgagggatacgcccagcgtgctgctggtttgttgttgaacaaggaattgcgttacttctcgcaagctctggataacccgccacgaccattccttgccattctgggtggagctaaggttgctgacaaaatccagctcattgaaaatctcctcgacaaggtgaacgaaatgatcattggaggtggaatggcatttacgttccttaaggtattgaacaatatgcaaattggaggatcattgttcgacgaggagggttcaaagaccgttcagaagctggtggacaaagccaaggccaacaacgtgcaactgcatttaccagtggatttcgtaactggcgataaatttgccgaagatgctgccgttggagctgctaccgtcgagagcggaattcccgctggacacatgggtctcgacgttggaccgaagtctcgtgaggcattcgctgctccgattgcccgctccaagatcattgtttggaacggtccacccggcgtttttgagttccccaatttcgccaacggaacgaaagctcttatggatgccgttgtcgctgcaacaaaggcaggcactgtatctattattggcggtggagataccgcttcgtgtcgcgccaagtggggaacagaatctcaggtatcacacgtttctactggtggtggagcgtctttggaactgttggaaggcaaggttctacctggtgtcgacgccttgagcagcgcttaa

SEQ ID NO: 56977 - protein, 415 aa, Aedes aegypti; identical to SEQ ID NO: 10595

SEQ ID NO: 56978 - DNA, 1248 bp, Aedes aegypti
  CDS (1)..(1248)
atggctctcaataaactcagcatcgagaatgttgatttgaagggcaaacgagtttttatgcgtgtggatttcaatgtccctatcaaagagggaaagatcactagcaaccagcgtatcgtagctgccctggacagtattaaatatgccttggaaaagggtgccaagtccgttgtccttgcctcccaccttggacgtccggacggcaacaagaatgccaaatacaccctagccccggtggccgaggagatgaagaagctgttgggtcgtgatgtgaccttccttaacgactgtatcggtgctgaggttgaagccgcatgcaaagaccctgcaccgggttcgatcattttgttggagaatgtccgattctacgttgaagaggagggcaagggcgttgacgcctccggcaataaggttaaggctgataaggacaaggtcaaggctttccgcgaaagtcttgccaaattgggagatgtgtatgtcaacgatgctttcggaactgctcatcgtgcgcatagttccatgatgggtgagggatacgcccagcgtgctgctggtttgttgttgaacaaggaattgcgttacttctcgcaagctctggataacccgccacgaccattccttgccattctgggtgcagctaaggttgctgacaaaatccagctcattgaaaatctcctggacaaggtgaacgaagtgatcattggaggtggaatggcatttacgttccttaaggtattgaacaatatggaaattggaggatcattgttcgacgaggagggttcaaagatcgttcagaagctggtagacaaagccaaggccaacaacgtgcaactgcatttaccagtggatttcgtaactggtgataaatttgccgaagatgctgccgttggagctgctaccgtcgagagcggaattcccgctggacacatgggtctcgacgttggacccaagtctcgtgaagcattcgctgctccgattgcccgctccaagatcattgtttggaacggtccacccggcgtttttgagttccccaatttcgccaacggaacgaaagctcttatggatgccgttgtcgctgcaacaaaggcaggcactgtatctattattggcggtggagataccgcttcgtgttgcgccaagtggggaacagaatctcaggtatcacacgtttctactggtggtggagcgtctttggaactgttggaaggcaaggttctacctggtgtcgacgccttgagcagcgcttaa

SEQ ID NO: 56979 - protein, 415 aa, Aedes aegypti; identical to SEQ ID NO: 10597

SEQ ID NO: 56980 - DNA, 1248 bp, Aedes aegypti
  CDS (1)..(1248)
atggctctcaataaactcagcatcgagaatgttgatttgaagggcaaacgagtttttatgcgtgtggatttcaatgtccctatcaaagagggaaagatcactagcaaccagcgtatcgtagctgccctggacagtattaaatatgccttggaaaagggtgccaagtccgttgtccttgcctcccaccttggacgtccggacggcaacaagaatgccaaatacaccctagccccggtggccgaggagatgaagaagctgttgggtcgtgatgtgaccttccttaacgactgtatcggtgctgaggttgaagccgcatgcaaagaccctgcaccgggttcgatcattttgttggagaatgtccgattctacgttgaagaggagggcaagggcgttgacgcctccggcaataaggttaaggctgataaggacaaggtcaaggctttccgcgaaagtcttgccaaattgggagatgtgtatgtcaacgatgctttcggaactgctcatcgtgcgcatagttccatgatgggtgagggatacgcccagcgtgctgctggtttgttgttgaacaaggaattgcgttacttctcgcaagctctggataacccgccacgaccattccttgccattctgggtggagctaaggttgctgacaaaatccagctcattgaaaatctcctggacaaggtgaacgaaatgatcattggaggtggaatggcatttacgttccttaaggtattgaacaatatggaaattggaggatcattgttcgacgaggagggttcaaagatcgttcagaagctggtagacaaagccaaggccaacaacgtgcaactgcatttaccagtggatttcgtaactggtgataaatttgccgaagatgctgccgttggagctgctaccgtcgagagcggaattcccgctggacacatgggtctcgacgttggacccaagtctcgtgaagcattcgctgctccgattgcccgctccaagatcattgtttggaacggtccacccggcgtttttgagttccccaatttcgccaacggaacgaaagctcttatggatgccgttgtcgctgcaacaaaggcaggcactgtatctattattggcggtggagataccgcttcgtgttgcgccaagtggggaacagaatctcaggtatcacacgtttctactggtggtggagcgtctttggaactgttggaaggcaaggttctacctggtgtcgacgccttgagcagcgcttaa

SEQ ID NO: 56981 - protein, 415 aa, Aedes aegypti
MALNKLSIENVDLKGKRVFMRVDFNVPIKEGKITSNQRIVAALDSIKYALEKGAKSVVLASHLGRPDGNKNAKYTLAPVAEEMKKLLGRDVTFLNDCIGAEVEAACKDPAPGSIILLENVRFYVEEEGKGVDASGNKVKADKDKVKAFRESLAKLGDVYVNDAFGTAHRAHSSMMGEGYAQRAAGLLLNKELRYFSQALDNPPRPFLAILGGAKVADKIQLIENLLDKVNEMIIGGGMAFTFLKVLNNMEIGGSLFDEEGSKIVQKLVDKAKANNVQLHLPVDFVTGDKFAEDAAVGAATVESGIPAGHMGLDVGPKSREAFAAPIARSKIIVWNGPPGVFEFPNFANGTKALMDAVVAATKAGTVSIIGGGDTASCCAKWGTESQVSHVSTGGGASLELLEGKVLPGVDALSSA

SEQ ID NO: 56982 - DNA, 1248 bp, Aedes aegypti; identical to SEQ ID NO: 10598
  CDS (1)..(1248)

SEQ ID NO: 56983 - protein, 415 aa, Aedes aegypti; identical to SEQ ID NO: 10599

SEQ ID NO: 56984 - DNA, 1215 bp, Mycoplasma capricolum subsp; identical to SEQ ID NO: 10600
  CDS (1)..(1215): transl_table=4

SEQ ID NO: 56985 - protein, 404 aa, Mycoplasma capricolum subsp; identical to SEQ ID NO: 10601

SEQ ID NO: 56986 - DNA, 1248 bp, Aedes aegypti
  CDS (1)..(1248)
atggctctcaataaactcagcatcgagaatgtcgatttgaagggcaaacgagtttttatgcgtgtggatttcaatgtccctatcaaagagggaaagatcaccagcaaccagcgtatcgtagctgccctggacagtattaaatatgccttggaaaagggtgccaagtccgttgtccttgcctcccaccttggacgtccggacggcaacaagaatgccaaatacaccctagccccggtggccgaggagatgaagaagctgttgggtcgtgatgtgaccttcctgaacgactgtatcggtgctgaggttgaagccgcatgcaaagaccctgcacccggttcgatcattttgttggagaatgtccgattctacgttgaagaggagggcaagggcgttgacgcctccggcaataaggttaaggctgataaggacaaggtcaaggccttccgcgaaagtcttgctaaattgggagatttgtatgtcaacgatgctttcggaactgctcatcgtgcgcatagttccatgatgggtgagggatacgcccagcgtgctgctggtttgttgttgaacaaggaattgcgttacttctcgcaagctctggataacccgccacgaccattccttgccattctgggtggagctaaggttgctgacaaaatccagctcattgaaaatctcctcgacaaggtgaacgaaatgatcattggaggtggaatggcatttacgttccttaaggtattgaacaatatggaaattggaggatcattgttcgacgaggagggttcaaagatcgttcagaagctggtagacaaagccaaggccaacaacgtgcaactgcatttaccagtggatttcgtaactggcgataaatttgccgaagatgctgccgttggagctgctaccgtcgagagcggaattcccgctggacacatgggtctcgacgttggaccgaagtctcgtgaagcattcgctgctccgattgcccgctccaagatcattgtttggaacggtccacccggcgtttttgagttccccaatttcgccaacggaacgaaagctcttatggatgccgttgtcgctgcaacaaaggcaggcactgtatctattattggcggtggagataccgcttcgtgttgcgccaagtggggaacagaatctcaggtatcacacgtttctactggtggtggagcgtctttggaactgttggaaggcaaggttctacctggtgtcgacgccttgagcagcgcttaa

SEQ ID NO: 56987 - protein, 415 aa, Aedes aegypti
MALNKLSIENVDLKGKRVFMRVDFNVPIKEGKITSNQRIVAALDSIKYALEKGAKSVVLASHLGRPDGNKNAKYTLAPVAEEMKKLLGRDVTFLNDCIGAEVEAACKDPAPGSIILLENVRFYVEEEGKGVDASGNKVKADKDKVKAFRESLAKLGDLYVNDAFGTAHRAHSSMMGEGYAQRAAGLLLNKELRYFSQALDNPPRPFLAILGGAKVADKIQLIENLLDKVNEMIIGGGMAFTFLKVLNNMEIGGSLFDEEGSKIVQKLVDKAKANNVQLHLPVDFVTGDKFAEDAAVGAATVESGIPAGHMGLDVGPKSREAFAAPIARSKIIVWNGPPGVFEFPNFANGTKALMDAVVAATKAGTVSIIGGGDTASCCAKWGTESQVSHVSTGGGASLELLEGKVLPGVDALSSA

SEQ ID NO: 56988 - DNA, 1248 bp, Aedes aegypti
  CDS (1)..(1248)
atggctctcaataaactcagcatcgagaatgttgatttgaagggcaaacgagtttttatgcgtgtggatttcaatgtccctatcaaagagggaaagatcactagcaaccagcgtatcgtagctgccctggacagtattaaatatgccttggaaaagggtgccaagtccgttgtccttgcctcccaccttggacgtccggacggcaacaagaatgccaaatacaccctagccccggtggccgaggagatgaagaagctgttgggtcgtgatgtgaccttccttaacgactgtatcggtgctgaggttgaagccgcatgcaaagaccctgcaccgggttcgatcattttgttggagaatgtccgattctacgttgaagaggagggcaagggcgttgacgcctccggcaataaggttaaggctgataaggacaaggtcaaggctttccgcgaaagtcttgccaaattgggagatgtgtatgtcaacgatgctttcggaactgctcaccgtgcgcatagttccatgatgggtgagggatacgcccagcgtgctgctggtttgttgttgaacaaggaattgcgttacttctcgcaagctctggataacccgccacgaccattccttgccattctgggtggagctaaggttgctggcaaaatccagctcattgaaaatctcctggacaaggtgaacgaaatgatcattggaggtggaatggcatttacgttccttaaggtattgaacaatatggaaattggaggatcattgttcgacggggagggttcaaagatcgttcagaagctggtagacaaagccaaggccaacaacgtgcaactgcatttaccagtggatttcgtaactggtgataaatttgccgaagatgctgccgttggagctgctaccgtcgagagcggaattcccgctggacacatgggtctcgacgttggacccaagtctcgtgaagcattcgctgctccgattgcccgctccaagatcattgtttggaacggtccacccggcgtttttgagttccccaatttcgccaacggaacgaaagctcttatggatgccgttgtcgctgcaacaaaggcaggcactgtatctattattggcggtggagataccgcttcgtgttgcgccaagtggggaacagaatctcaggtatcacacgtttctactggtggtggagcgtctttggaactgttggaaggcaaggttctacctggtgtcgacgccttgagcagcgcttaa

SEQ ID NO: 56989 - protein, 415 aa, Aedes aegypti
MALNKLSIENVDLKGKRVFMRVDFNVPIKEGKITSNQRIVAALDSIKYALEKGAKSVVLASHLGRPDGNKNAKYTLAPVAEEMKKLLGRDVTFLNDCIGAEVEAACKDPAPGSIILLENVRFYVEEEGKGVDASGNKVKADKDKVKAFRESLAKLGDVYVNDAFGTAHRAHSSMMGEGYAQRAAGLLLNKELRYFSQALDNPPRPFLAILGGAKVAGKIQLIENLLDKVNEMIIGGGMAFTFLKVLNNMEIGGSLFDGEGSKIVQKLVDKAKANNVQLHLPVDFVTGDKFAEDAAVGAATVESGIPAGHMGLDVGPKSREAFAAPIARSKIIVWNGPPGVFEFPNFANGTKALMDAVVAATKAGTVSIIGGGDTASCCAKWGTESQVSHVSTGGGASLELLEGKVLPGVDALSSA

SEQ ID NO: 56990 - DNA, 1440 bp, Leishmania major; identical to SEQ ID NO: 10604
  CDS (1)..(1440)

SEQ ID NO: 56991 - protein, 479 aa, Leishmania major; identical to SEQ ID NO: 10605

SEQ ID NO: 56992 - DNA, 1254 bp, Leishmania major
  CDS (1)..(1254)
atgtctctcgtgctgaagaagagcatcgatgacgccaccgtcagggacaagaaggtgctcatccgcgtggacttcaacgtccccgtgaagaacggtaagatcacgaatgacttccgcattcgctccgcccttccgacgatccaaaaggtgctgaaggagggcggctcctgcatcctgatgagccaccttggtcggccgaagggtgcgagaatgagtgacccaagtccggagaagggtgtgcgcgggtacgaggaggccgccacgctgcgcccggttgctgcacgcatcgcggagctgctggggcagaaggtggagtttgcaccggactgcctggacgctgcggcgtacgcgtcgaagctgaagaacggcgacgtgctgttgctggagaacgtgcgtttctacgcggaggagggcagcaagaaggaggaggagcgcgacgcgatggcgaaggtactggcgtcgtacgcggacctgtatgtcagtgacgcctttggcactgcgcaccgcgacagcgcgacgatgacgggcatccccaaggtgctgggtgcgggctacgccgggtacctgatggagaaggagatcaactacttctcgcgagtgctgaacaacccgccgcggccgctggttgcgattgtcggcggtgcgaaggtcagcgacaagatcgagctgcttgacaacatgctgggccgcatcaactaccttgtgattggtggcgcgatggcgtacacgttccagaaggcgcagggccgcaagatcggcatctcgatgtgcgaggaggataagctggaccttgccaagtcgctgctgaagaaggcgcaagagcgcggtgtgcaggtgtttctgccagttgaccacgtgtgcaacaaggaatttaaggccgcggactcgccgctggtgacggagagcgtggacgtcccggacggctacatggcgctcgacattggcccaaggacgatccacatgtacgaggaagtgattggccgctgcaagagcgcgatctggaacggcccgatgggcgtgttcgagatgccgtgctactcgaagggcacatttgccgttgcgaaggcgatggggactggaacgcagaagaacgggctgctgagcatcatcggcggtggtgacagcgcgagcgctgcggagctgagcggcgaggcgaagaacatgtcgcatgtgtccaccggcggcggtgcgtccctggagctgctggagggcaagacgctgcctggcgtcgccattctgacggacagagaatga

SEQ ID NO: 56993 - protein, 417 aa, Leishmania major
MSLVLKKSIDDATVRDKKVLIRVDFNVPVKNGKITNDFRIRSALPTIQKVLKEGGSCILMSHLGRPKGARMSDPSPEKGVRGYEEAATLRPVAARIAELLGQKVEFAPDCLDAAAYASKLKNGDVLLLENVRFYAEEGSKKEEERDAMAKVLASYADLYVSDAFGTAHRDSATMTGIPKVLGAGYAGYLMEKEINYFSRVLNNPPRPLVAIVGGAKVSDKIELLDNMLGRINYLVIGGAMAYTFQKAQGRKIGISMCEEDKLDLAKSLLKKAQERGVQVFLPVDHVCNKEFKAADSPLVTESVDVPDGYMALDIGPRTIHMYEEVIGRCKSAIWNGPMGVFEMPCYSKGTFAVAKAMGTGTQKNGLLSIIGGGDSASAAELSGEAKNMSHVSTGGGASLELLEGKTLPGVAILTDRE

SEQ ID NO: 56994 - DNA, 1263 bp, Dictyostelium discoideum
  CDS (1)..(1263)
atgtcttcaaataaaattggtaataaattaagtcttgacaaggtagatgtaaaaggtaaaagagttttaattagagttgattataatgtaccattagataaaaataataatattacaagtactcaaagaattgatgcatcaattccaacattagaatattgtttaaagaatggtgctaaatcaattgtattgatgtcacatttaggtcgtccagatggtttggttaaaccagagtatagtttgaaaccagtggttaaagtattggaagatcaattaaaaagaccaattaaattcttatcagattgtgttggtgaacaagttgaaaaagaatgtgcaaatccagaggaaggtaccgttattttattggagaatctccgtttccacattgaagaggaaggttcaggtgttgatgcagagggtaaaaaggtcaaagccaacccagagaaagttaaagaattccgtgaatcactcaccaagctcggtgatgtctatgtgaacgatgcctttggtactgctcatagagcacatagttcaatggttggtattaatctcccacaaaaagccgctggtttcctcatgaaaaaagaattggaatactttgccaaggctttagagtcaccatcaaaaccattcttggcaattcttggcggtgcaaaggttagtgataaaattaaactcattgaaaaccttttgtataaagtcgatgaaatgatcattggtggtggtatggccttcactttcaagaaattcattgataacaaagagattggttcatcattgtttgagaaaacagccgaacaaatcaccaaagatatcattgccaaagccgctaaaaataatgtaaaattacatttcccagtcgattatgtcattgccgataaatttgataatgatgccaacatcaaaaccgtcactcaagatcaaggtatcccagaaggttggatgggtttagattgtggtccagagactatcaaagaaaacagagataccatctcaagagcaaaaaccatcgtttggaatggtcctatgggtgtatttgaaaagagcaatttcgaagccggtacaaaagctgccatggatgatgttgtcaatgccacaaccaatggtgctatcactatcattggtggtggtgataccgccacttgtgctgccaaatacaacactgaagataaagttagtcatgtctcaactggtggtggtgcttcattagaattattagaaggtaaagaattaccaggtgttactgctttatctgatttatga

SEQ ID NO: 56995 - protein, 420 aa, Dictyostelium discoideum; identical to SEQ ID NO: 10607

SEQ ID NO: 56996 - DNA, 1350 bp, Phaeodactylum tricornutum; identical to SEQ ID NO: 10612
  CDS (1)..(1350)

SEQ ID NO: 56997 - protein, 449 aa, Phaeodactylum tricornutum; identical to SEQ ID NO: 10613

SEQ ID NO: 56998 - DNA, 1326 bp, Phaeodactylum tricornutum; identical to SEQ ID NO: 10614
  CDS (1)..(1326)

SEQ ID NO: 56999 - protein, 441 aa, Phaeodactylum tricornutum; identical to SEQ ID NO: 10615

SEQ ID NO: 57000 - DNA, 1263 bp, Trypanosoma brucei; identical to SEQ ID NO: 10618
  CDS (1)..(1263)

SEQ ID NO: 57001 - protein, 420 aa, Trypanosoma brucei; identical to SEQ ID NO: 10619

SEQ ID NO: 57002 - DNA, 1323 bp, Trypanosoma brucei; identical to SEQ ID NO: 10620
  CDS (1)..(1323)

SEQ ID NO: 57003 - protein, 440 aa, Trypanosoma brucei; identical to SEQ ID NO: 10621

SEQ ID NO: 57004 - DNA, 1164 bp, Pseudomonas sp
  CDS (1)..(1164): transl_table=11
atgaccgtgttgaagatgaccgacctcgatctgcaaggtaagcgcgtgctgatccgcgaagacctcaacgtcccagtcaaggacggtgttgtcaccagcgatgcgcgcatccttgcttcgctgccgaccatcaagctggcgttggaaaaaggcgcggcagtcatggtctgctcgcacctgggccgtccgactgaaggcgagttttcagcagaaaacagcctcaagcctgttgctgattacttgagcaaggcgctgggccgtgaagtgccgctggtgagcgactacctcaatggcgtggacgttaaagccggcgacatcgtgctgttcgaaaacgtgcgcttcaacaaaggcgaaaagaaaaacgctgacgaattggccaagcaatacgcggccctgtgcgacgtgtttgtgatggatgcctttggcactgcacaccgcgccgaaggtccgacccacggcgtggccaagttcgccaaagtggcggctgcgggcccgttgctggcggcggaactggacgcactgggcaaagccctgggtgctccggccaagccaatggctgcgattgttgcaggctccaaggtgtcgaccaaacttgacgtactcaacagcctgagccagatctgcgacctgctgatcgttggcggtggcattgccagcacgttcctcgcggcggccggtcatccggtgggcaagtcgctgtacgagcctgatttgctggacaccgcgcgtgccatcgccgccaaggtcaacgtgccgttgcctaccgatgtggtcgtggccaaggaatttgctgaaagcgccgaagccaccgtcaagctgattgctgacgtggcagcagacgacatgattctggatatcggcccacaaacagccgagcacttcgcgcagctgttgaagacctcgaagactatcctgtggaacggacctgtcggcgtgttcgagttcgatcagttcggcaacggtaccaaagtgctggccaaggccatcgccgacagcgctgcattttctattgcaggcggcggcgacacattggcggccatcgacaagtacggtgtggccgatcaaatttcctacatctccaccggtggcggtgcattccttgagttcgttgaaggcaaagtgctgcctgctgtagaagtgctggaaagccgcgccaaagcctga

SEQ ID NO: 57005 - protein, 387 aa, Pseudomonas sp; identical to SEQ ID NO: 10623

SEQ ID NO: 57006 - DNA, 1239 bp, Methanosarcina acetivorans; identical to SEQ ID NO: 10626
  CDS (1)..(1239): transl_table=11

SEQ ID NO: 57007 - protein, 412 aa, Methanosarcina acetivorans; identical to SEQ ID NO: 10627

SEQ ID NO: 57008 - DNA, 1254 bp, Rhizopus niveus
  CDS (1)..(1254)
atgtctttatctaacaagctctctattcgcgacctcaacctcaaggacaaacgtgttcttattcgtgttgattttaatgttcccatgaaagacggtgccattaccaacaacaatcgtatcgttcaagctcttcctaccgtaaaatatgctcttgacaatggtgcctctgctgtcatcttaatgtctcacttgggtcgccctaacggtgaagctgtcgccaaatattctctcaaaccagtggctgctgaggttgaaaagcttttgggaaaacctgtcgaattcctcaacgactgcgtgggccctgatgtcgaaaaggcatgccaatccgccaaggacggtaaggttatccttttagaaaatcttcgtttccatatcgaagaagaaggttctgccaaggttgatggtcaaaaggttaaggctgatgctgaagcaatcaaaaaattccgtgcatctttgactactcttgctgatatatacatcaatgatgcctttggtactgctcaccgtgctcactcttccatggttggtgttgacctttctcaacgtgcagccggtttccttatgcaaaaggagcttgaatactttgcaaaggcactcgaaaatccctctcgcccttttcttgctatccttggtggtgccaaagtttctgataaaattcaattgattgaaaatatgcttgataaggtaaatgctttgattatctgtggtggtatggctttcactttcaaaaagacacttgataatgttaaaattggcaagtctctttttgatgaacctggttctaaattagtacaaaatcttgtaaaaaaagctgctgaaaagaatgtcaagattgtttttcctgttgactttatcactgctgataagtttgctcctgatgccagcacaggctatgccactgatgatgatggtatccctgatggatggcaaggccttgactgcggtgagcgatcaaacaaattattccgtgaggaaattttaaagtcaaagacaattgtctggaacggcccttctggtgtatttgaattcgatgccttctctagcggtaccaaggctgtccttgatgctgttattaatgctacaaaggaaggtgctactactattattattggtggaggtgacactgctactgctgctctcaaatggggtgctgaaggtcaagtctctcatatttctactggtggcggtgcctctcttgaacttcttgagggcaaggagcttcctggtgttactgctctttccagcaagaactaa

SEQ ID NO: 57009 - protein, 417 aa, Rhizopus niveus
MSLSNKLSIRDLNLKDKRVLIRVDFNVPMKDGAITNNNRIVQALPTVKYALDNGASAVILMSHLGRPNGEAVAKYSLKPVAAEVEKLLGKPVEFLNDCVGPDVEKACQSAKDGKVILLENLRFHIEEEGSAKVDGQKVKADAEAIKKFRASLTTLADIYINDAFGTAHRAHSSMVGVDLSQRAAGFLMQKELEYFAKALENPSRPFLAILGGAKVSDKIQLIENMLDKVNALIICGGMAFTFKKTLDNVKIGKSLFDEPGSKLVQNLVKKAAEKNVKIVFPVDFITADKFAPDASTGYATDDDGIPDGWQGLDCGERSNKLFREEILKSKTIVWNGPSGVFEFDAFSSGTKAVLDAVINATKEGATTIIIGGGDTATAALKWGAEGQVSHISTGGGASLELLEGKELPGVTALSSKN

SEQ ID NO: 57010 - DNA, 1263 bp, Trypanosoma congolense; identical to SEQ ID NO: 10628
  CDS (1)..(1263)

SEQ ID NO: 57011 - protein, 420 aa, Trypanosoma congolense; identical to SEQ ID NO: 10629

SEQ ID NO: 57012 - DNA, 1254 bp, Rhizopus niveus; identical to SEQ ID NO: 10632
  CDS (1)..(1254)

SEQ ID NO: 57013 - protein, 417 aa, Rhizopus niveus; identical to SEQ ID NO: 10633

SEQ ID NO: 57014 - DNA, 1518 bp, Crithidia fasciculata
  CDS (1)..(1518)
atgctcctctccacgcaatcgattcccataaaaaagagcgtcgacgacatctggccggtggcaggcaaacgcgttctcattcgggtggacttcaacgtgcccaccagctctggcggcatcgacgacgacttccgcattcgctctgctatccccactattcgccgcatcgttgaccagggtggcatctgcatcctcatcagccacctcggccgccccaccggtgtggactacgacaccgcccatgcagagcaggaaaagcgccagacaccggtgcagctgcccaattcgcgtggcaagaccgccttcttctctgggctgcgtggcgatgcgaaggcgacgatcttggcgtggtcgagtcagcgagagaaggctgcaacgctctccaacccgtacggcagtggcaagacggccgtctttgcgcgcctgccagaggaagagaagcggcgcctgctgctgcgcttcatgagtgagcacaaggaggagctcttcccccagctcggctccgcgggctacgagaaggagttcagcttggagccggtggcggtgaagctggcggagctgctggatcagcacgtgtactttggccacgactgcctcggcgcgcaagcggatattgcaaagctgcggtgtggggaggtgatgctgctggagaaccttcgcttctacacgaacgagaactcatctgacgagcgcaagcgcatgctgatggcgcgtattctcgcctcgtatgccgatgtgtacatcaacgacgccttcggcacggcgcaccgcgacagcgcgagtttgacgggcatcccccgcgtgctgcagcagggtgcggccggctacctgatggagaaggagatctcgtacttctccaaggtgctgaacaacccaccccggccgctcttggcgattatcggcggcgcgaagctcagcgacaagatgcaggtgctggagaacctgctggactgcgtcgacagcctcttcatcggtggtggcttggcgtacacgtttctccggtctcagggctactcgatcggcacgtcccacttcgaggaggcttttgtgcccttcgcccaagcgcttcctctcgctggcagcggacggcaggtgcgggtggtgctgccagaggaccacgtctgccacgcccacacgcggccggccgaagcgccgctcacgacgacgagtgccaatataccggacggctacgcagggctggacattggcccgctcaccatccaatccatcacgcacctcgtgcggcagtgcagcagcgtgatctggaacggaccacttggcatgttcgagatgccatactacgccttcggcacgttttccattgcgcgagtggtgagtcagtcttcggctgcgaagggcactaccagcatcgtcggcggtggcgacacggcgagcgcgatgatgaagtccggcgaggcggctcacatttcgcacatctccacaggcggcaacgcatcgctggagctgctggaggggaaggtgctagccgccgtggcggtgctggacaacaaggagtga

SEQ ID NO: 57015 - protein, 505 aa, Crithidia fasciculata; identical to SEQ ID NO: 10467

SEQ ID NO: 57016 - DNA, 1254 bp, Crithidia fasciculata
  CDS (1)..(1254)
atgtctctcgccccgaagaagacgatcgatgatgccgtggtgaagggcaagaaggtcctcatccgtgtggacttcaacgtgccggtgaagaacggcgagatcacgaacgacttccgcatccgctccgccctgccgacgatccagaaggtgctgaaggagggcggctcctgcatcctgatgagccacctcggccgcccgaagggtgcgaagatgagcgacccgaagccggccaagagcgtgcgcgggtacgaggaggctgcgacgctgcggccggtggctgcgcggctgtcggagctgctggggcagaaggtggagttcgcgccggactgcctggacgctgcgtcgtacgctgctaagctgaagggcggcgacgtgctgctgctggagaacgtgcgcttctacgcggaggagggcagcaagaaggaggaggagcgcgacgcgatggcgaaggtgcttgcggcgtacggcgacgtgtacgtgagcgacgccttcggcactgcgcaccgcgacagcgcggacatgacgggcatcccgaaggtgctgggtgcgggctacgccggctacctgatggagaaggagatcaactacttcgcgcaggtgctgaacaacccgccgcgtccgctggtggccatcgtgggcggtgcgaaggttagcgacaagatccagctgctggacaacatgctgggccgcatcaactacctggtgattggcggcgcgatggcgtacacgttccagaaggcgcagggccacgcgatcggcatctcgatgtgcgaggaggacaagctggaccttgccaagtcgctgctgaagaaggcgcaggagcgcaacgtggaggtgcttctgccggtggaccacgtgtgcaacaaggagttccaaggcgtggacgcgccgctggtgacgaaggacgtggagatcccggaggggtacatggcgctggacattggcccgaagacgatcaagatctacgaggacgtgattgccaagtgcaagagcacgatctggaacggcccgatgggtgtgttcgagatgccgtgctactcgaagggcacgttcgctgtggccaaggcgatgggcaacgggacgcagaagaacgggctgatgagcatcatcggcggcggcgacacggcgagcgctgcggagctgagcggggaggcgaagaacatgtcgcacgtgtcgactggcggcggcgcctcgctggagctgctggagggcaagtcgctgccgggtgtcaccgttctcaccaacaaggagtag

SEQ ID NO: 57017 - protein, 417 aa, Crithidia fasciculata
MSLAPKKTIDDAVVKGKKVLIRVDFNVPVKNGEITNDFRIRSALPTIQKVLKEGGSCILMSHLGRPKGAKMSDPKPAKSVRGYEEAATLRPVAARLSELLGQKVEFAPDCLDAASYAAKLKGGDVLLLENVRFYAEEGSKKEEERDAMAKVLAAYGDVYVSDAFGTAHRDSADMTGIPKVLGAGYAGYLMEKEINYFAQVLNNPPRPLVAIVGGAKVSDKIQLLDNMLGRINYLVIGGAMAYTFQKAQGHAIGISMCEEDKLDLAKSLLKKAQERNVEVLLPVDHVCNKEFQGVDAPLVTKDVEIPEGYMALDIGPKTIKIYEDVIAKCKSTIWNGPMGVFEMPCYSKGTFAVAKAMGNGTQKNGLMSIIGGGDTASAAELSGEAKNMSHVSTGGGASLELLEGKSLPGVTVLTNKE

SEQ ID NO: 57018 - DNA, 1266 bp, Trypanosoma brucei brucei
  CDS (1)..(1266)
atgtcactaaaagagaggaagagcattaacgaatgcgatcttaagggaaagaaggttcttatccgtgttgactttaatgttcctctggatgatggtaatattaccaacgactaccgaatccgatcagctctgccagccgtccaaaaagttctcacagaaggcggcagctgtgttctcatgagccacctcgggaggccgaaaggcgtttctatggctgaaggcaaagaactggggagcgctggcggtattcccgggttcgagcagaaggcaacactcaaaccggtagccaaggccctcagcgaattgttatcgagacccgtcacattcgcacctgactgtctgaacgctgcagatgtcgtctctaagatgtctccgggcgatgttgttctgcttgaaaatgtacggttctacaaagaagagggcagcaagaagagcactgaggaacgtgaagccatggccaagatcctttcgtcatatggtgatgtttacatcagtgatgcttttggtacagctcaccgtgacagtgctaccatgaccggaattccaaagattttgggcaacggtgctgccggttatttgatggagaaggagatttcatacttcgctaaggtacttggtaacccgccgcgtccgctggttgctatcgttggtggagcgaaagtgagcgacaagatccaacttctggataacatgttgcagcgcatcgattatctcttaattggtggtgcaatggcatacacatttctgaaggctcagggttacagcattggaatatccatgtgcgaggaaagtaaacttgaatttgctcgatccctgctgaagaaggcggaggaccgcaaggtgcagattattcttccaattgatcatgtttgccacacggaattcaaagctgtggattctccattgataactgaggatcaaaacatccctgaaggacatatggctctggatattggtcccaagactattgaaaaatatgttcagacgattgggaagtgtaagagcgccatttggaacggtcccatgggtgtatttgaaatggttccttattccaaaggtacatttgcaattgcgaaagccatgggtcgaggaactcacgagcatggactcatgagtatcatcggtggtggtgacagcgcaagtgcagctgagttgagcggtgaggcgaagcgcatgtctcatgtttcaacgggtggtggtgcgtctttggaactcctcgagggcaaaacgcttcccggtgttacagtattggatgataaggagtaa

SEQ ID NO: 57019 - protein, 421 aa, Trypanosoma brucei brucei
MSLKERKSINECDLKGKKVLIRVDFNVPLDDGNITNDYRIRSALPAVQKVLTEGGSCVLMSHLGRPKGVSMAEGKELGSAGGIPGFEQKATLKPVAKALSELLSRPVTFAPDCLNAADVVSKMSPGDVVLLENVRFYKEEGSKKSTEEREAMAKILSSYGDVYISDAFGTAHRDSATMTGIPKILGNGAAGYLMEKEISYFAKVLGNPPRPLVAIVGGAKVSDKIQLLDNMLQRIDYLLIGGAMAYTFLKAQGYSIGISMCEESKLEFARSLLKKAEDRKVQIILPIDHVCHTEFKAVDSPLITEDQNIPEGHMALDIGPKTIEKYVQTIGKCKSAIWNGPMGVFEMVPYSKGTFAIAKAMGRGTHEHGLMSIIGGGDSASAAELSGEAKRMSHVSTGGGASLELLEGKTLPGVTVLDDKE

SEQ ID NO: 57020 - DNA, 1242 bp, Alcaligenes eutrophus; identical to SEQ ID NO: 10454
  CDS (1)..(1242): transl_table=11

SEQ ID NO: 57021 - protein, 413 aa, Alcaligenes eutrophus; identical to SEQ ID NO: 10455

SEQ ID NO: 57022 - DNA, 1368 bp, Crithidia fasciculata
  CDS (1)..(1368)
atgtctctcgttccgaagaagagcatcgatgatgccgtggtgaagggcaagaaggtcctcatccgtgtggacttcaacgtgccggtgaagaacggcgagatcacgaacgacttccgcatccgctccgccctgccgacgatccagaaggtgctgaaggagggcggctcctgcatcctgatgagccacctcggccgcccgaagggtgcgaagatgagcgacccgaagccggccaagagcgtgcgcgggtacgaggaggctgcgacgctgcggccggtggctgcgcggctgtcggagctgctggggcagaaggtggagttcgcgccggactgcctggacgctgcgtcgtacgctgctaagctgaagggcggcgacgtgctgctgctggagaacgtgcgcttctacgcggaggagggcagcaagaaggaggaggagcgcgacgcgatggcgaaggtgcttgcggcgtacggcgacgtgtacgtgagcgacgccttcggcactgcgcaccgcgacagcgcggacatgacgggcatcccgaaggtgctgggtgcgggctacgccggctacctgatggagaaggagatcaactacttcgcgcaggtgctgaacaacccgccgcgtccgctggtggccatcgtgggcggtgcgaaggttagcgacaagatccagctgctggacaacatgctgggccgcatcaactacctggtgattggcggcgcgatggcgtacacgttccagaaggcgcagggccacgcgatcggcatctcgatgtgcgaggaggacaagctggaccttgccaagtcgctgctgaagaaggcgcaggagcgcaacgtggaggtgcttctgccggtggaccacgtgtgcaacaaggagttccaaggcgtggacgcgccgctggtgacgaaggacgtggagatcccggaggggtacatggcgctggacattggcccgaagacgatcaagatctacgaggacgtgattgccaagtgcaagagcacgatctggaacggcccgatgggtgtgttcgagatgccgtgctactcgaagggcacgttcgctgtggccaaggcgatgggcaacgggacgcagaagaacgggctgatgagcatcatcggcggcggcgacacggcgagcgctgcggagctgagcggggaggcgaagaacatgtcgcacgtgtcgactggcggcggtgcctcgctggagctgctggagggcaagtcgctgccgggcgtcaccgttctcaccaacaaggacgcgaaggcgcctgctgctgctgccgctgccggtggtgactgcccgtgcggttccggctgcgctgcggttcccgccgcagccacggcaacggtttcgatggtgctcgcctcgccatga

SEQ ID NO: 57023 - protein, 455 aa, Crithidia fasciculata; identical to SEQ ID NO: 10501

SEQ ID NO: 57024 - DNA, 1440 bp, Leishmania major
  CDS (1)..(1440)
atgtctctcgtgctgaagaagagcatcgatgacgccaccgtcagggacaagaaggtgctcatccgcgtggacttcaacgtccccgtgaagaacggtaagatcacgaatgacttccgcattcgctccgcccttccgacgatccaaaaggtgctgaaggagggcggctcctgcatcctgatgagccaccttggtcggccgaagggtgcgagaatgagtgacccaagtccggagaagggtgtgcgcgggtacgaggaggccgccacgctgcgcccggttgctgcacgcatcagcgagctgctggggcagaaggtggagtttgcaccggactgcctggacgctgcgtcgtacgcgtcgaagctgaagaacgcggacgtgctgttgctggagaacgtgcgtttctacgcggaggagggcagcaagaaggaggaggagcgcgacgcgatggcgaaggtactagcgtcgtacggcgacgtgtatgtcagtgacgcgtttggcactgcgcaccgcgacagcgcgacgatgacgggcatccccaaggtgctgggtgcgggctacgccgggtacctgatggagaaggagatcaactacttctcgcgagtgctgaacaacccgccgcggccgctggttgcgattgtcggcggtgcgaaggtcagcgacaagatccagctgcttgacaacatgctgggccgcatcaactaccttgtgattggtggcgcgatggcgtacacgttccagaaggcgcagggccgcaagatcggcatctcgatgtgcgaggaggataagctggaccttgccaagtcgctgctgaagaaggcgcaagagcggaatgtgcaggtgtttctgccagttgaccacgtgtgcaacaaggaatttaaggccgcggactcgccgctggtgacggagagcgtggacgtcccggacggctacatggcgctggacattggcccaaggacgatccacatgtacgaggaagtgattggccgctgcaagagcgcgatctggaacggcccgatgggcgtgttcgagatgccgtgctactcgaagggcacatttgccgttgcgaaggcgatggggactggaacgcagaagaacgggctgatgagcatcatcggcggtggtgacagcgcgagcgctgcggagctgagcggcgaggcgaagaacatgtcgcatgtgtccaccggcggcggtgcgtccctggagctgctggagggcaagacgctgcctggcgtcgccattctgacggacaaggacgtgaaggagcggggagcttcgtgcaagttcgctttcggggtcgggagcccgagcagggaggcttgtccgctccgttgtgggcatatctttggcggtgcctccatcgtaagagagatagttaagatcgtcgtcgcgctgctgatcggcatttttattggtcgccgcatgagcaccaagctgatccggtaa

SEQ ID NO: 57025 - protein, 479 aa, Leishmania major
MSLVLKKSIDDATVRDKKVLIRVDFNVPVKNGKITNDFRIRSALPTIQKVLKEGGSCILMSHLGRPKGARMSDPSPEKGVRGYEEAATLRPVAARISELLGQKVEFAPDCLDAASYASKLKNADVLLLENVRFYAEEGSKKEEERDAMAKVLASYGDVYVSDAFGTAHRDSATMTGIPKVLGAGYAGYLMEKEINYFSRVLNNPPRPLVAIVGGAKVSDKIQLLDNMLGRINYLVIGGAMAYTFQKAQGRKIGISMCEEDKLDLAKSLLKKAQERNVQVFLPVDHVCNKEFKAADSPLVTESVDVPDGYMALDIGPRTIHMYEEVIGRCKSAIWNGPMGVFEMPCYSKGTFAVAKAMGTGTQKNGLMSIIGGGDSASAAELSGEAKNMSHVSTGGGASLELLEGKTLPGVAILTDKDVKERGASCKFAFGVGSPSREACPLRCGHIFGGASIVREIVKIVVALLIGIFIGRRMSTKLIR

SEQ ID NO: 57026 - DNA, 1440 bp, Leishmania mexicana; identical to SEQ ID NO: 10636
  CDS (1)..(1440)

SEQ ID NO: 57027 - protein, 479 aa, Leishmania mexicana; identical to SEQ ID NO: 10637

SEQ ID NO: 57028 - DNA, 1323 bp, Trypanosoma brucei brucei
  CDS (1)..(1323)
atgacccttaacgagaagaagagcattaatgaatgcgatcttaagggaaagaaggttcttatccgtgttgactttaatgttcccgtgaaaaacggtaagatcaccaacgactaccgaatccgatcagctctgccaacgctcaagaaggttctcacagaaggcggcagctgtgttctcatgagccacctcgggaggccgaaaggtattcccatggcgcaagctggcaaaatacggagcactggcggtgttcccgggttccaacagaaggcaacactcaaaccggtagccaaggccctcagcgaactgctattgaggcccgtcacattcgcacctgactgcctgaacgctgcagatgtcgtctctaagatgtctccgggcgatgttgttctgcttgaaaatgtacggttctacaaagaagagggcagcaagaaggcaaaagaccgtgaagccatggccaagatccttgcgtcatatggtgatgtttacatcagtgatgcttttggtacagctcaccgtgacagtgctaccatgaccggaattccaaagattttgggcaacggtgctgccggttatttgatggagaaggagatttcatacttcgctaaggtacttggtaacccgccgcgtccgctggttgctatcgttggtggagcgaaagtgagcgacaagatccaacttctggataacatgttgcagcgcatcgattatctcttaattggtggtgcaatggcatacacatttctgaaggctcagggttacagcattggaaaatcgaagtgcgaggaaagtaaacttgaatttgctcgatccctgctgaagaaggcggaggaccgcaaggtgcaggttattcttccaattgatcatgtttgccacacggaattcaaagctgtggattctccattgataactgaggatcaaaacatccctgaagggcatatggctctggatattggtcccaagactattgaaaaatatgttcagacgattgggaagtgtaagagcgccatttggaacggtcccatgggtgtatttgaaatggttccttattccaaaggtacatttgcaattgcgaaagccatgggtcgaggaactcacgagcatggactcatgagtatcatcggtggtggtgacagcgcaagtgcagctgagttgagcggtgaggcgaagcgcatgtctcatgtttcaactggtggtggtgcgtctttggaactcctcgagggcaaaacgcttcccggcgttacagtattggacgaaaagtcggcggttgtgtcgtatgcctctgcaggtactggaactctttctaaccggtggagctctctttaa

SEQ ID NO: 57029 - protein, 440 aa, Trypanosoma brucei brucei
MTLNEKKSINECDLKGKKVLIRVDFNVPVKNGKITNDYRIRSALPTLKKVLTEGGSCVLMSHLGRPKGIPMAQAGKIRSTGGVPGFQQKATLKPVAKALSELLLRPVTFAPDCLNAADVVSKMSPGDVVLLENVRFYKEEGSKKAKDREAMAKILASYGDVYISDAFGTAHRDSATMTGIPKILGNGAAGYLMEKEISYFAKVLGNPPRPLVAIVGGAKVSDKIQLLDNMLQRIDYLLIGGAMAYTFLKAQGYSIGKSKCEESKLEFARSLLKKAEDRKVQVILPIDHVCHTEFKAVDSPLITEDQNIPEGHMALDIGPKTIEKYVQTIGKCKSAIWNGPMGVFEMVPYSKGTFAIAKAMGRGTHEHGLMSIIGGGDSASAAELSGEAKRMSHVSTGGGASLELLEGKTLPGVTVLDEKSAVVSYASAGTGTLSNRWSSL

SEQ ID NO: 57030 - DNA, 1527 bp, Trypanosoma brucei brucei; identical to SEQ ID NO: 10508
  CDS (1)..(1527)

SEQ ID NO: 57031 - protein, 508 aa, Trypanosoma brucei brucei; identical to SEQ ID NO: 10509

SEQ ID NO: 57032 - DNA, 1239 bp, Alcaligenes eutrophus
  CDS (1)..(1239): transl_table=11
atgatgagcctatcccatgcatcggtcccgcacacgaatcccacggcgccgcacacgctggccgcactgctcgccgctggcgggctggccggcaagcgtgtctttatccgcgccgacctcaacgtcccgcaggatgcagcgggcgatatcaccgacgatacccgcatccgtgcttccgtgcctgccatcgcggcctgcctgcaggcgggcgctgcggtgatggtcacctcgcacctgggccggccgcaggagggggcgcccgacccgcgccacagcctggcgccggtgggccgccgcctgtcggaactgctgggccgccaggtgccgctgttgtccggctggaccgagggcggcttccaggtgccgcccgggcaggtggtgctgctggaaaactgccgcatgaacacgggcgaaaagaagaacagcgacgagctggcgcagaagatggcggcgctgtgcgatgtctacgtcaacgacgccttcggcaccgcccaccgcgccgaggcgaccacgcatggcatcgccaggtacgcccccgttgcctgcgccggcccgcttctggccgccgagatcgacgcgttgggcaaggcgctgggccagccggcgcgtccgctggtggcgatcgtggccggctccaaggtctcgaccaagctgaccatcctgaagtcgctggccgacaaggtcgacaacctggtcgtcggcggcggcatcgccaataccttcatgctggccgccggcctgaagatcggcaagtcgctggccgagcctgacctgctggccgatgccagggccatcatcgacatcatggccgcccgcggcgcctcggtgccgatcccggtcgacgtggtgtgcgccaaggagttcagcgccaccgccgcggccgcggtcaaggacgtcagggacgtggccgacgacgacatgattctcgacatcggcccgaagaccgcggccatgctggccgaccagctcaaggccgccggcaccatcgtctggaatggcccggttggcgtgttcgaattcgaccagttcggcaatggcaccagggtgctggcacaggccatcgccgagtcgaaggcgttctcgatcgccggcggcggcgacacgctggccgccatcgccaagtacggcattgccgaccgcgtgggctacatctcgaccggcggcggcgcgttcctggaattcctggaaggcaagaagctgcccgcactggacgtgctggagcaacgggccgccagctga

SEQ ID NO: 57033 - protein, 412 aa, Alcaligenes eutrophus
MMSLSHASVPHTNPTAPHTLAALLAAGGLAGKRVFIRADLNVPQDAAGDITDDTRIRASVPAIAACLQAGAAVMVTSHLGRPQEGAPDPRHSLAPVGRRLSELLGRQVPLLSGWTEGGFQVPPGQVVLLENCRMNTGEKKNSDELAQKMAALCDVYVNDAFGTAHRAEATTHGIARYAPVACAGPLLAAEIDALGKALGQPARPLVAIVAGSKVSTKLTILKSLADKVDNLVVGGGIANTFMLAAGLKIGKSLAEPDLLADARAIIDIMAARGASVPIPVDVVCAKEFSATAAAAVKDVRDVADDDMILDIGPKTAAMLADQLKAAGTIVWNGPVGVFEFDQFGNGTRVLAQAIAESKAFSIAGGGDTLAAIAKYGIADRVGYISTGGGAFLEFLEGKKLPALDVLEQRAAS

SEQ ID NO: 57034 - DNA, 1233 bp, Aeropyrum pernix; identical to SEQ ID NO: 10410
  CDS (1)..(1233)

SEQ ID NO: 57035 - protein, 410 aa, Aeropyrum pernix; identical to SEQ ID NO: 10411

SEQ ID NO: 57036 - DNA, 1251 bp, Agaricus bisporus
  CDS (1)..(1251)
atgtctctctccaacaaactctccatcactgacctcgccctcaccggcaagcgtgtccttatccgcgtcgacttcaactcccccatccaagacggaaagataaccaaccccgcccgtatcaatgccgccctccccactatcaaatatgccctcgacaatggcgcctccaaggtcatcttaatgtcgcatctcggcaggcccgatggcaaggcgatctccaaatactcactcaaacctgtggcctcagagctggaaaagctcttgaagaaaccggtcttcttcttgcatgactgcgtcggccctgacatcgaaaaggcagtcctggaggcacccgagggtgctgtcgttctgctcgagaaccttcgcttccacattgaggaagaaggctctgccaagaacgaggaaggaaaaaaaatcaaagctgatccttccaaggtcacccagttccgcgagcagctcaccaggctcggcgatgtttatgtgaacgatgcctttggtacggctcatcgcgctcactccagcatggttggcatcaagcttcctcgaagggcttctgggtttttggtcaagaaagaactagactactttgcaaaggcactggaaaaccccgaacgacccttccttgctatccttggtggtgccaaagtgtctgacaagatccagctgattgaaaacatgctcgacaaggtcaactgtctcgtcatcggaggtggtatggcattcactttcaagaagacaatgcaaaatgttgcgattggcaactctctctttgacaaaccagggtctgaaaaagtggccgggatcgtcgaaaaggccaagaagaacaatgtcgaaattgtgttccccgtcgactatgttgtcggagacaagtttgatgcaaacgccaaccacaagatagtcacggatgacgaaggcgttccggatggttggatgggtctcgacgttggtccaaagtctaatgagctcttccgtgaagcggtcctgaaagccaagacgattctctggaacggtcctcccggagtgttcgaatttcctgcgtttgccaagggatcaaaggtgcttttggatgccacggtagaggcggtacaaaagggggctactgttatagttggtgggggtgatacagctacggtagttgcgaatcatgacgcagaagagaagctgagccacgtcagcactggtgggggtgcgagtctggagctgctggagggcaagacgctgcctggagtggcagaattgagcaacaaatga

SEQ ID NO: 57037 - protein, 416 aa, Agaricus bisporus; identical to SEQ ID NO: 10643

SEQ ID NO: 57038 - DNA, 1203 bp, Anabaena sp; identical to SEQ ID NO: 10402
  CDS (1)..(1203)

SEQ ID NO: 57039 - protein, 400 aa, Anabaena sp; identical to SEQ ID NO: 10403

SEQ ID NO: 57040 - DNA, 1239 bp, Aplysia californica
  CDS (1)..(1239)
atgaacaagctcagtattaacgacgtggatgtgagggacaagagagtcctgatcagagtcgatttcaacgtccccttgaaaaatggacagatctcaaacaaccagagaatcgctgcagccctgcctacgatcaagcttgccttggagaagggtgccaagtcagtggtgctcatgtctcatctcggtcggccagacgggcgcccaatccatgcggccagtatgaagccggtggtggcagagctggagaacctgttgggaaagaaaatcatgtttctggaagactgcgtgggttccaaggtagaggccgcctgtgccaacccggagcccggcagcgtgatcctgctggaaaatctccgcttccacgtggagaaggaggggaagggcaaggacgctcagggcaacaaggctaaggcagatgatgctgctgtggctgccttcagggcctccttgtccaaactgggagacgtctacgtgaacgacgcttttggcacagctcatagagctcacagctccatggtgggtgtggatctgccggtcaaggcctgcggtctgctcatgaagaaagagttggactactttgccaaagccctggagaaccccgctcgtccgttcctggctatcctgggaggagctaaagttgctgacaaaatccagctgattgagaaccttatggacaaagtcaatgagatgatcattggtggtggaatggctttcacattcttgaaagtactcaacaatatggacatcggaggttctctgtttgacgagggggccaagatcgttggccgtctggtggacaaggcgaaggagaagggagtgaagctccacctgccctccgacttcatcaccggcgacaagtttgccgacgtcgccaagtccgccacggcgtctgttgcgtctggcatcccagaaggttggatgggtctggatgttgggaccaaaaccaacgaagtattccagaaggtgattgaaggagcaaagacaattgtgtggaacgggccccccggagtgtttgagtttgagaacttcagcacgggctccaagcagatgatggactctgtggtcagggccaccgaggcaggaaccatcactatcattggtggatgtgacactgccacgtgtgccaagaattcaaacgccacggagaaggtgagccatgtgagcacaggaagcggaaccagcctggagctgttggaaggcaaaatccttcctggcgtggctgccctgtcccagccgtga

SEQ ID NO: 57041 - protein, 412 aa, Aplysia californica; identical to SEQ ID NO: 10645

SEQ ID NO: 57042 - DNA, 1194 bp, Aquifex aeolicus; identical to SEQ ID NO: 10420
  CDS (1)..(1194): transl_table=11

SEQ ID NO: 57043 - protein, 397 aa, Aquifex aeolicus; identical to SEQ ID NO: 10421

SEQ ID NO: 57044 - DNA, 1224 bp, Archaeoglobus fulgidus
  CDS (1)..(1224): transl_table=11
gtgatgatagacggccttccaacactagacgatattccgtacagaggaaagcacgttctgctgagggttgacatcaacgctcctattgtgaactcaacgattctcgacacgagcagattcgagagccacattccgacaattgaggctcttgaagactcaaagctcgttttgctcgcacaccagagccgacccggaaagaaggacttcacgagtctcgaaagccacgcatccacactttccaaactgctcgggaagagagtcgagtacatagacgaaattttcagcaaaggcgttctgagaagaataaaggagatggagaacggtgaggtaattttgctcgagaacgtgaggttctactccgaggagcagttgaacagaagcgctgaggagcatgccgagtgccacatggtcaggaaactcagcacagcctttgacctctttgtcaacgacgccttctccgcatcccatcgaagccacgcatctttggtcggcttcgttccggttctgccatccgtcgtgggaaggctcgtcgaaaatgaggttaccgccctcagcaaacccctcaagggggaggggagaaagatatttgtcctgggcggagctaaaatcaaggactcggtgaaagttctaaaaaacgtgctggaaaacaacattgcggaaaaagtcgttctcacgggtgtagttgccaactactttctcatgctgaaaggttacgatataggtgaagtgaacagaaaggttgtggaggacaacaaggaagacgtgagcgacgaggagatgataaacatactcaagaagtactccgacaaaattatccttcccattgacctcggtatagagaaagacggtgtcagggtagatatcccattggagaagtttgatgggaaatacagaataatggatattgggcttgaaaccgttaaccagctttcggaaatcatcccgaagtacgattatgtggttctgaacggtcctgcgggagtttttgaggatgagcgtttctctctcggaacttacgagattctgagggccgcgacaagggctggttactcggttgttggcggggggcacatcgcctcagcagcacgcctcttcggcctttcggacaagttcagccacatatcaactgcaggaggggcgtgcataaggttcctgagcggtgaaaagctggtagctcttgaggttatcaaggaatactgggcgaagaagtggggcaaatcttaa

SEQ ID NO: 57045 - protein, 407 aa, Archaeoglobus fulgidus; identical to SEQ ID NO: 10391

SEQ ID NO: 57046 - DNA, 1248 bp, Ashbya gossypii
  CDS (1)..(1248)
atgtcgctatcctctaagctaacagtcaaggacctgagccttgcgggcaaacgcgtgttcatccgcgtggacttcaacgtgccgctagacgggaagacgatcacgtcgaaccagcgcattgtggccgcgctacccacgatcaagtacgtgttggagcagggccccaaggcggtggtgttggcgtcgcacctagggcggcccaacggcgagcgcaacgagaagtactcgttggcgccggtggccgcggagctggagaagctgctgggccagaaggtgaactcctggacactgcgtgggcagcacgtgaccgctgcggtcaacggcgcggctgcggggtccgtgttcctgcttgagaacctgcggttccacatcgaggaggagggctcgcgcaaggtggacggcgagaaggtcaaggcgtctgcggaggacgtgcagaagttccgccagggcctcatgtcgctcgcggacgtctacgtcaacgacgccttcggcaccgcgcacagagcgcactcctcgatggtcggcttcgagctgcctgagagggccggcggcttcttgttgtcgcgcgagctggagtacttcagcaaggcgttggagaaccctacgagacccttcttggcgatcctgggcggtgccaaggttgccgacaagatccagttgatcgacaacttgttggacaaggtcgactcgattgtgatcggcggtggcatggccttcaccttcaagaaggtgcttgagaacatggagatcggtaactccatctacgacaaggcgggtgccgagatcgttcctaagctagcggagaaggccaagaagaacggcgtcaagatcgtgttgcctgtggacttcgtgatcggcgacgacttctcccaggacgccaacaccaagattgtctctgcctccgagggcattccatccggctgggagggtctagactgtggtcctgagtccagaaagctgttcagcgagaccatcgcgagcgcgaagaccatcgtgtggaacggcccaccaggtgtctttgagattccaaagttctccgagggtacccaggccatgcttgcggccgctgtcaaggcctccgaggctggcagcaccgtcatcatcggcggtggtgacaccgctaccgtggccaagaagtacggtgtggtcgagaagatctcccatgtgtccaccggtggtggtgcctccctagagctattggagggtaaggacctaccaggtgtcaccttcttgtccagcaagcagtag

SEQ ID NO: 57047 - protein, 415 aa, Ashbya gossypii
MSLSSKLTVKDLSLAGKRVFIRVDFNVPLDGKTITSNQRIVAALPTIKYVLEQGPKAVVLASHLGRPNGERNEKYSLAPVAAELEKLLGQKVNSWTLRGQHVTAAVNGAAAGSVFLLENLRFHIEEEGSRKVDGEKVKASAEDVQKFRQGLMSLADVYVNDAFGTAHRAHSSMVGFELPERAGGFLLSRELEYFSKALENPTRPFLAILGGAKVADKIQLIDNLLDKVDSIVIGGGMAFTFKKVLENMEIGNSIYDKAGAEIVPKLAEKAKKNGVKIVLPVDFVIGDDFSQDANTKIVSASEGIPSGWEGLDCGPESRKLFSETIASAKTIVWNGPPGVFEIPKFSEGTQAMLAAAVKASEAGSTVIIGGGDTATVAKKYGVVEKISHVSTGGGASLELLEGKDLPGVTFLSSKQ

SEQ ID NO: 57048 - DNA, 1254 bp, Aspergillus oryzae; identical to SEQ ID NO: 10646
  CDS (1)..(1254)

SEQ ID NO: 57049 - protein, 417 aa, Aspergillus oryzae; identical to SEQ ID NO: 10647

SEQ ID NO: 57050 - DNA, 1185 bp, Bacillus cereus
  CDS (1)..(1185): transl_table=11
atgaacaaaaaatcaattcgtgacgtagatttaaaaggtaagcgtgtattttgccgcgttgacttcaacgtacctatgaaagaaggcaaaattacagatgaaactcgtatccgtgcagctcttcctacaattcaatatttagtagagcaaggtgcgaaagttattttagcaagccacttaggccgtccaaaaggtcaagtagtagaagaaatgcgtttaactccagtagcagcacgtttaggcgagcttcttggtaaagacgttaaaaaagcagacgaagcattcggaccagctgtacaagaaatggttgcagcaatgaacgaaggcgacgtattagttcttgaaaacgtacgtttctatgcgggcgaagaaaagaacgatgcagaacttgcgaaagaatttgcagctcttgctgacatcttcgtaaacgatgcattcggtgcagctcaccgtgctcacgcttctacagcaggtatcgcggactacctaccagcagtatctggtttactaatggaaaaagagttagatgttcttggaaaagcactttctaacccagatcgtccattcacagctatcatcggtggtgcgaaagtaaaagataaaatcggtgtaattcgtcatctattagacaaagtagataacttaatcatcggtggcggacttgcttacacattcgttaaagctttaggtcatgaaattggtctatctctatgtgaagacgacaagattgaactagctaaagaatttatgcaacttgcaaaagaaaaaggcgtaaacttctacatgccagttgatgttgtaatcactgaggaattctctgaaactgcaacaactaaaatcgttaatatcgattctatcccttctaactgggaaggcgtggacatcggtcctaaaacacgtgaaatttatgcagatgtaattaaaaactctaagcttgttgtatggaatggaccaatgggtgtattcgaaatgactccattcgcagaaggtacaaaagcagtaggacaagcattagcagatgcagaaggtacatactctgttatcggcggtggtgactctgcagcagctgttgaaaaattcggtatggctgataaaatgagccacatttctactggcggcggtgcgtcattagaattcatggaaggtaaagagcttccaggtgtagtttgtcttaacgacaaataa

SEQ ID NO: 57051 - protein, 394 aa, Bacillus cereus
MNKKSIRDVDLKGKRVFCRVDFNVPMKEGKITDETRIRAALPTIQYLVEQGAKVILASHLGRPKGQVVEEMRLTPVAARLGELLGKDVKKADEAFGPAVQEMVAAMNEGDVLVLENVRFYAGEEKNDAELAKEFAALADIFVNDAFGAAHRAHASTAGIADYLPAVSGLLMEKELDVLGKALSNPDRPFTAIIGGAKVKDKIGVIRHLLDKVDNLIIGGGLAYTFVKALGHEIGLSLCEDDKIELAKEFMQLAKEKGVNFYMPVDVVITEEFSETATTKIVNIDSIPSNWEGVDIGPKTREIYADVIKNSKLVVWNGPMGVFEMTPFAEGTKAVGQALADAEGTYSVIGGGDSAAAVEKFGMADKMSHISTGGGASLEFMEGKELPGVVCLNDK

SEQ ID NO: 57052 - DNA, 1185 bp, Bacillus halodurans; identical to SEQ ID NO: 10446
  CDS (1)..(1185)

SEQ ID NO: 57053 - protein, 394 aa, Bacillus halodurans; identical to SEQ ID NO: 10447

SEQ ID NO: 57054 - DNA, 1185 bp, Bacillus megaterium; identical to SEQ ID NO: 10464
  CDS (1)..(1185): transl_table=11

SEQ ID NO: 57055 - protein, 394 aa, Bacillus megaterium; identical to SEQ ID NO: 10465

SEQ ID NO: 57056 - DNA, 1185 bp, Bacillus stearothermophilus
  CDS (1)..(1185): transl_table=11
atgaacaagaagacgatccgcgacgttgatgtgaggggaaagcgcgtcttttgccgcgtcgatttcaacgttccgatggagcaaggcgctatcaccgatgacacgcgcattcgcgccgcactcccgacgatccgctatttgatcgagcacggggcgaaagtcattttggcgagccacctcggccgcccgaaaggaaaagtggtcgaagaattgcgtttggatgccgttgcgaagcggctcggcgagctgcttgaacggccggttgccaaaacgaatgaagcggtcggcgatgaggtgaaagcggcggtcgaccgtttgaacgaaggcgatgtgctcttgcttgagaacgtccgtttttaccctggcgaagagaaaaatgatcccgagctcgccaaagcgtttgcggagcttgcggatctatatgtcaacgatgcgttcggcgccgcccatcgcgctcatgcgtcgacggaaggcatcgcccattacttgccggcggtggccggatttttgatggaaaaagaacttgaagtgcttggcaaggcgctttcgaatccggaccgcccgtttacagcgatcatcggcggggcgaaagtgaaagacaaaatcggcgtcatcgacaatttgcttgaaaaagtcgacaacttgatcatcggcggcggactggcgtatacgttcgtcaaagcgctcggccatgacgtcggcaagtcgctgcttgaggaggacaaaatcgaactcgccaaatcgtttatggaaaaggcgaaagaaaaaggcgtccgtttttatatgccggtggacgtggtcgtcgccgaccggtttgcgaacgacgccaacacgaaagtcgtgccgattgacgcgattccagccgattggtcggcgcttgacatcggcccgaaaacgcgcgaattgtaccgcgatgtcattcgcgagtcgaagctcgttgtctggaacggcccgatgggcgtctttgaaatggacgcgttcgcccacgggacaaaagcgatcgccgaagcactggcggaagcgctcgacacctattcggtcatcggcggcggggattcggcggcggcggttgagaaattcggcttggccgacaaaatggatcatatctccaccggcggcggcgcttcgctcgagtttatggaaggaaaacagctgccgggtgtcgtcgcactcgaagacaaatga

SEQ ID NO: 57057 - protein, 394 aa, Bacillus stearothermophilus; identical to SEQ ID NO: 10459

SEQ ID NO: 57058 - DNA, 1185 bp, Bacillus subtilis; identical to SEQ ID NO: 10414
  CDS (1)..(1185): transl_table=11

SEQ ID NO: 57059 - protein, 394 aa, Bacillus subtilis; identical to SEQ ID NO: 10415

SEQ ID NO: 57060 - DNA, 1260 bp, Bacteroides thetaiotaomicron; identical to SEQ ID NO: 10648
  CDS (1)..(1260): transl_table=11

SEQ ID NO: 57061 - protein, 419 aa, Bacteroides thetaiotaomicron; identical to SEQ ID NO: 10649

SEQ ID NO: 57062 - DNA, 1194 bp, Bartonella henselae; identical to SEQ ID NO: 10650
  CDS (1)..(1194): transl_table=11

SEQ ID NO: 57063 - protein, 397 aa, Bartonella henselae; identical to SEQ ID NO: 10651

SEQ ID NO: 57064 - DNA, 1206 bp, Bdellovibrio bacteriovorus; identical to SEQ ID NO: 10652
  CDS (1)..(1206): transl_table=11

SEQ ID NO: 57065 - protein, 401 aa, Bdellovibrio bacteriovorus; identical to SEQ ID NO: 10653

SEQ ID NO: 57066 - DNA, 1182 bp, Borrelia burgdorferi; identical to SEQ ID NO: 10450
  CDS (1)..(1182): transl_table=11

SEQ ID NO: 57067 - protein, 393 aa, Borrelia burgdorferi; identical to SEQ ID NO: 10451

SEQ ID NO: 57068 - DNA, 1197 bp, Bradyrhizobium japonicum; identical to SEQ ID NO: 10658
  CDS (1)..(1197)

SEQ ID NO: 57069 - protein, 398 aa, Bradyrhizobium japonicum; identical to SEQ ID NO: 10659

SEQ ID NO: 57070 - DNA, 1188 bp, Brucella suis; identical to SEQ ID NO: 10662
  CDS (1)..(1188)

SEQ ID NO: 57071 - protein, 395 aa, Brucella suis; identical to SEQ ID NO: 10663

SEQ ID NO: 57072 - DNA, 1254 bp, Caenorhabditis elegans; identical to SEQ ID NO: 10494
  CDS (1)..(1254)

SEQ ID NO: 57073 - protein, 417 aa, Caenorhabditis elegans; identical to SEQ ID NO: 10495

SEQ ID NO: 57074 - DNA, 1203 bp, Campylobacter jejuni; identical to SEQ ID NO: 10412
  CDS (1)..(1203): transl_table=11

SEQ ID NO: 57075 - protein, 400 aa, Campylobacter jejuni; identical to SEQ ID NO: 10413

SEQ ID NO: 57076 - DNA, 1254 bp, Candida albicans
  CDS (1)..(1254): transl_table=12
atgtcattatctaacaaattatcagtcaaagacttagacgttgctggaaagagagtctttatcagagttgacttcaacgtcccattggacggtaagactatcaccaacaaccaaagaattgttgctgctttgccaaccatcaaatacgttgaagaacataaaccaaaatacattgtcttggcttcccacttgggtagaccaaacggtgaaagaaacgacaaatactcattagctccagttgctactgaattggaaaaattgttgggtcaaaaagtcaccttcttgaacgattgtgttggtccagaagtcaccaaggctgttgaaaacgccaaagatggtgaaatctttttgttggaaaacttgagataccacattgaagaagaaggttcttccaaagacaaggatggtaagaaagtcaaggctgatccagaagccgttaagaaattcagacaagaattgacttcattggctgatgtctacattaacgatgcctttggtactgctcacagagcccactcctctatggttggtctcgaagttccacagagagctgctggtttcttaatgtccaaagaattggaatactttgctaaggctttggaaaacccagaaagaccattcttggccattttgggtggtgctaaagtttctgacaagattcaattgattgacaacttgttggacaaggttgatatgttgattgttggtggtggtatggccttcactttcaagaaaatcttgaacaaaatgccaattggtgattctcttttcgatgaagccggtgctaaaaacgttgaacacttggttgaaaaagctaagaaaaacaatgttgaattgatcttgccagttgattttgtcactgctgataaattcgacaaagatgccaaaacttcttctgctactgatgctgaaggtattccagacaactggatgggtttggactgtggtccaaaatctgtcgaattgttccaacaagctgttgccaaagctaagaccattgtttggaacggtccaccaggtgttttcgaatttgaaaaattcgccaacggtactaaatccttattggatgctgctgtcaaatctgctgaaaatggtaacattgttatcattggtggtggtgatactgctactgttgctaagaaatacggtgtcgttgaaaaattatcgcacgtttctactggtggtggtgcttcattggaattattagaaggtaaagacttgccaggtgtagttgctctttccaacaaaaactaa

SEQ ID NO: 57077 - protein, 417 aa, Candida albicans; identical to SEQ ID NO: 10669

SEQ ID NO: 57078 - DNA, 1251 bp, Candida glabrata; identical to SEQ ID NO: 10540
  CDS (1)..(1251)

SEQ ID NO: 57079 - protein, 416 aa, Candida glabrata; identical to SEQ ID NO: 10541

SEQ ID NO: 57080 - DNA, 1254 bp, Candida maltosa; identical to SEQ ID NO: 10460
  CDS (1)..(1254)

SEQ ID NO: 57081 - protein, 417 aa, Candida maltosa; identical to SEQ ID NO: 10461

SEQ ID NO: 57082 - DNA, 1191 bp, Caulobacter crescentus; identical to SEQ ID NO: 10448
  CDS (1)..(1191): transl_table=11

SEQ ID NO: 57083 - protein, 396 aa, Caulobacter crescentus; identical to SEQ ID NO: 10449

SEQ ID NO: 57084 - DNA, 1212 bp, Chlamydophila caviae; identical to SEQ ID NO: 10672
  CDS (1)..(1212): transl_table=11

SEQ ID NO: 57085 - protein, 403 aa, Chlamydophila caviae; identical to SEQ ID NO: 10673

SEQ ID NO: 57086 - DNA, 1212 bp, Chlamydia muridarum; identical to SEQ ID NO: 10674
  CDS (1)..(1212): transl_table=11

SEQ ID NO: 57087 - protein, 403 aa, Chlamydia muridarum; identical to SEQ ID NO: 10675

SEQ ID NO: 57088 - DNA, 1209 bp, Chlamydia pneumoniae; identical to SEQ ID NO: 10428
  CDS (1)..(1209): transl_table=11

SEQ ID NO: 57089 - protein, 402 aa, Chlamydia pneumoniae; identical to SEQ ID NO: 10429

SEQ ID NO: 57090 - DNA, 1194 bp, Chlorobium tepidum; identical to SEQ ID NO: 10676
  CDS (1)..(1194): transl_table=11

SEQ ID NO: 57091 - protein, 397 aa, Chlorobium tepidum; identical to SEQ ID NO: 10677

SEQ ID NO: 57092 - DNA, 1212 bp, Chlamydia trachomatis; identical to SEQ ID NO: 10392
  CDS (1)..(1212)

SEQ ID NO: 57093 - protein, 403 aa, Chlamydia trachomatis; identical to SEQ ID NO: 10393

SEQ ID NO: 57094 - DNA, 1176 bp, Chromobacterium violaceum; identical to SEQ ID NO: 10678
  CDS (1)..(1176): transl_table=11

SEQ ID NO: 57095 - protein, 391 aa, Chromobacterium violaceum; identical to SEQ ID NO: 10679

SEQ ID NO: 57096 - DNA, 1194 bp, Clostridium perfringens; identical to SEQ ID NO: 10680
  CDS (1)..(1194)

SEQ ID NO: 57097 - protein, 397 aa, Clostridium perfringens; identical to SEQ ID NO: 10681

SEQ ID NO: 57098 - DNA, 1206 bp, Clostridium tetani
  CDS (1)..(1206): transl_table=11
gtggtttatgtggcatttaataaaaaaaccattgaagacattgatgttaaaggaagaaaagttttagtaagatgtgattttaatgtacctttaaaagatggaaaaataacagatgaaaatagattaatgggagcactaccaactattaaatatattatggaaaagggcggtaaagttattttatgttctcaccttggtaaaccaaaaggagagcctaaacaggaattatctctagcaccagtagctaaaagattatctgagcttttaaataaggaagttttatttccagcagataatgaagtagttggagaaaatgctaaaaaagcagtagaaaatatgaaagatggagatgtaatcctattacaaaatacaagatatagaaaagaagaaactaagaatgaagaaaccttttcaaaagaattagcatctcttgcagatatatttgtaaatgatgcttttggaacagcacatagagcacattgctctacagttggagtaacagaatttgttgcaacatcagtatgtggatacttaatccaaaaagaattaaagtttttaggtaatgctgttgaaaatccacaaagaccttttatatcaattcttggaggagctaaagtatctgataaaataaatgtaataaataatttattagaaaaagttgatactctaattataggtggaggaatgagctatactttccaaaaggctcaagggtacacaataggaagctctcttttagaagaagacaaaatagattatgcaaaagaaatgatagaaaaggcaaaagaaaagggagtaaaattacttctacctgtagataatgtagcagctgaaaaatttgcagaagatgcagaagctattataacagaagatcaaaatattaaagaaggatatatgggacttgatataggacctaaaacttcaaaactttattcacaagaggttcaaagcgctaagactgtagtttggaatggacctatgggtgtatttgaatttgaaaaatttgcaaaaggtactatagaagtagcgaaggccatggctgaatcacaagctacaaccataataggtggaggagatagtgctgcggctgtaaatcaacttggatttggggataaaatgacccatatatctacaggtggaggagcttcattagaatttttagaaggaaaagagcttccaggaatagcagcacttaacgataaatag

SEQ ID NO: 57099 - protein, 401 aa, Clostridium tetani; identical to SEQ ID NO: 10683

SEQ ID NO: 57100 - DNA, 1218 bp, Corynebacterium diphtheriae; identical to SEQ ID NO: 10684
  CDS (1)..(1218): transl_table=11

SEQ ID NO: 57101 - protein, 405 aa, Corynebacterium diphtheriae; identical to SEQ ID NO: 10685

SEQ ID NO: 57102 - DNA, 1218 bp, Corynebacterium glutamicum
  CDS (1)..(1218): transl_table=11
atggctgttaagaccctcaaggacttgctcgacgaaggcgtagacggacgccacgtcatcgttcgatctgacttcaatgttcccctcaacgatgaccgcgagatcaccgataagggccgaatcattgcctccctaccaacccttaaagcactgagcgaaggtggcgcaaaggtcatcgtcatggctcaccttggccgcccaaagggcgaggtcaacgagaagtactccctcgcacctgtcgctgaggcactctccgatgagcttggccagtacgttgcacttgccgcagacgttgttggcgaagacgcacacgagcgcgcaaacggcctgaccgagggcgacatcctgctcctggagaacgtgcgcttcgacccacgcgaaacctccaaggacgaggcagagcgcaccgctttcgctcaggagctcgcagctcttgcagcagacaacggcgcattcgtttctgacggcttcggtgttgtccaccgcgcacagacctccgtctacgacattgcaaagttgctgccacactacgctggcggactggtagagaccgagatttccgttctggaaaagatcgcagaatcaccagaggcaccatacgtagtggttctcggtggatccaaggtctctgacaagatcggtgttattgaggcgctggctgccaaggctgacaagatcatcgtcggtggcggcatgtgctacaccttcctcgcagctcagggacacaacgttcagcagtccctcctgcaggaagaaatgaaggctacctgcaccgacctgctcgcacgcttcggtgacaagatcgttctcccagttgacctggttgcagcatccgaatttaacaaggacgcagagaagcagatcgttgacctggactccatcccagaaggctggatgtctcttgacatcggaccagagtccgtcaagaacttcggtgaggttctcagcaccgctaagaccatcttctggaacggcccaatgggcgtgttcgagttcgcagcattctctgaaggcacccgcggcatcgcccaggccatcatcgatgcaactgcaggcaacgacgcattctccgttgttggcggtggcgactccgcagcatccgttcgcgtgctcggcctgaacgaagacggcttctcccacatctccaccggtggtggcgcatccctcgagtaccttgaaggcaaggaactcccaggcgttgcaattctcgctcagtaa

SEQ ID NO: 57103 - protein, 405 aa, Corynebacterium glutamicum
MAVKTLKDLLDEGVDGRHVIVRSDFNVPLNDDREITDKGRIIASLPTLKALSEGGAKVIVMAHLGRPKGEVNEKYSLAPVAEALSDELGQYVALAADVVGEDAHERANGLTEGDILLLENVRFDPRETSKDEAERTAFAQELAALAADNGAFVSDGFGVVHRAQTSVYDIAKLLPHYAGGLVETEISVLEKIAESPEAPYVVVLGGSKVSDKIGVIEALAAKADKIIVGGGMCYTFLAAQGHNVQQSLLQEEMKATCTDLLARFGDKIVLPVDLVAASEFNKDAEKQIVDLDSIPEGWMSLDIGPESVKNFGEVLSTAKTIFWNGPMGVFEFAAFSEGTRGIAQAIIDATAGNDAFSVVGGGDSAASVRVLGLNEDGFSHISTGGGASLEYLEGKELPGVAILAQ

SEQ ID NO: 57104 - DNA, 1176 bp, Coxiella burnetii; identical to SEQ ID NO: 10688
  CDS (1)..(1176): transl_table=11

SEQ ID NO: 57105 - protein, 391 aa, Coxiella burnetii; identical to SEQ ID NO: 10689

SEQ ID NO: 57106 - DNA, 1251 bp, Debaryomyces hansenii; identical to SEQ ID NO: 10530
  CDS (1)..(1251)

SEQ ID NO: 57107 - protein, 416 aa, Debaryomyces hansenii; identical to SEQ ID NO: 10531

SEQ ID NO: 57108 - DNA, 1236 bp, Deinococcus radiodurans
  CDS (1)..(1236): transl_table=11
ttgacgggtttgtgcccgctccatcaaccatcacctcttgaccatccacattccggaggaacacccatgcaaaacctcagtcaattggatgtcaagggcaagcgcgtcctggtgcgcgtggactacaacgtgccggttggggacggcgtggtacaggacgacacccgcatcacggcgagcgtgccgaccatcaagaagctgcttgacggcggcgccagcgtcgtgctgatgagccacttcggacggcccaagaatggccccgaggacaagtacagcctgaagccggtggctgaggccgtcagccgcgcactcgggcaggacgtgaagttcattcccagcctgccaggcagcgacgaaaccctccaggccgtgcaggcgctcaggcccggtgaagtcgcgctgctggaaaacgtgcgcttcgaggcgggcgaggaaaagaacgatgcggcgctgaacgacaagctggccaagctgggtgacgccttcgtcctcgacgcgtttggctcggcgcaccgggcgcactcgtcggtcagcggcgtggccggcaagctaccgcacgcggcgggcgggctgctccagagcgaagtggacgcgctcggcaagttgctgcacgcgccggagcatccctacgtggtcatcatcggcggggcgaaagtcagcgacaagatcaaggtgatcgagaacctgctgcccaaagtggaccgcatgctgatcggcggcggaatgatgttcaccttcatcaaggcgcgcggcgggcagatcggcaacagtctggtggaagacgaccagcttgacctggcgaaggggttgctggagaagtacggtgacaagctgctgcttccgaccgacgcggtggccgccgacaaattcgccgccgatgctcagagcaaagtcgtccctgccgaccagattcctgacggctggatgggcctcgatatcgggcctgacacgcagcgggcgtatgccgacgccttgcagggcgccaaaactgtcttctggaacggtccgatgggcgtgttcgagttcgaccagttcgcggcaggcaccaacgcggtggcggcggcggtggggagcctgaaagaccaggcctacaccgtggtcggcggcggcgactcggtgagcgccatcaacaagagcggcaaggccgaccagatcgaccacatctccaccggcggcggtgcgagcctggaactgctggaaggcaaggagctgcccggcgtcgtggcgatggcgtga

SEQ ID NO: 57109 - protein, 411 aa, Deinococcus radiodurans; identical to SEQ ID NO: 10423

SEQ ID NO: 57110 - DNA, 1182 bp, Desulfovibrio vulgaris; identical to SEQ ID NO: 10690
  CDS (1)..(1182): transl_table=11

SEQ ID NO: 57111 - protein, 393 aa, Desulfovibrio vulgaris; identical to SEQ ID NO: 10691

SEQ ID NO: 57112 - DNA, 1248 bp, Drosophila melanogaster
  CDS (1)..(1248)
atggccttcaataagctgagcatcgaaaacctggacttggcgggcaagcgggtgttgatgcgcgtcgacttcaatgtgcccatcaaggagggcaagatcaccagcaaccagagaattgtcgctgccttggatagtatcaagttggccctttccaagaaagccaagtcggtggtgctgatgtcccacttgggtcgtcccgatggcaacaagaacatcaagtacaccctggcacccgtggccgctgagctgaagaccctgcttggccaggatgtgatcttcctaagtgactgcgtcggcagcgaagtggaggccgcttgcaaggatcccgcaccgggatccgtcattctgctggagaacgtccgcttctacgtggaggaggagggcaagggcttggatgccagcggcggcaaggtcaaggccgatcctgccaaggtcaaggagttccgtgccagcctggccaagctgggcgatgtctatgtcaacgacgccttcggcactgcccatcgcgcccacagttccatgatgggcgatggcttcgagcagcgcgcagctggtctgttgctgaacaaggagctgaagtacttctcgcaggccctggacaagccaccaaatcccttcctggcaattctcggtggcgccaaggtggccgacaagatccagctgattgagaaccttctggacaaggtcaacgagatgatcatcggtggcggcatggccttcaccttcctgaaggtcctcaacaacatgaagatcggcggttccctgttcgacgaggagggctccaagatcgtcgagaaactggtggagaaggccaagaagaataacgtgcagttgcatctgccagtggactttgtctgcggcgacaagttcgccgagaacgctgccgtcagcgaggccaccgtggaggccggaattcccgatggacacatgggtctggatgtgggtcccaagacccgtgagctcttcgcggcacccatcgcacgcgccaagctcatcgtgtggaacggaccccccggtgtctttgagttccccaacttcgccaacggcaccaagtccatcatggacggcgtggtggccgccaccaagaacggcaccgtctccatcatcggcggcggcgacactgcctcttgctgcgccaagtggaacacggaggcactcgtctcgcacgtctccaccggaggcggcgcttcgctggagctcctggagggcaagacactgccaggcgtggctgcattgaccagcgcctaa

SEQ ID NO: 57113 - protein, 415 aa, Drosophila melanogaster
MAFNKLSIENLDLAGKRVLMRVDFNVPIKEGKITSNQRIVAALDSIKLALSKKAKSVVLMSHLGRPDGNKNIKYTLAPVAAELKTLLGQDVIFLSDCVGSEVEAACKDPAPGSVILLENVRFYVEEEGKGLDASGGKVKADPAKVKEFRASLAKLGDVYVNDAFGTAHRAHSSMMGDGFEQRAAGLLLNKELKYFSQALDKPPNPFLAILGGAKVADKIQLIENLLDKVNEMIIGGGMAFTFLKVLNNMKIGGSLFDEEGSKIVEKLVEKAKKNNVQLHLPVDFVCGDKFAENAAVSEATVEAGIPDGHMGLDVGPKTRELFAAPIARAKLIVWNGPPGVFEFPNFANGTKSIMDGVVAATKNGTVSIIGGGDTASCCAKWNTEALVSHVSTGGGASLELLEGKTLPGVAALTSA

SEQ ID NO: 57114 - DNA, 1266 bp, Emericella nidulans; identical to SEQ ID NO: 10382
  CDS (1)..(1266)

SEQ ID NO: 57115 - protein, 421 aa, Emericella nidulans; identical to SEQ ID NO: 10383

SEQ ID NO: 57116 - DNA, 1194 bp, Enterococcus faecalis; identical to SEQ ID NO: 10692
  CDS (1)..(1194): transl_table=11

SEQ ID NO: 57117 - protein, 397 aa, Enterococcus faecalis; identical to SEQ ID NO: 10693

SEQ ID NO: 57118 - DNA, 1257 bp, Euplotes crassus
  CDS (1)..(1257): transl_table=10
atgctatctaagaaattgactgttgataagatcccccacatgattaagaacaagagagtcttagtcagagtagactttaatgttccaattaaggatggaaaggttgccgatcctacaagaattgtatctactcttgatacaatcaacttcttaaaggaaaatggtgctaaatccattgtgttgatgagtcatttgggtagaccaaaaggagttagacaagaacaattctcattagctcctgttgtcccagcgcttgaagacattattggccagaaagttaactttttaaacgactgtattggtactgaagttgaaggagaagtggcaaatactaaagatggaaatatcctgcttttggagaatctcagattctacttggaagaggaaggaaaaggagtcataaatggagagaaagtcaaagctgatccaaccaaggttgagtctttcagatcccaactcactagacttggagatctttatgtaaatgatgcttttggaacttgccacagagctcattcctcaatggttggtgtcaatgtggacaccagagctgccggatttttgttaaagaaggaacttgattacttctcaaaagttttagaagatcctaaaagacctctcaccgttattcttggaggagctaaagttgcagataaaattcaactgatcaacaatttgctagacttggcagatgaaatgatcattggtggaggaatggctttcacattcaacaaagtcctgaacaataccccaatcggagcatccctctatgatgaagaaggagctaagactgttcatggcattatggaaaaggcaaaagaaaagggagtaaagattcatattccaagtgattttgtttgtgctgagagctttgcagaagatgctaaatttgcctacaaactgaagatgaaggagtcccaagatggatggttaggtctggacattggagataaaactattcgcagctttgatgaggttattagaagatctaacacccttttctggaatggaccttcaggagtttttgaatggaaaaactttgctaaaggatctcatgcaatgcttcaagctgttactgaatcaaccaagaatggaacagtttctgtatgtggaggaggagataccctcaatcttttgaagcaagtagatggagccaaagagaatatttctcatgttagtactggaggaggtgcctccttagaacttgttgaaggaaaagaacttccaggaatcaaggctttgtctgatatcaactag

SEQ ID NO: 57119 - protein, 418 aa, Euplotes crassus; identical to SEQ ID NO: 10695

SEQ ID NO: 57120 - DNA, 1197 bp, Fusobacterium nucleatum; identical to SEQ ID NO: 10696
  CDS (1)..(1197): transl_table=11

SEQ ID NO: 57121 - protein, 398 aa, Fusobacterium nucleatum; identical to SEQ ID NO: 10697

SEQ ID NO: 57122 - DNA, 1251 bp, Glomus mosseae
  CDS (1)..(1251)
atgtcactttcaaacaaattatcaatacgagacttaaacgtcaaagacaaacgagtcttaatacgagtcgacttcaacgtccccctcgatggcacaaccataaccaacaaccaacgcatcgtcgcagcccttccaacaatcaagtatgcactagaacagaaagccaaaaccgtcgtgttaatgtcacatcttggccgtcctgacggaaagaaggtcgacaagtattcacttgcgccagtggcgaaggaggtcgagagactgcttgggaagaaggtgacgtttttggaggattgcgttggggagggtgtggagaattatgtgaagaatgcctgtgatggggaggttattctcttggagaatttgaggtttcacgctgaggaggaggggagctccaaggggcctgatggcaagaaagttaaggcggatctggaaaaagttaaggagtttagaaggtctttgacggctcttggtgatgtttacatcaatgatgcttttggaaccgcacatcgagcacacagttccatggttggcgtcgaattacctcaaaaagcagccggtttcctcgtcaagaaagaattagagtactttgccaaagcgctcgaatcccccgaacgacctttcctagctattctcggcggtgcaaaggtgtccgataagatccagctcattgataacttgatcgccaaggtagatagtttgatcatttgtggtggtatggcgttcacgttcaagaagacgcttgagaacgtcaagattgggaactcgctatttgacgcggacggcgcgaagaccgttggagaggtcatggagaaggcgaagaagcatgacgttgaggtcgtcttgcctgttgactacattaccgcggataagtttgccaaggacgcgcaagttgggtatgctactgatcaagagggaattcctgatgggtggatgggattggactgcggcgagaagtctgttgagttgtataagcagactattgctaaggcgaagactatcctttggaatgggcctgctggggttttcgagtttgataactttgctaaggggacgaaggctactttggactgcgcagttgaggcagcacaatctggaaagattgtcatcatcggtggtggtgataccgcaactgttgctgcgaaatatggcgttgaggacaagctgagccatgtctcgactggcggtggagcttctttggagttgctcgaaggcaaggatcttcctggtgtctctgctctctcgagtaagtaa

SEQ ID NO: 57123 - protein, 416 aa, Glomus mosseae; identical to SEQ ID NO: 10699

SEQ ID NO: 57124 - DNA, 1224 bp, Gloeobacter violaceus; identical to SEQ ID NO: 10700
  CDS (1)..(1224)

SEQ ID NO: 57125 - protein, 407 aa, Gloeobacter violaceus; identical to SEQ ID NO: 10701

SEQ ID NO: 57126 - DNA, 1176 bp, Haemophilus ducreyi; identical to SEQ ID NO: 10702
  CDS (1)..(1176): transl_table=11

SEQ ID NO: 57127 - protein, 391 aa, Haemophilus ducreyi; identical to SEQ ID NO: 10703

SEQ ID NO: 57128 - DNA, 1197 bp, Halobacterium sp; identical to SEQ ID NO: 10424
  CDS (1)..(1197): transl_table=11

SEQ ID NO: 57129 - protein, 398 aa, Halobacterium sp; identical to SEQ ID NO: 10425

SEQ ID NO: 57130 - DNA, 1206 bp, Haloarcula vallismortis; identical to SEQ ID NO: 10478
  CDS (1)..(1206): transl_table=11

SEQ ID NO: 57131 - protein, 401 aa, Haloarcula vallismortis; identical to SEQ ID NO: 10479

SEQ ID NO: 57132 - DNA, 1209 bp, Helicobacter hepaticus; identical to SEQ ID NO: 10704
  CDS (1)..(1209): transl_table=11

SEQ ID NO: 57133 - protein, 402 aa, Helicobacter hepaticus; identical to SEQ ID NO: 10705

SEQ ID NO: 57134 - DNA, 1209 bp, Helicobacter pylori J99
  CDS (1)..(1209): transl_table=11
atgttagctaaaatgtcgtttatgcaaaacgttaaaaacattcaagaggtggatgtcaatcataaaagggtgcttattagagtggattttaacgtgcctttagatgaaaatttgaatatcactgatgacacacgcattagagagagcttgcccaccatccaattttgtattgacaataaggctaaagatattattttagtgagccatttgggccgccctaaaggggttgaagaaaaattgagcttgaagccctttttaaaacgccttgaaagactcttaaatcatgaagtggttttttctcaaaatatcgcgcaactcaagcaagccttaaacgaaaacgcgcccacaaggatttttcttttagaaaacatccgctttttaaaaggcgaagaagaaaatgatgaaaatctggctaaagatttagcgagcttgtgcgatgtgtttgtgaatgacgcttttggcacgagccacagaaaacatgccagcacttatggcaccgccaaattcgctcccataaaagtgagcgggtttttgcttaaaaaagaaattgattcgttttatcaagcgtttaaccaccctttacgccctttattgttgattgtggggggggctaaggtcagctccaaactcactttattaaaaaacattttagatctcattgacaagctcatcattgccggggcgatgagcaacaccttcttaaaagccttaggctatgatgtgcaggattcttctgtggaagacgccctaatcaatgacgccctagaattattgcaaagcgcgaaagaaaaaaaagtcaaagtctatttgcctatagacgccgtaaccactgatgacattcttaaccccaaacacatcaaaatttcacccgtccaagacattgagcctaaacacaaaatcgctgatatagggcctgcgagcctgaaattattttctgaggtcatagagagcgcgcccaccattttatggaatggccccttaggcgtgcatgaaaagcaagaattcgctagaggcacaacctttttagcccacaagatcgctaacacttacgctttctcgctcattggggggggcgacaccattgatgcgatcaatcgcgcgggcgaaaaggataacatgagctttatctctaccggtgggggggcgagcttggaactattagagggcaaaattttaccttgttttgaggttttggacaaacgccattaa

SEQ ID NO: 57135 - protein, 402 aa, Helicobacter pylori J99
MLAKMSFMQNVKNIQEVDVNHKRVLIRVDFNVPLDENLNITDDTRIRESLPTIQFCIDNKAKDIILVSHLGRPKGVEEKLSLKPFLKRLERLLNHEVVFSQNIAQLKQALNENAPTRIFLLENIRFLKGEEENDENLAKDLASLCDVFVNDAFGTSHRKHASTYGTAKFAPIKVSGFLLKKEIDSFYQAFNHPLRPLLLIVGGAKVSSKLTLLKNILDLIDKLIIAGAMSNTFLKALGYDVQDSSVEDALINDALELLQSAKEKKVKVYLPIDAVTTDDILNPKHIKISPVQDIEPKHKIADIGPASLKLFSEVIESAPTILWNGPLGVHEKQEFARGTTFLAHKIANTYAFSLIGGGDTIDAINRAGEKDNMSFISTGGGASLELLEGKILPCFEVLDKRH

SEQ ID NO: 57136 - DNA, 1251 bp, Kluyveromyces lactis
  CDS (1)..(1251)
atgtctttgagttcaaaattgactgtcaaggatttggatgtcactggtaaaagagtgttcatcagagttgatttcaacgtcccattggacggtaagaagatcacttccaaccaaagaattgtagcagctctgcctactattcaatacgttttggaaaagaagccaaaggccattgtcttggcctctcatttgggtagaccaaacggtgaagttaacgacaaatactcattggctccagttgccgatgaattgtctagactattgcaaaagccagttactttcttgcatgactgtgttggtgaagaagtcaccaatgccgttaacaacgctaaggacggtgaagttttcctattggaaaacttgagattccacatcgaagaagaaggttccagaaaggtggatggtaacaaggttaaggctgacaaggctgctgttaccaaattcagagaacaattgagttctttggccgatgtttacgttaacgatgccttcggtaccgctcacagagctcactcttccattgtcggtttcgacttgccaaacagagctgccggtttcttgttgtccaaggaattgcaatactttgctaaggctttggaaaacccaaccagaccattcttggctatcttgggtggtgctaaggttgcagacaagattcaattgatcgacaatttgttggacaaggtcgattctttgatcattggtggtggtatggctttcaccttcaagaaggtcttggaaaacactgaaatcggtgactccatctacgatgctgctggtgccgaattggttccaaagttggtcgaaaaggctaagaagaacaacgtcaagatcgtcttgccaactgacttcgtcattggtgacaagttctctgctgatgctaacacaaaggttgtcaccgacaaggaaggtattccaagcggctggcaagggttggacaacggtccagaatctagaaaggctttcgctgccactgttgctgaagctaagactatcgtctggaacggtccaccaggtgtcttcgaatttgctcctttcgctaagggtaccgaagctctattggacgccgttgtcgcctcctctcaagctggtaacaccgtcatcatcggtggtggtgacaccgctaccgtcgccaagaagtacggtgtcgtcgacaagatctctcacgtctccactggtggtggtgcttctttggaattgttggaaggtaaagaattgcctggtgtcactttcttgtccaacaagcaataa

SEQ ID NO: 57137 - protein, 416 aa, Kluyveromyces lactis
MSLSSKLTVKDLDVTGKRVFIRVDFNVPLDGKKITSNQRIVAALPTIQYVLEKKPKAIVLASHLGRPNGEVNDKYSLAPVADELSRLLQKPVTFLHDCVGEEVTNAVNNAKDGEVFLLENLRFHIEEEGSRKVDGNKVKADKAAVTKFREQLSSLADVYVNDAFGTAHRAHSSIVGFDLPNRAAGFLLSKELQYFAKALENPTRPFLAILGGAKVADKIQLIDNLLDKVDSLIIGGGMAFTFKKVLENTEIGDSIYDAAGAELVPKLVEKAKKNNVKIVLPTDFVIGDKFSADANTKVVTDKEGIPSGWQGLDNGPESRKAFAATVAEAKTIVWNGPPGVFEFAPFAKGTEALLDAVVASSQAGNTVIIGGGDTATVAKKYGVVDKISHVSTGGGASLELLEGKELPGVTFLSNKQ

SEQ ID NO: 57138 - DNA, 1212 bp, Lactobacillus delbrueckii
  CDS (1)..(1212): transl_table=11
atggctaaattgattgtttctgacgtagacgttaaggacaagaaggttttggttcgcgttgacttcaacgtgccgattaaggacggcgttatcggcgacgacaaccgtatcgtggctgctttgccaactatcaagtacatcatcgaaaacggcggcaaggctatcttgctttcccaccttggccggatcaagagcgatgaagacaagaagagcttgagcttggctccagttgccaaacgtttgggcgaattgcttgaaaagcctgtaactttcgtaccttcaaacgaaggcaaggaagttgaagacgccatcaacaacatgaaggacggcgacgtagttgttttggaaaacacccgtttccaagacatcgacaacgacttcggcaagcgtgaatcaaagaacgaccctaagctgggcgaatactgggcatcattgggtgacgttttcgtaaacgacgccttcggtactgctcacagaagccacgcttcaaacgttggtatcgctacggccatgaaggctgccggcaagccagcagctgctggtttcctgcttgaaaaggaaatcaagttcctgggcaacgctgttgctaacccagttcacccattcgtaactattcttggcggggctaaggtttctgacaagatcggcgttatcaccaacttgattccaaaggctgaccacatcatcatcggtggtggtatggcttacaccttccttaaggctcaaggccacaatatcggcaagtccctggttgaagacgacaaggttgaatttgccaaggaattgctggaaaaggctggcgacaagctggttctgccaatcgacaacgtagccgcaactgaattcaacaacgatgctgcttcagaagttgttggccaagacatcccagacaacgaaatgggcttggacatcggtcctaagactattgaactcttcaagaagactcttgaaggtgccaagactgttgtttggaacgggccaatgggcgtcttcgaaatgccaaacttcgccaagggtactttggaagttggccgtgctttggctgacttgccagacgctactactattgtcggcggtggtgactcaactgctgctgctaagcaattggggatcgctcctaagttgactcacatctcaactggtggtggtgcatctcttgaataccttgaaggtaaggaattgccaggtatcgcttgcgtttcagacaagtag

SEQ ID NO: 57139 - protein, 403 aa, Lactobacillus delbrueckii
MAKLIVSDVDVKDKKVLVRVDFNVPIKDGVIGDDNRIVAALPTIKYIIENGGKAILLSHLGRIKSDEDKKSLSLAPVAKRLGELLEKPVTFVPSNEGKEVEDAINNMKDGDVVVLENTRFQDIDNDFGKRESKNDPKLGEYWASLGDVFVNDAFGTAHRSHASNVGIATAMKAAGKPAAAGFLLEKEIKFLGNAVANPVHPFVTILGGAKVSDKIGVITNLIPKADHIIIGGGMAYTFLKAQGHNIGKSLVEDDKVEFAKELLEKAGDKLVLPIDNVAATEFNNDAASEVVGQDIPDNEMGLDIGPKTIELFKKTLEGAKTVVWNGPMGVFEMPNFAKGTLEVGRALADLPDATTIVGGGDSTAAAKQLGIAPKLTHISTGGGASLEYLEGKELPGIACVSDK

SEQ ID NO: 57140 - DNA, 1197 bp, Lactococcus lactis; identical to SEQ ID NO: 10436
  CDS (1)..(1197): transl_table=11

SEQ ID NO: 57141 - protein, 398 aa, Lactococcus lactis; identical to SEQ ID NO: 10437

SEQ ID NO: 57142 - DNA, 1203 bp, Lactobacillus plantarum
  CDS (1)..(1203): transl_table=11
ttggctaaattaatcgtttcagatttagatgttaaagataaaaaagttttaattcgtgtcgactttaatgttccaattaaagacggcaaaattggtgacgacaaccggatcgtcgctgccttaccaacgatcaaatacgtgattgaacatgatggcaaagccatcttattctcacatttaggtcggattaagagcgaagacgacaagaagggcttaagcttacgtcctgttgcagaacgtctttcaaacttattaaacaagcctgttaccttcgtccctgttactgaaggcgaacaacttgaaactgccatcaacaacatgaacgacggtgacgtcttagttgttgaaaacactcgttttgaagacgttgttaacggcgaacaagttaagcgcgaatctggtaacgatcctgaattaggcaagtactgggcttcacttggtgatgtctacgtcaacgatgctttcgggactgctcaccggagccatgcttctaacgttgggattgcttcaaacatggatcaagttgccgctggtttcttaatggaaaaggaaatcaagttcttaggtgacgcggttgacaatcctaagcacccattcgttgctatcttaggtggtgccaaggtttctgataagatcggtgttatcgatcacttaatcagcaaagctgacaagatcatcatcggtggtgggatgacttatacgttctatgctgctaaaggcatgggcattggtaactcacttgttgaaaaagacaagattgaattggctaagtcaatcatcgaaaaagctggcgacaagttagtcttacctagcgactcaatcgttgctgaaaagtttgataacgatgttcctagcaaggttgttgaaggttcaattcctgatggctacatggccttagatattggtcctaagtcaatcgaagaattcgaagatgttttacgcgacgctaagaccgttgtttggaacggaccaatgggtgtcttcgaaatgagcaactacgccaagggtacgcttgaaattggtaagttcttaggaaccttatcagacgcaacgaccatcgttggtggtggggactcaactgccgctgttaagcaacttggcgttggcgacaagttaacccacatttctactggtggcggtgcttcacttgaataccttgaaggtaaggaattacctggtattgctgctatttctgaaaaataa

SEQ ID NO: 57143 - protein, 400 aa, Lactobacillus plantarum; identical to SEQ ID NO: 10711

SEQ ID NO: 57144 - DNA, 1191 bp, Leptospira interrogans; identical to SEQ ID NO: 10712
  CDS (1)..(1191): transl_table=11

SEQ ID NO: 57145 - protein, 396 aa, Leptospira interrogans; identical to SEQ ID NO: 10713

SEQ ID NO: 57146 - DNA, 1191 bp, Leptospira interrogans
  CDS (1)..(1191): transl_table=11
atggaattacctagacttgaaaatgtagatctctcaggaaagagagttttcctgagagtagattttaacgttccagtagaaaatggaaaagttacagacaaaactagaattgaaaagactcttcctacaatcgaacttctgattaaaaaaggcgcaaggataattattgcgagtcacttaggaagacccaaaggacaagtaaatcctgaattttctttggcgccagtagttgaaactttccaaagtcttgtaaaatctaaagtttatttttctaagacagtaatcggagaagacgcgattaaactttctaaagaacttaaaaacggcgaaattttagtaattgaaaacgttcgttttcataaagaagaagaggaaaatgatcctggtttttccaaaaaactctctgcgttagccgacatctatgtgaacgacgcttttggcgcggctcacagagcgcattcctccaccgaaggaatcgcacgtctacttcctgcatatgcaggtcttctaatgcacaaagagatcttagaactttctgcgcttctgcataaaccggctcgtccatttgtggcgatcataggaggttccaaagtttccactaagatcaaggtcctaaccaatctattcgacaaggtaaatcatcttctcattggtggtggaatggcttatacgtttttaaagtccagagcgatccctattggaaattcactcgtggaaaaagaattcgaagttcaagcctttcagttaatcgaaaaagcaggcgtcgccggtatcgatttacaacttccggtagatcacatcattggagatcagtttaacgaaaaggcaaagaccaagtccgtagataagatgggaattttagacggttggatgggaatggatataggttctaaaacggtttctaactacgaaaagattattaaaaacgctggtacgattttttggaacgggcccatgggtgtttttgaaatggataaatttgcgagtgggactatggcaatcgccaaagcagtcgctaaatccaaggcaaaaacagttgtaggtggaggagattccatcgctgcaatcaacaaagctggagttgcagataaaattactcatatctcaactggcggtggagcttccctcgaatttatggaaggtagaaaacttccaggagtagaagcccttaagaaaaaaacttccgagtaa

SEQ ID NO: 57147 - protein, 396 aa, Leptospira interrogans
MELPRLENVDLSGKRVFLRVDFNVPVENGKVTDKTRIEKTLPTIELLIKKGARIIIASHLGRPKGQVNPEFSLAPVVETFQSLVKSKVYFSKTVIGEDAIKLSKELKNGEILVIENVRFHKEEEENDPGFSKKLSALADIYVNDAFGAAHRAHSSTEGIARLLPAYAGLLMHKEILELSALLHKPARPFVAIIGGSKVSTKIKVLTNLFDKVNHLLIGGGMAYTFLKSRAIPIGNSLVEKEFEVQAFQLIEKAGVAGIDLQLPVDHIIGDQFNEKAKTKSVDKMGILDGWMGMDIGSKTVSNYEKIIKNAGTIFWNGPMGVFEMDKFASGTMAIAKAVAKSKAKTVVGGGDSIAAINKAGVADKITHISTGGGASLEFMEGRKLPGVEALKKKTSE

SEQ ID NO: 57148 - DNA, 1230 bp, Methanobacterium bryantii
  CDS (1)..(1230): transl_table=11
atgtcccttccattttataccatagatgactttaatttagaagataagactgttcttgtgagagttgatataaattcgcctgtagatccaagtacaggttctattttagatgacacaaaaataaaattacacgccgaaaccatagatgaaatttcaaagaagggtgcaaaaacagttgtgctggctcatcaaagtaggcctggaaaaaaggactttactacgctccaacagcatgcaaaagcactttcaaacattttaaatcgtcctgtggattatattgatgatattttcggcactgctgcaagggaagaaataaagagactgaaaaaaggagatattctcctccttgaaaatgtcagattttatcctgaagaaatcttaaaaagagatccccaccagcaggctgaaacacacatggttcgtaaattatatcccattatcgacatctttataaacgatgcatttgcagctgcccatagatcacaaccttcactggttggttttgcagtgaagctgccgtcaggtgcaggtagaataatggaaaaagaacttaagtcactttatggggctgttgataatgctgaaaagccttgcgtttatgtactaggcggagtgaaagtagacgactccataatggtcctggaaaacgttttaagaaatggcagtgccgattatgtacttacaacaggtcttgttgccaacattttcctgtgggcttcaggaataaatctaggaaaatataatgaagactttattataaataaaggatacattgactttgtggaaaaaggcaaacagctgcttgaagaatttgatgggcagattaagatgcctgatgatgttgcggtttgtgtagataatgcaagagtagaatactgtactaaaaatattccaaacaaaccaatatatgatattggaaccaataccatcacagagtatgctaaatttataagagatgccaaaactatatttgcaaatggacctgcaggtgtttttgagcaagaaggttttagcattggtacggaagacattctaaatacaatagcatcatctaatggatactccataattggaggaggccatttagctgctgcagctaatcaaatgggtttatcatcaggaataacccatataagtagtggtggtggagcatctataaatttacttgctggtgaaaaacttcctgttgttgaaatactcactgaagtaaaaatgaaaggtagaaaatag

SEQ ID NO: 57149 - protein, 409 aa, Methanobacterium bryantii
MSLPFYTIDDFNLEDKTVLVRVDINSPVDPSTGSILDDTKIKLHAETIDEISKKGAKTVVLAHQSRPGKKDFTTLQQHAKALSNILNRPVDYIDDIFGTAAREEIKRLKKGDILLLENVRFYPEEILKRDPHQQAETHMVRKLYPIIDIFINDAFAAAHRSQPSLVGFAVKLPSGAGRIMEKELKSLYGAVDNAEKPCVYVLGGVKVDDSIMVLENVLRNGSADYVLTTGLVANIFLWASGINLGKYNEDFIINKGYIDFVEKGKQLLEEFDGQIKMPDDVAVCVDNARVEYCTKNIPNKPIYDIGTNTITEYAKFIRDAKTIFANGPAGVFEQEGFSIGTEDILNTIASSNGYSIIGGGHLAAAANQMGLSSGITHISSGGGASINLLAGEKLPVVEILTEVKMKGRK

SEQ ID NO: 57150 - DNA, 1233 bp, Methanothermus fervidus
  CDS (1)..(1233): transl_table=11
ttgttcaaattctatacgatggatgattttgattattctgggagcagagtgcttgtaagagtagacattaattctccagtagatcctcatactggacgtatacttgatgatacgagaatgagactacattcaaaaacactcaaagaactagtagatgaaaatgcaaaggtagctattttagcacatcaaagtaggccaggaaaaagagatttcacaacaatggaagagcatagtaaagtattatccaatatattagatatgcctgttacatatgttgaggatatatttggttgtgctgcacgagaatcaataagaaatatggaaaatggagatatcatccttttagaaaatgtacgtttttattcagaagaagttttaaaaagagatcccaaagttcaggcagaaacacaccttgtaagaaaattatcaagtgttgttgattattatataaatgatgcttttgcagctgctcatagatcacaaccatcattagttggatttccgcttaaactaccttctgctgcaggaagattaatggaaagagaagttaaaacattgtataaaataattaaaaacgttgaaaagccatgtgtttatattcttggaggtgttaaaattgatgattcaataatgataatgaaaaatattttaaaaaatggttctgctgattatattctaacatctggtttggtggcaaatgtatttttagaggcttctgggatagatattaaagaaaagaacagaaaaatattgtatagaaaaaattataaaaaatttataaaaatggcaaaaaaacttaaagataaatatggggagaagatacttacccctgttgatgttgccataaataaaaatggaaagagaattgatgtacctattgatgatattcctaactttccaatatatgatataggcatggaaactataaaaatatatgcagaaaaaataagagaggcaaaaacaatttttgctaatggaccagcgggtgttttcgaagaacaacaatttagtataggaactgaagatttgttaaatgcaatagcatcatccaacgcattttcagttatagcaggaggtcatttagcagcggctgcagaaaaaatgggtatttcaaataaaataaatcatattagtagtggaggcggggcttgtatagcatttctttctggcgaagagctccctgcaattaaagttcttgaagaagctagaaaaaggagcgataaatatatatag

SEQ ID NO: 57151 - protein, 410 aa, Methanothermus fervidus
MFKFYTMDDFDYSGSRVLVRVDINSPVDPHTGRILDDTRMRLHSKTLKELVDENAKVAILAHQSRPGKRDFTTMEEHSKVLSNILDMPVTYVEDIFGCAARESIRNMENGDIILLENVRFYSEEVLKRDPKVQAETHLVRKLSSVVDYYINDAFAAAHRSQPSLVGFPLKLPSAAGRLMEREVKTLYKIIKNVEKPCVYILGGVKIDDSIMIMKNILKNGSADYILTSGLVANVFLEASGIDIKEKNRKILYRKNYKKFIKMAKKLKDKYGEKILTPVDVAINKNGKRIDVPIDDIPNFPIYDIGMETIKIYAEKIREAKTIFANGPAGVFEEQQFSIGTEDLLNAIASSNAFSVIAGGHLAAAAEKMGISNKINHISSGGGACIAFLSGEELPAIKVLEEARKRSDKYI

SEQ ID NO: 57152 - DNA, 1254 bp, Methanococcus jannaschii; identical to SEQ ID NO: 10386
  CDS (1)..(1254): transl_table=11

SEQ ID NO: 57153 - protein, 417 aa, Methanococcus jannaschii; identical to SEQ ID NO: 10387

SEQ ID NO: 57154 - DNA, 1221 bp, Methanopyrus kandleri; identical to SEQ ID NO: 10714
  CDS (1)..(1221): transl_table=11

SEQ ID NO: 57155 - protein, 406 aa, Methanopyrus kandleri; identical to SEQ ID NO: 10715

SEQ ID NO: 57156 - DNA, 1251 bp, Methanosarcina mazei
  CDS (1)..(1251): transl_table=11
gtgctgagggtaatgacttccagaaactttcttacgatcgatgattttgacatacgcggaaagacgattcttttaagggtcgacatgaactctcctatggacactcagggtcacattctggacgatatgaggatcaggagtcatattgccactcttaaagaccttgagagtgcaaaagtcgttgtgcttgcgcaccagagccggcctgggaaaaaagacttcaccactatgaaacctcatgctcacctgctgtccaggtatctgggcaggcaagttacttatgtggacgacatcttcgggacttttgcgaagactcagatcgcttctatggaagacggggacgtcatcatgctcgaaaacgtcaggttctattctgaagagagcctcgagaggactacagccgagcaggccaatacttttatggttaaaaaactggcaccctttgttgatattttccttaatgacgcgtttgcggtatctcacaggtctcatctctctgttgtaggctttaccgaagtcctcccttccggagcaggcagggtaatggaaaaagaacttatttccctggaaaaaggagttaaaagtggagagaggccaagcgttttcgtgctggggggggcaaaagtggacgactcacttagagtaaccgaaaatgtcctcacaaacgggggagctgacagagtcctccttacaggggtagttgcaaacgttgcccttgccgcttccggagtaaatataggaaaagccaatctggatttcattaaatcccagggctacgaagaccagatagaaagggcgagaggtttgcttgcgaagttcgaagataaaatcggacttccgaaagacgttgctttaaatgataacaaaaagcgtgttgaagctcctatttccgaacttaattccgattctctgcccattaacgatataggtcttgaaaccattgtggactacaccaatgaaatccagaatgccaaaacagttgtcctgaacggccctgccggggtttcagagattgaggactttgccctcggaacccatgaaattataaaagctgctattaaatccgatttctctatcattggcggcgggcatatctctgtggaagttgcacacctcgggcttgaacaccgcttttcacacataagcactggaggaggagcctgtattgatttccttgcaggggaaaagctgccaggcgtcgaagctctcaaggctgcttacaataagtatcaggaagctaaaaagctttaa

SEQ ID NO: 57157 - protein, 416 aa, Methanosarcina mazei; identical to SEQ ID NO: 10717

SEQ ID NO: 57158 - DNA, 1236 bp, Methanobacterium thermoautotrophicum
  CDS (1)..(1236): transl_table=11
ttgatggtgatcccggtgtcctttaaatttaaaaccatggatgacattgaagtcacaggaaagacagtccttgtccgcgtggacataaattcgcctgtggaccccaatgatgggacaatactcgatgatacaaggatgaggctccatgcagagaccataagggaactctcagataggggtgccaggacagttgtgatggcccaccagagcagacccgggaagaatgacttcacaacactggagcagcatgccagggcgctctccgggatactcaggaggcccgttaagtacgttgaggatatattcggatccgctgcaagggagaacatctcaggactgggtgatggtgagataatcctccttgagaacgtccgcttctactccgaggaggtgctcaagcgagaccctgaggaacaggcggagacacaccttgttaggaagctggcgcccctcctggactacttcatcaacgacgccttcgcggcagcccacaggtcccagccctcccttgttggcttcgccctgagggtaccgtcagctgcgggtcgtgtgatggagagggaacttcgaacacttcagggtgcccttgagaatgttgaaaggccctgtgtctatgttctcggcggggtgaaggttgatgactccatcatggtcatgaagaacgtccttgaaaacggtagcgcagaccttgtactgacaacgggccttgttgccaacatattcctggcgggatgcggggttaagatcggtaaggtgaacatggacttcatcaagagcaggggatactgtgacttcatcaaggtggcgaagaaactgaagaagcgcttccctgaaaggatagttgtacccgttgatgttgcagtatgcagggacggcaagagggttgatgttcctgtgaaaaagatacccaaccatccgatacaggatatcggaatggaaaccataaagctctacgccaggaggatacgtgaggcaaggaccctctttgccaatggaccggcaggcgtatttgagaaccctgatttcagcataggaaccgaggacatactgaatgcaatatcctcttcagaaggtttctcaataatcggcgggggtcaccttgctgctgcagcagtgaagatgggctttgaggacagcataaaccatatcagcagtggaggcggtgccagcataagcctccttgcaggtgaggagcttcccgcagtcagggtgcttgaggaatccaggcacccataa

SEQ ID NO: 57159 - protein, 411 aa, Methanobacterium thermoautotrophicum; identical to SEQ ID NO: 10409

SEQ ID NO: 57160 - DNA, 1242 bp, Mycoplasma gallisepticum; identical to SEQ ID NO: 10720
  CDS (1)..(1242): transl_table=4

SEQ ID NO: 57161 - protein, 413 aa, Mycoplasma gallisepticum; identical to SEQ ID NO: 10721

SEQ ID NO: 57162 - DNA, 1251 bp, Mycoplasma genitalium
  CDS (1)..(1251): transl_table=4
gtgctaagctctaatatgcttaatttcaaaacactccaagcaattgattttcaaaacaaaaccgttgttttaagaagtgattttaatgtcccaatgatcaatggggttattagtgatagtgaaagaattttagctggtttggatactattaagttcttagttaaaaagaactgcaagatagtgctactatcacacctttcaaggattaagagtttagaagataaactaaacaacaaaaaatctttaaagccggttgctgaattactccaacaactcttaccaactgtaaaggttcaattttcttgtaaaaacactggtgctgaagttaaacaaaaagtgcaagcattagcattcggtgaaatccttctccttgaaaacactcgctattgtgatgtaaacgataaaggagaaattgttaaattagaaagtaaaaatgatcctgaactagcgaaattctgggctagtttaggggaaatttttgttaatgatgcatttggtactgcccatagaaaacatgcttctaatgcaggaattgcaaagtatgttgcaaaatcctgtattgggtttttaatggaaaaagaactaaagaacctctcttacctaattcaaagcccacaaaaaccctttgttgttgttttgggtggtgcgaaagtatcagataaactaaaggtagttgaaaacttactaaaacttgctgataatatcttaattggcggagggatggtaaatacctttcttaaagcaaaaggcaaagctactgctaattccctagttgaaaaagagttaattgatgttgctaagcaaatcttggataaagatactcataataagattgtgctggcaattgatcaggtaatgggttctgaatttaaagatcaaactggcattactttagatgttagtgacaaaattcaagaacaatatcaatcctatatgtctctagatgttggatctaaaacaattgctttatttgaaagttatttaaaaacagccaaaactatcttttgaaacggtccccttggagtttttgaatttactaactttgctaaaggaacttcaaaaatcggtgagattattgctaaaaataaaactgcttttagcgttattggtggtggggattcagctgcagcagttaagcaaatgcaactatctgatcagtttagttttatctccactggtggtggtgcttctttagcactaattggtggggaagagttagtaggtattagcgatattcaaaaaaattcttaa

SEQ ID NO: 57163 - protein, 416 aa, Mycoplasma genitalium
MLSSNMLNFKTLQAIDFQNKTVVLRSDFNVPMINGVISDSERILAGLDTIKFLVKKNCKIVLLSHLSRIKSLEDKLNNKKSLKPVAELLQQLLPTVKVQFSCKNTGAEVKQKVQALAFGEILLLENTRYCDVNDKGEIVKLESKNDPELAKFWASLGEIFVNDAFGTAHRKHASNAGIAKYVAKSCIGFLMEKELKNLSYLIQSPQKPFVVVLGGAKVSDKLKVVENLLKLADNILIGGGMVNTFLKAKGKATANSLVEKELIDVAKQILDKDTHNKIVLAIDQVMGSEFKDQTGITLDVSDKIQEQYQSYMSLDVGSKTIALFESYLKTAKTIFWNGPLGVFEFTNFAKGTSKIGEIIAKNKTAFSVIGGGDSAAAVKQMQLSDQFSFISTGGGASLALIGGEELVGISDIQKNS

SEQ ID NO: 57164 - DNA, 1215 bp, Mycoplasma hyopneumoniae; identical to SEQ ID NO: 10722
  CDS (1)..(1215): transl_table=4

SEQ ID NO: 57165 - protein, 404 aa, Mycoplasma hyopneumoniae; identical to SEQ ID NO: 10723

SEQ ID NO: 57166 - DNA, 1251 bp, Mycobacterium leprae
  CDS (1)..(1251): transl_table=11
gtgcgcattcctaatcttaaagatcttcttgaggaaggtgtttctggtcgctgcgtgttggtgcgctgcgatctgaacgtcccgctgggggatgatggcgccatcaccgacctcggtcgggtcaccgcgtcggtgcctacgttgaaagcgctgcttgaggccggagccaagattgtggttgccgcccatctgggccgccccaagaacgggccagacccaaagctgtcactggagccggtcgccgcggcgctcggtgagcagctgggccaaaacgtccagttggtctgcagcaccgatcgttcccctgtcgggggtgatgcgctcgcctgtgttgagaggctgaccgacggcgacctcctactgctgcagaacatccgcttcgatccgcgcgagaccagcaaagtcgacgacgaacgactcgctctggccaagcaattggttgaattggtcgggtcagcaggagcttttgtttcggatggattcggtgtggtgcatcgcaggcaggcttcggtgtatgacgtcgctacgctattgccgcactacgccggcatactggttgctgacgagataaggatactcgagcaattgactagttcggccaaacgcccctacgcagtggtgctcggcgggtcgaaggtatccgacaagctcggcgtcatcgagtcgctggcgacaaaagccgatagcatcgtactcggaggtggaatgtgctttacatttcttgctgcacaaggattttcagtaggtaaatcgttattggaaaccgagatgatcgagacctgtcgtagtctgttggacacctacgctgacgtgcttcggcttcctatggacattgtggtgacagagaagttcgtcgctgattcgccgccgcagaccgtcgccgccgacgctatcccagatggattgatgggactggatatcgggccggaatcggtcaagcggttcgctacgttgttatccaacgcctcgaccattttctggaacggaccgatgggcgtgttcgaattccctgcgtacgccgcgggcaccagaggtgttgctgaagcaatcgtggctgttactggcaagggagctttcagcgtggtcggcggcggtgactctgcggctgcgatgcgggcgctcagcctacccgaaggcagtgtctcgcacctttccaccggtggcggcgcgtcgttggaataccttgagggcaagacgctacccgggatcgaggtactaggtcgtgagcagccaaggggaggagactcgtga

SEQ ID NO: 57167 - protein, 416 aa, Mycobacterium leprae; identical to SEQ ID NO: 10483

SEQ ID NO: 57168 - DNA, 1215 bp, Mycoplasma mycoides; identical to SEQ ID NO: 10724
  CDS (1)..(1215): transl_table=4

SEQ ID NO: 57169 - protein, 404 aa, Mycoplasma mycoides; identical to SEQ ID NO: 10725

SEQ ID NO: 57170 - DNA, 1230 bp, Mycoplasma pneumoniae; identical to SEQ ID NO: 10484
  CDS (1)..(1230): transl_table=4

SEQ ID NO: 57171 - protein, 409 aa, Mycoplasma pneumoniae
MVDFKTVQAFDFQGKTVVLRADLNVPMKDGVITDNERILASLDTIKYLLGHNCKIVLLSHLSRVKSLDDKKGKKSLQPVASALQNLLKNTKVHFCPENTGDKVKVAVNQLPLGEILVLENTRYCDVNEAGEVVKHESKNNAELAQFWASLGDIFVNDAFGTAHRRHASNAGIAKYIKNSCIGLLMERELINLYRLINNPPKPFVVVLGGAKVSDKLQVVNNLFKIADHILIGGGMVNTFLKALGNEVGTSLVEEDLVQTAKQILDSDKDKKIVLGVDQMLHASFKDEPGVECVVAPQWPAELQGFMSLDVGSKTVALFSSYLAKAKTIFWNGPMGVFEFSNYAQGTLAIGKAIAQNQQAFSVIGGGDSAAAAKQLQIADQFSFISTGGGASLALIGGEELVGISDIQKK

SEQ ID NO: 57172 - DNA, 2316 bp, Mycoplasma pulmonis; identical to SEQ ID NO: 10440
  CDS (1)..(2316): transl_table=4

SEQ ID NO: 57173 - protein, 771 aa, Mycoplasma pulmonis; identical to SEQ ID NO: 10441

SEQ ID NO: 57174 - DNA, 1179 bp, Neisseria meningitidis
  CDS (1)..(1179): transl_table=11
atggcatttttaaaactgaccgaacaaaacgtgcagggcaaaaccgtcctcatccgcgccgatatgaacgtgccgttcaaagacggcaaaatcagcgacgacacccgtatccgcgcctcgattgcgtccgttaaatactgcgtggacaacggcgcgtccgtcattgtgatgacccacttgggccgcccgaccgaaggcgaattccatcccgaagacgacgttgcgcccgttgccgcacacttgggcagcctgttgggcaaagacgtgaaagtattgaacgactggcgcgaaaacaaaccggctttgaacgcgggcgatgtcgtgatgctgcaaaacgtgcgtatcaacaaaggcgagaagaaaaacgatttggaactgggcaaagcctacgcttctttgtgcgacgtgttcgtcaatgacgcgttcggcaccgcgcaccgcgcccaagcctcgaccgaagccgtcgctcaagccgcgcccgttgcctgcgccggcgtattgatggcgggcgaactcgacgctttgggcaaagccctgaaacagcctgcacgcccgatggttgccatcgttgccggcagcaaagtgtccaccaagttgaccattctcgaatcgctggcggacaaagtcgaccaactcatcgtcggcggcggcatcgccaacaccttcctgttggcagaaggcaaagccatcggcaaatctttggcggaacacgatttggtggaagaatccaaaaaaattatggcgaaaatggcggctaaaggcggctccgtaccgctgccgaccgatgtcgtcgttgccaaagcctttgccgccgatgccgaagcggtcgtgaaagacattgccgacgttgccgaagacgatatgattttggacatcggcccgaaatccgccgccgcgcttgccgatttgcttaaagccgccgacacggtcgtttggaacgggccggtcggcgtgttcgagtttgaccaattcgcaggcggtacgaaagcccttgccgaagccattgcccaaagcaaagcgttctcgattgcgggcggcggcgacacgctggcagcgattgccaaattcggcgttaccgaacaaatcggctacatctccaccggaggcggcgcgttccttgagttcttggaaggcaaagagctgcctgccgtagctgctttggaaaaacgcggcgcgtaa

SEQ ID NO: 57175 - protein, 392 aa, Neisseria meningitidis
MAFLKLTEQNVQGKTVLIRADMNVPFKDGKISDDTRIRASIASVKYCVDNGASVIVMTHLGRPTEGEFHPEDDVAPVAAHLGSLLGKDVKVLNDWRENKPALNAGDVVMLQNVRINKGEKKNDLELGKAYASLCDVFVNDAFGTAHRAQASTEAVAQAAPVACAGVLMAGELDALGKALKQPARPMVAIVAGSKVSTKLTILESLADKVDQLIVGGGIANTFLLAEGKAIGKSLAEHDLVEESKKIMAKMAAKGGSVPLPTDVVVAKAFAADAEAVVKDIADVAEDDMILDIGPKSAAALADLLKAADTVVWNGPVGVFEFDQFAGGTKALAEAIAQSKAFSIAGGGDTLAAIAKFGVTEQIGYISTGGGAFLEFLEGKELPAVAALEKRGA

SEQ ID NO: 57176 - DNA, 1257 bp, Neurospora crassa
  CDS (1)..(1257)
atgtctctctccaacaagctctccatcgaggacgtcgacctcaagggcaagcgcgtcctcatccgtgtcgacttcaacgtcccccttgacgccgagaagaaggtcaccaacccccagcgcatcgccggtgccattcccaccatcaagtatgcgctcgaccatggcgccaaggccgttgtcctcatgtctcaccttggccgtcccgacggcaagcccaaccccaagtactccctgaagcccgttgttcctgagctcgagaagctcctcggcaagaaggtcaccttcgcccccgactgcgttggtcccgaggttgaggagatcgtcaacaaggccgacaacggtgaagttattctccttgagaacctccgcttccacattgaggaggagggcaagggcaccgatgccgagggcaacaaggtcaaggccgacaaggccaaggttgaggagttccgcaagaacctcaccaagctcggtgatgtgtacatcaacgatgctttcggcactgcccaccgcgcccactcctccatggtcggcattgacctccccgtcaaggccgccggtttcctcatgaagaaggagctccagtactttgccaaggttctcgagtcgccccagcgccccttcctctccatcctcggcggtgccaaggtttccgacaagatccagctgatcgacaacctgctcgacaaggtcaacaccctcatcgtctgcggtggtatggccttcaccttcaagaagaccctccagaacatgcccatcggcaactcgctcttcgatgaggccggcgccaagattgtccctgaccttgtcaagaaggccgagaagaacaacgtcaagctcgtgctccccgtcgacttcaccattgccgacaagttcgacaaggacgccaacactggctacgccacagacaaggacggcattcccgacggctggatgggtctcgactgcggcgaggagtcggtcaagctcttcacccaggccatcaacgagtcccagaccatcctctggaacggccccgccggtgtcttcgagttcgacaagttcgccaagggcaccaaggccaccctcgacgcttgcgtcaaggctgccgaggaaggccgcaccgtcatcattggcggtggtgacaccgctaccgtcgctgccaagtacggcgttgaggacaagctcagccacgtctccactggcggtggtgcttctcttgagctccttgagggcaaggctctccctggtgttgttgctcttagcgagcgtcagtaa

SEQ ID NO: 57177 - protein, 418 aa, Neurospora crassa
MSLSNKLSIEDVDLKGKRVLIRVDFNVPLDAEKKVTNPQRIAGAIPTIKYALDHGAKAVVLMSHLGRPDGKPNPKYSLKPVVPELEKLLGKKVTFAPDCVGPEVEEIVNKADNGEVILLENLRFHIEEEGKGTDAEGNKVKADKAKVEEFRKNLTKLGDVYINDAFGTAHRAHSSMVGIDLPVKAAGFLMKKELQYFAKVLESPQRPFLSILGGAKVSDKIQLIDNLLDKVNTLIVCGGMAFTFKKTLQNMPIGNSLFDEAGAKIVPDLVKKAEKNNVKLVLPVDFTIADKFDKDANTGYATDKDGIPDGWMGLDCGEESVKLFTQAINESQTILWNGPAGVFEFDKFAKGTKATLDACVKAAEEGRTVIIGGGDTATVAAKYGVEDKLSHVSTGGGASLELLEGKALPGVVALSERQ

SEQ ID NO: 57178 - DNA, 1179 bp, Nitrosomonas europaea
  CDS (1)..(1179): transl_table=11
gtgtccgttattaaacttgtcgatcttgatctgaagaacaaacgcgtctttatccgcgctgatttgaatgttcctgtaaaagacgggaaagtgacatcagatgcgcgcattactgcctcgatggcaacgatcaaccactgcctgaaacaaggcgcaaaagtcatggtgacctctcatcttggacggccggaagaaggggtatggacagaagaaaattctctccagccggttgccgatgatattgcccggagactgggaaagcctgtccggttgatcaaagactgggtagagggtggatttgaagttgcatctggagagttggtagtcctggaaaattgtcggatcaataaaggtgaaaaaaagaacctcgaagaaaccgccaagaaatatgccagtttgtgtgatgtattcgtcatggatgcttttggtacagcacaccgtgcagaagcttcgacacatggtatcgccaaatatgcaccgattgcctgtgcaggtattttgcttaccgaagaactcgatgcgctgacaaaagccctgcatcagccagcacatccgctggtggcaatcgtaggcggatcaaaagtttccaccaaactgaccgtgctggaatcgcttgctgaaaaagttgatcagctcgtagtcggcgggggaattgccaacacttttctcaaggccgcagggaacaacattggaaaatccctgtgcgaggatgaactggtacccgttgcaaaatccctgatggataaaatgaacaagcgtaatgcaacgattcccatcgcagtagatgtcgtcgtcggaaagaaattcgctgaagatgaagctgctgttctaaaagcagccaacgctgtttctgatgacgacatgatctttgatatcgggcctgagagtgctcaagaattggtcgacatcatcatgaaagccggtacggtagtctggaatggcccggtcggtgtattcgaattcgatcaatttggagaaggaacacgcgccatagccaaggcaattgctgaaacggatgccttcaccctggcggggggcggtgacacaatcgctgccatccaaaagtacgacatctacgataaagtttcctatatatccactgccggaggagcattcctggagtttctggaagggaagaaattacctgctgtcgagattctggaattacgtgcgaagtga

SEQ ID NO: 57179 - protein, 392 aa, Nitrosomonas europaea; identical to SEQ ID NO: 10729

SEQ ID NO: 57180 - DNA, 1182 bp, Oceanobacillus iheyensis; identical to SEQ ID NO: 10730
  CDS (1)..(1182)

SEQ ID NO: 57181 - protein, 393 aa, Oceanobacillus iheyensis; identical to SEQ ID NO: 10731

SEQ ID NO: 57182 - DNA, 1197 bp, Onion yellows phytoplasma; identical to SEQ ID NO: 10732
  CDS (1)..(1197): transl_table=11

SEQ ID NO: 57183 - protein, 398 aa, Onion yellows phytoplasma; identical to SEQ ID NO: 10733

SEQ ID NO: 57184 - DNA, 1248 bp, Opisthorchis sinensis
  CDS (1)..(1248)
atggggcttcgcaaattgagcatagccaatgttgacctcaaagataagcgggtgcttatgcgagttgattttaatgttccaatgaaagatggcaaggtgacaaacacccaaagaattgttggggcatcaccaaccatcaagtatgcacttgataagggggccaaaagtatcgtcctaatgtcccatcttggaggtcgggtcggtaacaaagtcgccagatattccctcaacccggtgggagaagaagtgtccaaactccttgggaaaccagtgaaattcttacctgattgtgtcggcccagaaacaacagaaggcatgtgccaatcctctgcaggatccgtgttcctgttagaaaatctacgtttccatgttgaggaggaagggaaaggcgtttcccccactggagaaaagatcaaagccactccagagcaagtcaaggccttcagtgaaaacttgaccaagttgggtgacgtttacctaaacgacgcatttggtacagctcacagagctcacgcttccatggttggctgcagacttacgcaaagggcatgtgggtttctcatggacaaggaattgacctacttctccaagctgttggatcagcctcagcatcctttcttggcgatcattggtggagctaaagtcagtgacaaaattcaactgatcaagaacatgttggacaaagtggacgaactgattataacaggaggcatggctttcactttcctcaagaaactccacaatatgaagattggaaagagtctttacgatgaacccggggctgcaattgtcgacgaatggatgcagttggccaaatccaagaacgttaagattcatctacctgttgatttcataaccggggacaagtttgcggaggatgccaatactggcactgccacagtcgagcctggcatccgggacacgcatatgggcttggatggtggtccgaaaaccatggaagagttctgcaaggtaattagtcgagcaaaaaccattgtttggaacggtccaatgggtgtgttcgaaatggagaagtttgctggcggtacgaaggcagcaatggatgcagtggtggctgctacaaccaagggagttacgaacaataatggtggtggtgacacagctacctgctgtccaaaatggaaaacagaggcacaggtcagtcacgtgagtactggagtaggggctagcttggagctgcttgaaggcaagcaactaccaggtattctcgccctgagtgacgcataa

SEQ ID NO: 57185 - protein, 415 aa, Opisthorchis sinensis; identical to SEQ ID NO: 10735

SEQ ID NO: 57186 - DNA, 1260 bp, Oxytricha nova; identical to SEQ ID NO: 10736
  CDS (1)..(1260): transl_table=6

SEQ ID NO: 57187 - protein, 419 aa, Oxytricha nova; identical to SEQ ID NO: 10737

SEQ ID NO: 57188 - DNA, 1164 bp, Pasteurella multocida; identical to SEQ ID NO: 10738
  CDS (1)..(1164): transl_table=11

SEQ ID NO: 57189 - protein, 387 aa, Pasteurella multocida; identical to SEQ ID NO: 10739

SEQ ID NO: 57190 - DNA, 1248 bp, Penicillium chrysogenum; identical to SEQ ID NO: 10502
  CDS (1)..(1248)

SEQ ID NO: 57191 - protein, 415 aa, Penicillium chrysogenum; identical to SEQ ID NO: 10503

SEQ ID NO: 57192 - DNA, 1254 bp, Penicillium citrinum; identical to SEQ ID NO: 10474
  CDS (1)..(1254)

SEQ ID NO: 57193 - protein, 417 aa, Penicillium citrinum; identical to SEQ ID NO: 10475

SEQ ID NO: 57194 - DNA, 1164 bp, Photorhabdus luminescens; identical to SEQ ID NO: 10740
  CDS (1)..(1164): transl_table=11

SEQ ID NO: 57195 - protein, 387 aa, Photorhabdus luminescens; identical to SEQ ID NO: 10741

SEQ ID NO: 57196 - DNA, 1179 bp, Photobacterium profundum
  CDS (1)..(1179): transl_table=11
ttgagaggacgaacaatgtctgtaatcaagatgactgatctggaacttgctggtaagcgcgtatttattcgtgcagatctaaacgtaccagttaaagacggtaaagtaacttctgatgcacgtatccttgcatctctaccaactattaagcgttgcttagaagctggcgctaaagtaatggttacttctcaccttggtcgtccaacggaaggcgagtacaacgaagagttctctctggctccagtagttaactacttaaatgacgcactagattgtgacgttaaactagcgaaagattacctagatggaattgaattaaacgctggtgagctagttgttcttgaaaacgttcgctttaacaaaggcgaaaagaagaacgatgaagcactttctaagaagtatgcagcattatgtgacatcttcgtgatggacgcatttggtacggctcaccgtgcacaagcatcgactcacggtgttggcatgaacgcagctatcgcgtgtgctggtcctctactcgctaacgagcttgaagcacttggtaaagcaatggacaaccctgctcgtccacttgttgcaatcgttggtggttctaaagtatcaactaagctgactgttcttgagtcgctatctaaaattgctgaccaactagttgttggtggtggtatcgcgaacacattcatcgcagctgaaggccacaatgttggtaaatcactgtacgaagcagatttagttgaaacagctaagaaactaatgaaagactgtgcgattcctgttgcaactgacgttgcatgtgcaaaagcattcgatgagaacgcagaagcggtaatcaagcacgtgtctgaagttcaagacgacgacatgatcttcgacctaggtccagattcaactgccgttcttgctgaaatcattagcaatgcaaagacgattctttggaatggccctgttggcgtatttgaattcaaaaactttgaagcgggtactgctggtattgctaaagcaattgcagattctgaaggtttctctgttgcaggcggcggtgacacattagcagctatcgataaattcggtatcaaggctgacgtttcttacatttctactggcggcggcgcgttccttgagttcgttgaaggtaaagtattacctgcagttgctatgctagaagagcgtgcaaaagcataa

SEQ ID NO: 57197 - protein, 392 aa, Photobacterium profundum; identical to SEQ ID NO: 10745

SEQ ID NO: 57198 - DNA, 1251 bp, Pichia pastoris; identical to SEQ ID NO: 10576
  CDS (1)..(1251)

SEQ ID NO: 57199 - protein, 416 aa, Pichia pastoris; identical to SEQ ID NO: 10577

SEQ ID NO: 57200 - DNA, 1251 bp, Plasmodium falciparum
  CDS (1)..(1251)
atgttaggcaacaaattaagcattagtgacctaaaggatattaagaacaagaaggttttagtaagagttgattttaatgtacctattgaaaatggaataattaaagatacgaacagaattactgctacattacccacaattaaccatttaaagaaagaaggagcttcaaaaattatattaatatcccattgtggtagaccagatggtttaagaaatgagaaatataccttaaagccagtagctgaaactttaaaaggattattaggagaagaagtattatttttaaatgattgtgtaggtaaagaagttgaagataaaataaatgctgctaaagaaaattcagtaattctcttagaaaatttaagatttcatattgaagaagaaggtaaaggtgttgatgctaatggaaacaaagtaaaagcaaataaagaagatgttgagaagttccaaaatgatttaacaaaattagctgatgtttttattaatgatgctttcggtactgctcatcgtgctcatagtagtatggtaggtgttaaattaaatgttaaagcttcaggattcttaatgaaaaaagaattagaatattttagtaaagccttagaaaacccacaaagaccactactagccattttaggtggtgctaaagtatcagataaaattcagttaatcaaaaatttattagataaagttgatcgtatgattattggaggtggtatggcttatacttttaaaaaagtcttaaacaatatgaaaattggtacctctctttttgatgaagcaggtagtaaaattgttggagaaattatggaaaaggcaaaagctaaaaatgttcaaatatttttacctgtagattttaaaattgcagataattttgataataatgctaataccaaattcgttactgatgaagaaggtatcccagataattggatgggtcttgatgctggtccaaaaagtattgaaaattataaagatgttattttaacatcaaaaactgttatttggaacggaccacaaggtgttttcgaaatgccaaactttgcaaaaggtagtatcgaatgtctcaatttagttgttgaagttaccaaaaaaggagctatcaccattgttggaggtggagatacagcttcattagttgaacaacaaaataagaaaaacgaaattagtcatgtatctacaggtggaggagcctcacttgaacttttagaaggaaaagaattaccaggtgtattagcactttcaaacaaataa

SEQ ID NO: 57201 - protein, 416 aa, Plasmodium falciparum; identical to SEQ ID NO: 10463

SEQ ID NO: 57202 - DNA, 1257 bp, Porphyromonas gingivalis; identical to SEQ ID NO: 10746
  CDS (1)..(1257): transl_table=11

SEQ ID NO: 57203 - protein, 418 aa, Porphyromonas gingivalis; identical to SEQ ID NO: 10747

SEQ ID NO: 57204 - DNA, 1206 bp, Prochlorococcus marinus; identical to SEQ ID NO: 10750
  CDS (1)..(1206): transl_table=11

SEQ ID NO: 57205 - protein, 401 aa, Prochlorococcus marinus; identical to SEQ ID NO: 10751

SEQ ID NO: 57206 - DNA, 1164 bp, Pseudomonas aeruginosa
  CDS (1)..(1164): transl_table=11
atgaccgtgttgaagatgactgacctcgacctcaaaggtaagcgcgtgctgatccgcgaggacctcaacgtgcccgtgaaggacggccaggtgcagagcgatgcacggatcaaggccgccctgccgaccctcaagctggccctggagaagggcgcggcggtgatggtctgctcgcacctgggccgtccgaccgagggcgagttctccgccgagaacagcctgaagccggtggccgagtacctgtccaaggccctgggccgcgaagtgccgctgctggccgactacctcgacggcgtcgaggtcaaggcgggcgacctggtgctgttcgagaacgtgcgcttcaacaagggcgagaagaagaacgccgacgagctggcgcagaagtacgccgcgctgtgcgacgtgttcgtgatggatgccttcggtaccgcccaccgcgccgaggggtcgacccacggcgtggccaggttcgccaaggtcgccgccgccggcccgctgctggccgccgaactggacgcgctgggcaaggcgctgggcaacccggcgcggccgatggcggcgatcgtcgccggctccaaggtttccaccaagctcgacgtgctgaacagcctggccggcatctgcgaccaactgatcgtcggcggcggcatcgccaacaccttcctcgccgcggccggacacaaggtcggcaagtcactgtacgaggccgacctggtcgagaccgccaaggccatcgccgccaaggtcaaggtgccgctgccggtggacgtggtggtggccaaggaattcgccgagagcgccgtggcgaccgtcaaggccatcgccgaggtcgccgacgacgacatgatcctcgacatcggcccgcagaccgccgcgcagttcgccgagctgctgaagacctcgaagaccatcctgtggaacggtccggtcggggtgttcgagttcgaccagttcggcgagggcacccgtaccctggccaatgccatcgccgatagcgcggcgttctccatcgccggcggcggcgataccctggcggcgatcgacaagtacggcatcgccgagcggatctcctatatttccaccggtggcggcgcgttcctcgagttcgtcgagggcaaggtcctgccggccgtggaaatcctggagcagcgcgccaagggctga

SEQ ID NO: 57207 - protein, 387 aa, Pseudomonas aeruginosa
MTVLKMTDLDLKGKRVLIREDLNVPVKDGQVQSDARIKAALPTLKLALEKGAAVMVCSHLGRPTEGEFSAENSLKPVAEYLSKALGREVPLLADYLDGVEVKAGDLVLFENVRFNKGEKKNADELAQKYAALCDVFVMDAFGTAHRAEGSTHGVARFAKVAAAGPLLAAELDALGKALGNPARPMAAIVAGSKVSTKLDVLNSLAGICDQLIVGGGIANTFLAAAGHKVGKSLYEADLVETAKAIAAKVKVPLPVDVVVAKEFAESAVATVKAIAEVADDDMILDIGPQTAAQFAELLKTSKTILWNGPVGVFEFDQFGEGTRTLANAIADSAAFSIAGGGDTLAAIDKYGIAERISYISTGGGAFLEFVEGKVLPAVEILEQRAKG

SEQ ID NO: 57208 - DNA, 1164 bp, Pseudomonas putida; identical to SEQ ID NO: 10754
  CDS (1)..(1164): transl_table=11

SEQ ID NO: 57209 - protein, 387 aa, Pseudomonas putida; identical to SEQ ID NO: 10755

SEQ ID NO: 57210 - DNA, 1227 bp, Pyrobaculum aerophilum; identical to SEQ ID NO: 10758
  CDS (1)..(1227): transl_table=11

SEQ ID NO: 57211 - protein, 408 aa, Pyrobaculum aerophilum; identical to SEQ ID NO: 10759

SEQ ID NO: 57212 - DNA, 1233 bp, Pyrococcus furiosus
  CDS (1)..(1233): transl_table=11
atgttcaggttgagagattttgaatactacaacagaaccgtgtttcttcgagttgacttaaactcaccaatgagtaatggaaaaataataagtgacgcgagatttcgagcagtccttccaacgataaagtacctaatagagagtggagcaaaagtagttgttggcactcatcaaggaaaaccctacagcgaagagtattcgactactgaagagcatgcgagaattctctctgagctcctaaatatgcatgttgaatacgttgaagacatttttggaaagtatgcaagggagagaataaaggctatgaaacctggggaagttatagtcctcgaaaacctcaggttctctgcagaagaagtaaaaaacgcaactattgaggaatgcgaaaagacgttttttgttaggaagctctcccaggtaatagacctcgttgttaacgatgcctttgctgccgctcatagaagtcagccatctctcgttggttttgcaagaataaagcctatgataatgggattccttatggaaaaagaagttgatgctttaacaaaagcttatgaaagtgaagaaaagccgagagtttatgttcttggtggtgcaaaagttgatgactcattaaaagttgccgaaaacgttcttaggaaagaaaaggctgatctcatactgacagggggattggttggccaattattcactctagctaagggctttgacctgggaagagaaaacattaaattcttagaaaagaagggaattttaaaatacgtagactgggcagaaaagattcttgacgaattttatccctacgttagaactcccgtagactttgccattgacttcaagggagaaagagtagagatagatttgctcagcgacgagaaaaggctctttgacgaatatccaatccttgacatcggttctagaacagttgaaaagtatagggagatactcttaaaggccaggataatagtagccaacggtcctatgggagtgttcgaaagggaagaatttgccgtgggaacaattggggtattcaaggccatcggagagagtccagcctttagcgtcattggtggtggtcattcaatagcaagcatatacaagtacaacataactgggataagccatatctctaccggtgggggagctatgctaacattttttgctggagaaaagttgccagttcttgaagcgctaaagattagttacgaaaagttctctaacttactttcttaa

SEQ ID NO: 57213 - protein, 410 aa, Pyrococcus furiosus; identical to SEQ ID NO: 10481

SEQ ID NO: 57214 - DNA, 1233 bp, Pyrococcus horikoshii
  CDS (1)..(1233)
atgttcaggttggaggattttaactttcacaataaaacggtattcttaagggtagacttaaactcacccatgaaggatggaaagataataagcgatgccaggtttaaagccgttttaccaactataagatacctcatcgagagtggagcaaaagttgtcattggaacgcatcaagggaaaccctacagtgaagattacactaccacagaggagcatgcgagggttctttcagagttattggatcaacacgttgaatatatcgaagacatatttggtaggtatgccagggaaaagataaaagagcttaaatcaggtgaagttgcaattttagagaatcttagattttccgccgaagaagttaagaacaaacccattgaggagtgtgaaaagactttcctcgttaaaaaactatcgaaagttattgattatgtcgttaacgatgcctttgcaactgcacacagaagtcaaccttctttagtaggtttcgcaaggataaagccaatgataatggggttcttgatggaaaaggagatagaggctttaatgagggcttattacagcaaagacagccctaaaatttatgtacttggaggcgccaaggttgaggattcgcttaaagtagttgaaaacgttctaagaagagagagagctgatctagtgctaaccggaggcttggtggccaatgtatttacgcttgctaagggatttgacttgggaaggaaaaacgtagagttcatgaagaaaaaaggcttgctagattatgtaaagcatgcagaggagatattagatgaattttatccctatataagaactcccgtagacttcgcagtagattacaaaggggaaagagtcgaaatagatctgctaagtgaaaataggggattacttcatcaatatcaaattatggatatcggtaagagaaccgcggagaagtacagggaaatattaatgaaagcaaggattatagttgctaacggaccaatgggagtctttgagagggaagaattcgcgatagggacagtagaggtgttcaaggccatagccgatagcccagcgtttagcgttttgggaggagggcattcgatagctagcatacagaaatacggtataactggaataactcatatctccacaggcggtggagcaatgctctctttcttcgctggagaggagttgcctgtcctgagagctcttcagattagttacgaaaaattcaaggaggtggtgaagtga

SEQ ID NO: 57215 - protein, 410 aa, Pyrococcus horikoshii
MFRLEDFNFHNKTVFLRVDLNSPMKDGKIISDARFKAVLPTIRYLIESGAKVVIGTHQGKPYSEDYTTTEEHARVLSELLDQHVEYIEDIFGRYAREKIKELKSGEVAILENLRFSAEEVKNKPIEECEKTFLVKKLSKVIDYVVNDAFATAHRSQPSLVGFARIKPMIMGFLMEKEIEALMRAYYSKDSPKIYVLGGAKVEDSLKVVENVLRRERADLVLTGGLVANVFTLAKGFDLGRKNVEFMKKKGLLDYVKHAEEILDEFYPYIRTPVDFAVDYKGERVEIDLLSENRGLLHQYQIMDIGKRTAEKYREILMKARIIVANGPMGVFEREEFAIGTVEVFKAIADSPAFSVLGGGHSIASIQKYGITGITHISTGGGAMLSFFAGEELPVLRALQISYEKFKEVVK

SEQ ID NO: 57216 - DNA, 1260 bp, Ralstonia solanacearum
  CDS (1)..(1260): transl_table=11
gtggcatcgggtaaaatcgccgctttccgtgatttctccgctgctgccatgcccaacgtcctgcgtctgaccgatctcatctccgaaggcaagcttgccggcaagcgtgtcttcatccgcgccgatctcaacgtgccgcaagacgatgccggcaacatcaccgaagacacgcgcatccgcgcttcggtgccggccatccgcgccgcgctcgacgccggtgccgccgtgatggtcacctcgcatctgggccgtccgaccgaaggcgagttcaagccggaagattcgctggccccggtggccgtgcgcctgtccgagttgctcggctgtgaggtgaagctggtgcagaactgggtcgacggcgtggatgtcgcgcccggccaggtggtgctgctggaaaactgccgcgtcaacaagggcgagaagaagaacagcgacgaactggcccagaagatggccaagctgtgcgacgtctacgtcaacgacgccttcggcaccgcccaccgcgccgaggccaccacgcacggcatcgccaagtttgcccccatcgcctgcgccggcccgctgctgggcgccgagctggacgcgctgggcaaggcgctgggccaaccggcccgtccgctggtcgccatcgtggccggctccaaggtgtcgaccaagctgaccatcctgaaatcgctggccgacaaggtggacaacctgatcgtcggcggcggcatcgccaacacgttcatgctggccgcgggcctgaagatcggcaagtcgctggccgaggcggatctggtgggcgatgccaaggcgatcatcgacctgatggctgcccgtggcgcctcggtgcccattcctgtcgatgtggtctgcgccaaggaattcagcgccaccgctgccgccaccgtcaaggacgtgaaggacgtggcggatgacgacatgattctcgacatcggcccgaagaccgccgcgcaactggccgaccagctcaaggcctccggcaccatcgtgtggaacggcccggtcggcgtgttcgagttcgaccagttcggcaacggcaccaaggtgctggccgaggcgatcgcggcctcgtcgggcttctcgatcgccggtggcggcgatacgctggcggcgatcgccaagtacggcatcgccgaccgcgtgggctacatctccaccggcggcggcgcattcctggaattcctggaaggcaagacgctgccggccgtggagatcctggagcagcgtgcccagcgccaggaagcgctggcctga

SEQ ID NO: 57217 - protein, 419 aa, Ralstonia solanacearum; identical to SEQ ID NO: 10761

SEQ ID NO: 57218 - DNA, 1197 bp, Rhizobium loti; identical to SEQ ID NO: 10762
  CDS (1)..(1197)

SEQ ID NO: 57219 - protein, 398 aa, Rhizobium loti; identical to SEQ ID NO: 10763

SEQ ID NO: 57220 - DNA, 1200 bp, Rhizobium meliloti; identical to SEQ ID NO: 10764
  CDS (1)..(1200): transl_table=11

SEQ ID NO: 57221 - protein, 399 aa, Rhizobium meliloti; identical to SEQ ID NO: 10765

SEQ ID NO: 57222 - DNA, 1194 bp, Rhodopirellula baltica; identical to SEQ ID NO: 10766
  CDS (1)..(1194): transl_table=11

SEQ ID NO: 57223 - protein, 397 aa, Rhodopirellula baltica; identical to SEQ ID NO: 10767

SEQ ID NO: 57224 - DNA, 1197 bp, Rhodopseudomonas palustris; identical to SEQ ID NO: 10768
  CDS (1)..(1197): transl_table=11

SEQ ID NO: 57225 - protein, 398 aa, Rhodopseudomonas palustris; identical to SEQ ID NO: 10769

SEQ ID NO: 57226 - DNA, 1251 bp, Schistosoma mansoni
  CDS (1)..(1251)
atgggtttgtcgaagcttagtatttcagatgttgaccttaaaggaaaacgtgttcttattcgagttgattttaacgtccctatgaaagatgggaaagtcactaacactcaaagaatagcagctgccataccaactattaaatatgctttggataagggggccaaaagtgtcgtcttaatgtcccatttaggtcggccagatgggcacaaagttgataagtattctctaaagcctgtgtgccctgaagtgtcaaagttgttaggcaaagaagttacgttcctcaatgattgtgttgggcctgacgtagttaacgcatgtgccaatcctgctcccggaagcgtttttttgctagagaatctacgctttcacgttgaagaggaaggaaaaggtgtctcaccaaccggcgaaaaaacaaaagccactgctgaccaaatcaaggctttcagtgagagtctaacaaaacttggtgatgtctacgtcaacgatgcctttgggacggcacatagagctcatgcttctatggtcggctgccaactaccacaaaaagcctgtggatttctcatgaataaagaattgacatacttcgccaaagctctggaaaatccagaacgccctttcttagctattttaggaggtgccaaggttagcgacaagatccagttgatcaataatatgcttgacaaagttaatgaattaatcatcggtggtgggatggcgtatacatttcttaagcaaatacacaatatgcatataggaaatagtttatttgatgcaccgggtgcagaaattgttcataaagtaatggaaactgcaaaggctaaaaatgttgcaattcacttaccggttgatttcgtaactgccgataaatttgctgatgatgcgaacaccgaaataagaactatacaatccggaattgccgatggttggatgggattagatattggtccaaaaacaattgaagaattcagtaaagtgattagtcgtgccaaaactattgtttggaacggtccgatgggtgtttttgaaatggacaaatttgcaacaggaacaaaagcagcaatggatgaagtagtcaaagctactaaaaatggtgctacaactattattggtggtggtgacaccgcaacatgctgcgccaaatgggacacagaagacaaagttagtcatgtcagtactggtggtggtgctagtcttgaacttctcgaaggtaaacaattacccggagttgttgcacttacggatgctcattaa

SEQ ID NO: 57227 - protein, 416 aa, Schistosoma mansoni; identical to SEQ ID NO: 10771

SEQ ID NO: 57228 - DNA, 1245 bp, Schizosaccharomyces pombe; identical to SEQ ID NO: 10498
  CDS (1)..(1245)

SEQ ID NO: 57229 - protein, 414 aa, Schizosaccharomyces pombe; identical to SEQ ID NO: 10499

SEQ ID NO: 57230 - DNA, 1176 bp, Shewanella oneidensis; identical to SEQ ID NO: 10772
  CDS (1)..(1176): transl_table=11

SEQ ID NO: 57231 - protein, 391 aa, Shewanella oneidensis; identical to SEQ ID NO: 10773

SEQ ID NO: 57232 - DNA, 1239 bp, Spiroplasma citri; identical to SEQ ID NO: 10774
  CDS (1)..(1239): transl_table=4

SEQ ID NO: 57233 - protein, 412 aa, Spiroplasma citri; identical to SEQ ID NO: 10775

SEQ ID NO: 57234 - DNA, 1191 bp, Staphylococcus aureus
  CDS (1)..(1191): transl_table=11
atggctaaaaaaattgtttctgatttagatcttaaaggtaaaacagtcctagtacgtgctgattttaacgtacctttaaaagacggtgaaattactaatgacaaccgtatcgttcaagctttacctacaattcaatacatcatcgaacaaggtggtaaaatcgtactattttcacatttaggtaaagtgaaagaagaaagtgataaagcaaaattaactttacgtccagttgctgaagacttatctaagaaattagataaagaagttgttttcgtaccagaaacacgcggcgaaaaacttgaagctgctattaaagaccttaaagaaggcgacgtattattagttgaaaatacacgttatgaagatttagacggtaaaaaagaatctaaaaatgatccagaattaggtaaatactgggcatctttaggtgatgtgtttgtaaatgatgcttttggtactgcgcatcgtgagcatgcatctaatgttggtatttctacacatttagaaactgcagctggattcttaatggataaagaaattaagtttattggtggcgtagttaacgatccacataaaccagttgttgctattttaggtggagcaaaagtatctgacaaaattaatgtcatcaaaaacttagttaacatagctgataaaattatcatcggcggaggtatggcttatactttcttaaaagcgcaaggtaaagaaattggtatttcattattagaagaagataaaatcgacttcgcaaaagatttattagaaaaacatggtgataaaattgtattaccagtagacactaaagttgctaaagaattttctaatgatgccaaaatcactgtagtaccatctgattcaattccagcagaccaagaaggtatggatattggaccaaacactgtaaaattatttgcagatgaattagaaggtgcgcacactgttgtatggaatggacctatgggtgtattcgagttcagtaactttgcacaaggtacaattggtgtatgtaaagcaattgcaaaccttaaagatgcaattacgattatcggtggcggtgattcagctgcagcagcaatctctttaggttttgaaaatgacttcactcatatttcaactggtggcggcgcgtcattagagtacctagaaggtaaagaattgcctggtatcaaagcaatcaataataaataa

SEQ ID NO: 57235 - protein, 396 aa, Staphylococcus aureus; identical to SEQ ID NO: 10439

SEQ ID NO: 57236 - DNA, 1197 bp, Streptococcus pneumoniae
  CDS (1)..(1197): transl_table=11
atggcaaaacttactgttaaagacgttgacttgaaaggtaaaaaagtcctcgttcgtgttgacttcaacgtaccattgaaagatggcgtaatcactaacgataaccgtatcacagcagctcttccaactattaagtacatcatcgaacaaggtggacgtgcaattcttttctctcaccttggacgtgtgaaagaagaagctgataaagctggtaaatcacttgctcctgtagcagctgacttggcagcaaaacttggtcaagatgttgttttcccaggtgtcactcgtggtgctgaattagaagcggcaatcaacgctcttgaagatggacaagttctcttggttgaaaacactcgttacgaagatgttgacggcaagaaagaatctaaaaacgatcctgaacttggtaaatactgggcatcacttggagatggtatcttcgtaaacgatgcattcggtacagctcaccgtgcacacgcatctaacgttggtatctcagcaaacgttgaaaaagcagttgctggtttccttcttgaaaacgaaattgcctacatccaagaagcagttgaaactccagaacgtccattcgtggctatccttggtggttcaaaagtttcagacaagatcggtgttatcgaaaacttgcttgaaaaagctgataacgtccttatcggtggtgggatgacttacacattctacaaagcacaaggtatcgaaatcggtaactcacttgtagaagaagacaaattggatgttgcgaaagctcttcttgaaaaagcaaatggtaaattgatcttgccagttgactcaaaagaagctaacgcatttgctggttacactgaagtgcgtgacactgaaggtgaagcagtttctgaaggcttccttggtcttgacatcggtccaaaatctatcgccaaatttgacgaagctttgactggtgccaaaacagtcgtatggaacggacctatgggtgtatttgaaaacccagatttccaagctggtacaatcggtgtgatggacgctatcgtgaaacaaccaggagttaaatcaatcatcggtggtggtgactcagctgccgcagcgattaaccttggccgtgcagacaagttctcatggattagtacgggtggtggagcatcaatggaacttcttgaaggtaaggttcttccaggacttgcagccttgacagaaaaataa

SEQ ID NO: 57237 - protein, 398 aa, Streptococcus pneumoniae
MAKLTVKDVDLKGKKVLVRVDFNVPLKDGVITNDNRITAALPTIKYIIEQGGRAILFSHLGRVKEEADKAGKSLAPVAADLAAKLGQDVVFPGVTRGAELEAAINALEDGQVLLVENTRYEDVDGKKESKNDPELGKYWASLGDGIFVNDAFGTAHRAHASNVGISANVEKAVAGFLLENEIAYIQEAVETPERPFVAILGGSKVSDKIGVIENLLEKADNVLIGGGMTYTFYKAQGIEIGNSLVEEDKLDVAKALLEKANGKLILPVDSKEANAFAGYTEVRDTEGEAVSEGFLGLDIGPKSIAKFDEALTGAKTVVWNGPMGVFENPDFQAGTIGVMDAIVKQPGVKSIIGGGDSAAAAINLGRADKFSWISTGGGASMELLEGKVLPGLAALTEK

SEQ ID NO: 57238 - DNA, 1248 bp, Sulfolobus tokodaii; identical to SEQ ID NO: 10782
  CDS (1)..(1248)

SEQ ID NO: 57239 - protein, 415 aa, Sulfolobus tokodaii; identical to SEQ ID NO: 10783

SEQ ID NO: 57240 - DNA, 1203 bp, Synechococcus elongatus; identical to SEQ ID NO: 10784
  CDS (1)..(1203)

SEQ ID NO: 57241 - protein, 400 aa, Synechococcus elongatus; identical to SEQ ID NO: 10785

SEQ ID NO: 57242 - DNA, 1209 bp, Synechococcus sp; identical to SEQ ID NO: 10786
  CDS (1)..(1209): transl_table=11

SEQ ID NO: 57243 - protein, 402 aa, Synechococcus sp; identical to SEQ ID NO: 10787

SEQ ID NO: 57244 - DNA, 1206 bp, Synechocystis sp; identical to SEQ ID NO: 10788
  CDS (1)..(1206)

SEQ ID NO: 57245 - protein, 401 aa, Synechocystis sp; identical to SEQ ID NO: 10789

SEQ ID NO: 57246 - DNA, 1263 bp, Tetrahymena thermophila
  CDS (1)..(1263): transl_table=6
atgttgtctcgtaagattggtattgatcacatcttgaaacatattgaaaacaagagagttttaatgagagtagacttcaacgttcctttgaaggaaggtaaggttaaagatcctactcgtatctaaggttctgttccttctatcaagaaaatcttagagtaaaatcctaaaggtcttgtcttgatgagtcacttgggtcgtcctgatggcaacagagttgaaaagcactcaatgaagcctgttgttcctaagcttgaagaattactcggcaccaaggtaaccttcttgaatgactgtgttggtaaggatgtagaagaagctgttaaatcaagcagaaacggtgaaatcattttacttgaaaacttgcgtttccatcctgaagaagaaggaaagtacatcgatgctgcaggaaacaaggttaaggctgactctaaggcagttaaggaattcagaaaatctttgactagtttgggtgacttattcgtcaacgatgctttcggtaccgctcacagagctcactcttccatggtcggtgttgatcacaaaatcagagctgctggttacctcttgaagagagaattagactacttcagtaaggctttggaatcccctaacagacctttcttagttgtcttaggtggtgctaaggtcaaggataaaatctaattgattgaaagtatgcttgacaaggtcgatgaaatgatcattggtggtggtatggccttcactttcttgaagaaaatccacaatattgaaattggtaactccctcttcgacgaagaaggttataagattgttgaccaattgttagaaaaggctaaagctaagaatgtcaagatccatttaccagttgatttcttgtgcggtgactcacttgaagccaacgctaacacccgtagctttgacttaaagagtggtatccctgctggatggattggtttagatgctggtcctaagactatggctgaaaacgctgaagctgttgcccgtgctaacactattgtctggaatggtccttaaggtagattcgaagttgataagtttaaagtaggatcttctgaccttctcaagcacgttgctactagaacttcctaaggagctacttctattattggtggtggtgacactgtcaatcttgttcaacaagaaaaggcaactcaaaaagtcagccacgtctctactggtggtggtgcatctcttgaacttcttgaaggtaaagtccttcctggtgttgcttatcttactgatattgactaactttga

SEQ ID NO: 57247 - protein, 420 aa, Tetrahymena thermophila
MLSRKIGIDHILKHIENKRVLMRVDFNVPLKEGKVKDPTRIQGSVPSIKKILEQNPKGLVLMSHLGRPDGNRVEKHSMKPVVPKLEELLGTKVTFLNDCVGKDVEEAVKSSRNGEIILLENLRFHPEEEGKYIDAAGNKVKADSKAVKEFRKSLTSLGDLFVNDAFGTAHRAHSSMVGVDHKIRAAGYLLKRELDYFSKALESPNRPFLVVLGGAKVKDKIQLIESMLDKVDEMIIGGGMAFTFLKKIHNIEIGNSLFDEEGYKIVDQLLEKAKAKNVKIHLPVDFLCGDSLEANANTRSFDLKSGIPAGWIGLDAGPKTMAENAEAVARANTIVWNGPQGRFEVDKFKVGSSDLLKHVATRTSQGATSIIGGGDTVNLVQQEKATQKVSHVSTGGGASLELLEGKVLPGVAYLTDIDQL

SEQ ID NO: 57248 - DNA, 1173 bp, Thermus thermophilus; identical to SEQ ID NO: 10792
  CDS (1)..(1173): transl_table=11

SEQ ID NO: 57249 - protein, 390 aa, Thermus thermophilus; identical to SEQ ID NO: 10793

SEQ ID NO: 57250 - DNA, 1271 bp, Thermus thermophilus; identical to SEQ ID NO: 10506
  CDS (28)..(1200)

SEQ ID NO: 57251 - protein, 390 aa, Thermus thermophilus; identical to SEQ ID NO: 10507

SEQ ID NO: 57252 - DNA, 1185 bp, Thermoanaerobacter tengcongensis
  CDS (1)..(1185): transl_table=11
gtgaaaaagaaaactgtgagagacatagacgttagcggaaaaagagttttagttagagtagattttaacgtgccgatggatgaaaataaaaacataacagatgacaggcgcataagagaagctcttcccaccattgagtatttaataaatcacaacgcaaaagtgatactggtatctcacctggggagacctaaggggaaattcaatccggattactctttaaagcctgttgcaaaaaggctgtctgagcttttgaaaaagcctgtaattatggcagaggatgtgattggagaagatgctaaggtaaaagctgctgccttaaaagaaggggaagttctccttttggaaaatgttagattccatgcagaagaggagaagaatgaccctgaatttgcaaaagagcttgcatctttagcagatatatacgtaaatgatgcttttggcactgctcacagggctcacgcttctactgcaggagttgccaagtatcttccagcagtggcaggttttttaattgaaaaagagctttctataatgggagaagcgttggagaatcctaagagaccttttgtggcgattttaggtggagctaaagtttctgataaaattggggttataacaaatcttctggaaaaagtggacagcctgttaattggcggtggaatggcttatacctttattaaggcgaagggctacgaaatagggaaatctcttttggaagaggataaaattgaactagcaaaggaaataatggaaaaagcaaagcagaagggcgtaaatttcatgcttcctgttgatacagttatcgcgaaagagttaaaatccggggtaccttatgaagtggttgacattgacaaaatgccagaagaccagataggagttgacattgggcctaaaacaatagaagagtattcaaaagtgataaagcatgccatgacagttgtatggaatggaccaatgggagtttttgaaatacctgaatttgccaaaggtacaaaagctatcgcaaaggctttgagcgagtgcaaaggtacaacaatagtaggaggaggagattctgcagctgccatagaacagcttggctatgctgataaagtcacccacatttcaactggaggcggtgcgtcactggaatttttagaggggaaagtcttgccgggaattgacattttgaatgataagtaa

SEQ ID NO: 57253 - protein, 394 aa, Thermoanaerobacter tengcongensis; identical to SEQ ID NO: 10795

SEQ ID NO: 57254 - DNA, 1227 bp, Thermoplasma volcanium
  CDS (1)..(1227)
atggctgatttctttctcatggattctttcgatctcgcaggaaggactatatatctaagggttgatataaactcacctgtgaatccagtaactggagaaataatgggtacagataggtttagggcccatgtcgagactattaggaagctaagagattcaaaggtcgttattgtggcccatcagagccggcctggaaaggatgattttacgtcgctgaggcagcacgcgcaggtcatgtcgcgtattttgaacaagaaagtaatgtttgtagatcagctcttcggatcacttgtaaacaagactgttgaatcaatgaatgagggagatatagtaatgctagaaaacgctaggttctattcagaagaagttgaccttacgactttagaatcgatggaaaattcaaacatagttaagggtctctctactctcttcgattactatattatagatgcgtttgccgcaatacatagggcacagaccacccttgtaggtttcaggaggataaagccaaacatagcaggtgcgcttatagagaaagaggttacaatgatcgataggttcaggcatctaaacgaatctccaaaaatagccatactaggcggcgcaaagatcgacgattctatcgctgtatcagagaatttcctgaaatccggcttcgttgataaaatactcaccggcggtgttgttgcgaacgcattcctttgggccaaaggcatcgacattggaaagaagaacagggacttcataataaaaaataacggagattacgagaagttgatcgctaagtgtaagggtctgctctccgagtttggtgataggatactggtaccgtcggatttcattttaagtccttcaggagaaagggtctccgcaaacggaaagattcctgacgatcagatacttgctgacattggactcgataccgtggtcgaatactccgaaataattgataaggctaaggcaatatttatgaatggcccaatgggtatatatgagatcgaagcgtattcatctggtactagggagatattttcttctgtagcaaaatcagaggcctttagcatagcaggtggagggcatactcttagcgcactggacaagcttggtctgacaaacaggatagatcatgcgtcaacaggcggaggggcactcataagctatttaagtggtgaagctatgccagtactcgaagcattgaaggaaagcaaacgtttgtttgaggtgtag

SEQ ID NO: 57255 - protein, 408 aa, Thermoplasma volcanium
MADFFLMDSFDLAGRTIYLRVDINSPVNPVTGEIMGTDRFRAHVETIRKLRDSKVVIVAHQSRPGKDDFTSLRQHAQVMSRILNKKVMFVDQLFGSLVNKTVESMNEGDIVMLENARFYSEEVDLTTLESMENSNIVKGLSTLFDYYIIDAFAAIHRAQTTLVGFRRIKPNIAGALIEKEVTMIDRFRHLNESPKIAILGGAKIDDSIAVSENFLKSGFVDKILTGGVVANAFLWAKGIDIGKKNRDFIIKNNGDYEKLIAKCKGLLSEFGDRILVPSDFILSPSGERVSANGKIPDDQILADIGLDTVVEYSEIIDKAKAIFMNGPMGIYEIEAYSSGTREIFSSVAKSEAFSIAGGGHTLSALDKLGLTNRIDHASTGGGALISYLSGEAMPVLEALKESKRLFEV

SEQ ID NO: 57256 - DNA, 1260 bp, Treponema denticola; identical to SEQ ID NO: 10796
  CDS (1)..(1260): transl_table=11

SEQ ID NO: 57257 - protein, 419 aa, Treponema denticola; identical to SEQ ID NO: 10797

SEQ ID NO: 57258 - DNA, 1260 bp, Treponema pallidum; identical to SEQ ID NO: 10442
  CDS (1)..(1260): transl_table=11

SEQ ID NO: 57259 - protein, 419 aa, Treponema pallidum; identical to SEQ ID NO: 10443

SEQ ID NO: 57260 - DNA, 1188 bp, Tropheryma whipplei
  CDS (1)..(1188): transl_table=11
ttgagaactcttggcggtttcacctttccttgtgatgctcctgtttttgtccgggttgatttcaatgtgcctatggatgaggtcggcacaataacggatgatctgcgtataagagcttcccttccgactatagaaagcttgcttggccgtggcgcgccacttatattgatttctcatctcgggcgaccggttaaaaatgagcagcaaggattttccctaaaaccctgtgctgagcgactatcggaatatatcggagtcaatgtaccgcttgtggattttcttgatctagatacaaagctttatggtgaacttactaggcatctggacaagtctgggatagttctttttgaaaatatacgattttttgccgaggaaacttcaaaggcacaggctgatcgaaggattctggctgagcaacttgcgccttttgcgggtgcgtatgtcaatgatgcctttggtgcttcccacaggaggcatgctagtgtgtatgagcttgcacaggctttctcaaataaggcggcaggctttctcattgaatcagagatgcaggctttttcacatcttgccagcgaggccaagcgtccctataccgttattctcggcggggcaaaattatcggacaagctacggcttatagagaatatcctgccaacggttgatcgtctgttactgtgtggtggaatggcatttacatttctagcggcacaggggtgtgaaacaggcaaaagtctcctggaagagagttttatctcggaggcaaataaaatcattgattttgctaagcaaaataatgttgaacttatacttccggtagatgttattgaggcgcgaagcctaacttcaccccttggggttgtaagtaaagctgaatctatatcttatatgggtcttgatataggtcctgaaactcagagtatctttagaaatgtaatacaagattcgaaaactgttttttggaatggcccggctggtttatttgaaaacccaagcttttcaaacggaacacgtgcactgcttgatgcattgtcgtcttctagcgcgtttacatttatcggaggaggcgatacagcagcagctgtcagccttcttggttttgattatggagattttagtcatgtttcaacaggcggtggtgcctgccttgaactgctagagggaaaaatattgccagcattagaggttttgtaa

SEQ ID NO: 57261 - protein, 395 aa, Tropheryma whipplei; identical to SEQ ID NO: 10799

SEQ ID NO: 57262 - DNA, 1188 bp, Tropheryma whipplei
  CDS (1)..(1188): transl_table=11
ttgagaactcttggcggtttcacctttccttgtgatgctcctgtttttgtccgggttgatttcaatgtgcctatggatgaggtcggcacaataacggatgatctgcgtataagagcttcccttccgactatagaaagcttgcttggccgtggcgcgccacttatattgatttctcatctcgggcgaccggttaaaaatgagcagcaaggattttccctaaaaccctgtgctgagcgactatcggaatatatcggagtcaatgtaccgcttgtggattttcttgatctagatacaaagctttatggtgaacttactaggcatctggacaagtctgggatagttctttttgaaaatatacgattttttgccgaggaaacttcaaaggcacaggctgatcgaaggattctggctgagcaacttgcgccttttgcgggtgcgtatgtcaatgatgcctttggtgcttcccacaggaggcatgctagtgtgtatgagcttgcacaggctttctcaaataaggcggcaggctttttaattgaatcagagatgcaggctttttcacatcttgccagcgaggccaagcgtccctataccgttattctcggcggggcaaaattatcggacaagctacggcttatagagaatatcctgccaacggttgatcgtctgttactgtgtggtggaatggcatttacatttttagcggcacaggggtgtgaaacaggcaaaagtctcctggaagagagttttatcccggaggcaaataaaatcattgattttgctaagcaaaataatgttgaacttatacttccggtagatgttattgaggcgcgaagcctaacttcaccccttggggttgtaagtaaagctgaatctatatcttatatgggtcttgatataggtcctgaaactcagagtatctttagaaatgtaatacaagattcgaaaactgttttttggaatggcccggctggtttatttgaaaacccaagcttttcaaatggaacacgtgcactgcttgatgcattgtcgtcttctagtgcgtttacatttatcggaggaggcgatacagcagcagctgttagccttcttggttttgattatggagattttagtcatgtttcaacaggcggtggtgcctgccttgaactgctagagggaaaaatattgccagcattagaggttttataa

SEQ ID NO: 57263 - protein, 395 aa, Tropheryma whipplei
MRTLGGFTFPCDAPVFVRVDFNVPMDEVGTITDDLRIRASLPTIESLLGRGAPLILISHLGRPVKNEQQGFSLKPCAERLSEYIGVNVPLVDFLDLDTKLYGELTRHLDKSGIVLFENIRFFAEETSKAQADRRILAEQLAPFAGAYVNDAFGASHRRHASVYELAQAFSNKAAGFLIESEMQAFSHLASEAKRPYTVILGGAKLSDKLRLIENILPTVDRLLLCGGMAFTFLAAQGCETGKSLLEESFIPEANKIIDFAKQNNVELILPVDVIEARSLTSPLGVVSKAESISYMGLDIGPETQSIFRNVIQDSKTVFWNGPAGLFENPSFSNGTRALLDALSSSSAFTFIGGGDTAAAVSLLGFDYGDFSHVSTGGGACLELLEGKILPALEVL

SEQ ID NO: 57264 - DNA, 1269 bp, Ureaplasma parvum; identical to SEQ ID NO: 10416
  CDS (1)..(1269): transl_table=4

SEQ ID NO: 57265 - protein, 422 aa, Ureaplasma parvum; identical to SEQ ID NO: 10417

SEQ ID NO: 57266 - DNA, 1164 bp, Vibrio cholerae; identical to SEQ ID NO: 10800
  CDS (1)..(1164)

SEQ ID NO: 57267 - protein, 387 aa, Vibrio cholerae; identical to SEQ ID NO: 10801

SEQ ID NO: 57268 - DNA, 1185 bp, Wigglesworthia glossinidia brevipalpis; identical to SEQ ID NO: 10804
  CDS (1)..(1185)

SEQ ID NO: 57269 - protein, 394 aa, Wigglesworthia glossinidia brevipalpis; identical to SEQ ID NO: 10805

SEQ ID NO: 57270 - DNA, 1197 bp, Wolbachia pipientis wMel; identical to SEQ ID NO: 10806
  CDS (1)..(1197): transl_table=11

SEQ ID NO: 57271 - protein, 398 aa, Wolbachia pipientis wMel; identical to SEQ ID NO: 10807

SEQ ID NO: 57272 - DNA, 1206 bp, Wolinella succinogenes; identical to SEQ ID NO: 10808
  CDS (1)..(1206): transl_table=11

SEQ ID NO: 57273 - protein, 401 aa, Wolinella succinogenes; identical to SEQ ID NO: 10809

SEQ ID NO: 57274 - DNA, 1176 bp, Xanthomonas axonopodis
  CDS (1)..(1176): transl_table=11
atgtccattgtccgcatgaccgacctcgatctctccggcaagcgcgtgctgatccgccaggatctcaacgtgccgatcgacaacggccagatcacctccgaacagcgcatcaccgcctcggtgcccaccatcaagctagcgctggaaaaaggtgcggccgtcatggtgacctcgcacctgggccgccccaaggaaggcagctggaccgaagaagattcgctggcgccggttgccacgcgtctggccgcattgctgggcgtggacgtgccgctggtgcgcgactgggtcgatggcgtggaggtcgcgccgggccaggtggtgctgctggaaaactgccgcatgaatgtcggcgagggcaaggacgatgagacgctggcgcgcaagtacgccgcgttgtgcgacgtgttcgtgatggatgccttcggcaccgcgcaccgcgcgcaggcctccacgcatggcgtgatccgtttcgcgccggtcgccgcaggcggcccgctgttgatggccgaactcgacgccctggccaaggcgctggacaaccccgccaagcccttgctggcgatcgtggccggcagcaaggtgtccaccaagctggagctgctgtccaacctggtcaacaaggtcgaccagctgatcgtcggcggcggcatcgccaacaccttcatcgccgcggccgggcatgccgtgggcaagtcgttgaacgagccggatttgatcccgaccgccaaccggatcgtggccgatgccaaggcgcgtggcgccgagatcccgctgcccaccgatgtggtcgttgccaagcagttcctgcccgatgcgcaagccagcgtgaagtcgttggacgcggtcgacgcggacgatctgatcctggatatcggcccgcaaaccgcgcagcgctacgccgaactgatcgccagtgccggtaccgtggtgtggaacggtccggtgggcgtgttcgaattcgagtccttcagccacggcaccgaaaccctggcgcgcgcgatcgccagctccaaggcgttctcgatcgctggcggtggcgacaccctggccgcagtggacaaatacgacatcgcccaggacgtcacctacatttccacgggcggcggtgcgttcctggagtttctggaaggcaagaccttgccggcggtggccgcactccaggcccgcggtcagtga

SEQ ID NO: 57275 - protein, 391 aa, Xanthomonas axonopodis
MSIVRMTDLDLSGKRVLIRQDLNVPIDNGQITSEQRITASVPTIKLALEKGAAVMVTSHLGRPKEGSWTEEDSLAPVATRLAALLGVDVPLVRDWVDGVEVAPGQVVLLENCRMNVGEGKDDETLARKYAALCDVFVMDAFGTAHRAQASTHGVIRFAPVAAGGPLLMAELDALAKALDNPAKPLLAIVAGSKVSTKLELLSNLVNKVDQLIVGGGIANTFIAAAGHAVGKSLNEPDLIPTANRIVADAKARGAEIPLPTDVVVAKQFLPDAQASVKSLDAVDADDLILDIGPQTAQRYAELIASAGTVVWNGPVGVFEFESFSHGTETLARAIASSKAFSIAGGGDTLAAVDKYDIAQDVTYISTGGGAFLEFLEGKTLPAVAALQARGQ

SEQ ID NO: 57276 - DNA, 1176 bp, Xanthomonas campestris; identical to SEQ ID NO: 10810
  CDS (1)..(1176): transl_table=11

SEQ ID NO: 57277 - protein, 391 aa, Xanthomonas campestris; identical to SEQ ID NO: 10811

SEQ ID NO: 57278 - DNA, 1194 bp, Xanthobacter flavus
  CDS (1)..(1194): transl_table=11
atgatcgccttccgcaccctcgatgacgccgtggacctcgccgacaagcgggtcctcgtccgtgtcgacctcaacgttcccatggagagcgggcgcgtcaccgacgccacccgtctcaaggccatcctgcccaccattcgggacatcaccggcaagggcggcaaggccgtcctgctggcgcacttagggcggcccaagggccgcgacgaaagccagtcgctcgcccccgtcgccaaggccctcgagggtgaactcggccgcaaggtcgcgttcgcctctgattgcatcggcgacgaggcgaagagcgccgtctcccgcctcgcctccggcgaggtgatcgtgctggagaacacccgcttccatgcgggcgaggagaagaacgcgccggacttcatcgaagccctcgcgagcctcggcgatatctatgtcaacgatgccttttccaccgcccaccgcgcgcacgcctccaccgaggggctggcccgcaagctgccggcctatgccggccgctccatggaaagcgagatcgaggcgctgaccaaggccctcgaggcgccccagcgccccgtgctcgccgtggtcggcggctccaaggtgtccagcaagctcgaactgctcggcaacctcgtgaagaaggtggacatcctcgtcatcggcggcggcatggccaacaccttcctcgccgctctcggcaagaaggtgggcaagtcgctctgcgagcacgacctggccaacaccgcgcgggacatcctgaagaaggccgaggcggccggatgcgagatcgtcctgccggtggacgcggtggtcgccaccgagttcaaggccaatgccgcgcaccgcgtcaccagcgtcgatgacgtgaaggacgacgagatgatgctggacgccggtccggagacggtcggcatcgtcaagcagaagctcgacggggcgaagacggtggtctggaacgggccgttcggcgcgttcgagatgacgccgttcgatgcggcgacggtggccgtggcccgctatgtcggcgacctcacccacaaggggcggttgctgtcggttgcgggcggcggcgacacggtggccgcgctgaaccatgcggggacggcggagcgcttctcctacgtctcgacggccggcggtgccttcctcgagtggctcgagggcaaggcgcttccgggcgtggaggccctgcggcgctga

SEQ ID NO: 57279 - protein, 397 aa, Xanthobacter flavus; identical to SEQ ID NO: 10813

SEQ ID NO: 57280 - DNA, 1176 bp, Xylella fastidiosa
  CDS (1)..(1176)
atgtccatcgtccgcatgactgatctcgctttatccggtaaacgcgtactgattcgtcaggacttgaatgtaccgattgatcagggtcgtattacttccgagcagcgcattattgcttcgcttccgacgatccgtgtagcgctggagcgtggtgcggcggtcatggtgacttcgcatctgggccgtccgaaggagggcgtgtggagtgaggaggattcattggcacccgtggcgaagcgcttgtctcaattgttggggattgaggttccgttgcgtcgcgattgggtggatggcgtgcaggttgcgccagggcagttggtgttattggaaaactgccgaatgaatgtcggcgaagctgagaatgacgaggcgttggcaaggaagtatgcggcgttatgtgatgtgttcgtgatggatgcgtttggcactgcgcaccgtgcccaggcatcaacgcatggggtgatctgttgtgctgcgattgctgccggcggtccgttgttgatggctgagttggatgctttgagccggggattggagcatccggtgaagccgctgctggcgattgtggggggcagtaaggtatcgacgaaactggagttgctttccaatttggtgaataacgttgagcaattgattacggggggaggcattgccaatacgttccttgccgcagccggttactccatcggtaagtcactgtatgagggggatttgatcgagactgctcgggagattattactgcggcgaaagcgcgtggcgctgagattccgttacccacggatgtggttgttgccaagcagtttttgcctggagtcacggcaacggtgaagacggtggatgcaatcgttgcggatgatcttattttggacattggtccgcagacggcacggcactatgctgccttgattgaaacggcggcgacggtggtctggaatggtccagtgggtgtgtttgagttcgatgccttcagcaaggggaccgaggtgttagcgcgggccgttgctgcctcgtctgcgttttcgattgctggtggcggcgataccttggctgccattgataagtatggtgttgcggaccagatcagctacatctccacaggcggcggtgcttttctggagtttttggaaggtaagacgttgccggcggtggctgccttgcaggcgcgcagcggataa

SEQ ID NO: 57281 - protein, 391 aa, Xylella fastidiosa
MSIVRMTDLALSGKRVLIRQDLNVPIDQGRITSEQRIIASLPTIRVALERGAAVMVTSHLGRPKEGVWSEEDSLAPVAKRLSQLLGIEVPLRRDWVDGVQVAPGQLVLLENCRMNVGEAENDEALARKYAALCDVFVMDAFGTAHRAQASTHGVICCAAIAAGGPLLMAELDALSRGLEHPVKPLLAIVGGSKVSTKLELLSNLVNNVEQLITGGGIANTFLAAAGYSIGKSLYEGDLIETAREIITAAKARGAEIPLPTDVVVAKQFLPGVTATVKTVDAIVADDLILDIGPQTARHYAALIETAATVVWNGPVGVFEFDAFSKGTEVLARAVAASSAFSIAGGGDTLAAIDKYGVADQISYISTGGGAFLEFLEGKTLPAVAALQARSG

SEQ ID NO: 57282 - DNA, 1254 bp, Yarrowia lipolytica
  CDS (1)..(1254)
atgtctcttaccaacaagctctccatcaaggatctcgatctcaagaacaagcgagtcttcatccgagtcgactttaacgttcctctcgatggcaccaccatcaccaacaaccagcgaattgttgctgccctgccctccatcaagtatgccattgatcagggtgccaaggctgtgatccttgcttctcatctcggccggcccaacggccagcgagtcgagaagtactctctcaagcccgtccaggccgagctttcaaagctccttggcaagcccgtcaccttccttgacgactgcgtcggccccaaggttgaggaggaggtctccaaggccaaggacggtgaggtcattctcctcgagaacctgcgattccaccccgaggaggagggatcccacaaggacgccgacggcaagaagatcaaggctgaccccgccaaggttgaggagttccgaaagtctctgacttctctcgccgatgtctacgtcaacgacgctttcggaaccgcccaccgagcccactcctccatggtcggcattgagcttccccagcgagccgctggtttccttgtcgccaaggagctcgagttcttcgccaaggctctggagcaccccgagcgacccttccttgccatccttggtggtgccaaggtctccgacaagatccagctcatcgacaacctacttgacaaggtcaacgccctgatcattggtggtggtatggctttcaccttcaagaagacccttgagaacgtcaagattggaaactctctcttcgacgaggatggatccaagattgtcgccggcctcgttgagaaggccaagaagaacaacgtcaagcttgtcttccccgtcgactacgtcaccgccgacaagttctccaaggatgccaaggttggccacgcaaccgacgctgagggtatccccgacggatggcagggtctggactgtggtcccaagtctatcgaggagttccagaaggtcattggcgagtccaagaccatcctctggaacggaccccccggtgtctttgagttcgacaacttcgccaagggtaccaaggctgtgcttgacgcctgtgtcaaggccgttgacaacggtgctaccgtgatcattggtggtggagataccgccactgtcgccaagaagtacggtgccgaggacaagctctcccatgtttccactggaggaggagcttctcttgagcttctcgagggtaagacccttcccggtgtcgctgctctctccgagaagaagtaa

SEQ ID NO: 57283 - protein, 417 aa, Yarrowia lipolytica
MSLTNKLSIKDLDLKNKRVFIRVDFNVPLDGTTITNNQRIVAALPSIKYAIDQGAKAVILASHLGRPNGQRVEKYSLKPVQAELSKLLGKPVTFLDDCVGPKVEEEVSKAKDGEVILLENLRFHPEEEGSHKDADGKKIKADPAKVEEFRKSLTSLADVYVNDAFGTAHRAHSSMVGIELPQRAAGFLVAKELEFFAKALEHPERPFLAILGGAKVSDKIQLIDNLLDKVNALIIGGGMAFTFKKTLENVKIGNSLFDEDGSKIVAGLVEKAKKNNVKLVFPVDYVTADKFSKDAKVGHATDAEGIPDGWQGLDCGPKSIEEFQKVIGESKTILWNGPPGVFEFDNFAKGTKAVLDACVKAVDNGATVIIGGGDTATVAKKYGAEDKLSHVSTGGGASLELLEGKTLPGVAALSEKK

SEQ ID NO: 57284 - DNA, 1164 bp, Yersinia pestis
  CDS (1)..(1164): transl_table=11
atgtctgtaattaagatgaccgatctggatctggctggcaaacgtgttttgatccgtgcggacctcaatgttccggtaaaagaaggcaaagtgacttctgatgcgcgtatccgtgcctctctgccaactatcgaagcggcattgaagcaaggcgctaaagtaatggttacctctcacttgggtcgcccgaccgaaggcgagtacaacgaagagttctccttactgcccgtcgttaactacctgaaagagaagttatcttctccggtacgtctggcgaaggactatctggacggcgttgaaattgcagctggcgagttggttgttctggaaaacgttcgctttaacaaaggcgagaaaaaagacgacgaagccctgtccaagaaatatgccgcactgtgcgatgtttatgtgatggatgcttttggtaccgctcaccgcgctcaggcatcgactcacggtgtgggtaaatttgcccctatcgcttgcgccggcccgctgttgtcagcagagctggaagcattgggtaaagcgctgggtaacccagcgcgtccaatggttgctatcgttggtggctctaaagtttcaactaaactgaccgtgctgggcgcgttgtctaaaatcgcggataaactgattgttggcggtggtatcgctaataccttcgttgcggctcaaggccacaatgtcggtaaatctctgtacgaagctgatctgatcccagaagcgaaaagactgctagagacctgtgatatccctgttcctactgatgttcgtgttgccactgagttctctgaaacggcagccgcgacgctgaaacccgcgaacgaaattaaagatgacgaacaaattttggatctgggcgacgaatctgcggagcgtctggctgagatcctgaaaaatgccaaaaccattctgtggaatggtccggttggtgtgttcgagttccctaacttccgtaaagggaccgagatcgtggctcgcgccattgcagaaagcgaagcattttctatcgcaggcggtggtgatactttggcagcaatcgatctcttcggtattgctgaccaaatctcctacatttctactggcggtggtgctttcctggagttcgtcgaagggaaaaaactgcctgccgtagtgatgctggaagagcgcgctaagcagtaa

SEQ ID NO: 57285 - protein, 387 aa, Yersinia pestis; identical to SEQ ID NO: 10397

SEQ ID NO: 57286 - DNA, 1194 bp, Zymomonas mobilis
  CDS (1)..(1194): transl_table=11
atggcttttcgtacattagatgatattggtgacgtcaaaggtaagcgcgttcttgttcgcgaagatctgaacgttcctatggatggcgatcgcgttacggatgatactcgtctgcgcgctgcaatcccgaccgttaatgaattggctgaaaagggcgccaaagtccttattctggctcacttcggtcgtccaaaaggtcagccgaatcctgaaatgtccttggctcgcatcaaagatgcgctggctggcgttctgggtcgtccggttcacttcatcaatgacatcaaaggtgaagctgcagcaaaagccgttgatgccctgaatcctggtgccgttgctcttcttgaaaacacccgcttttatgctggtgaagaaaagaatgatccggctctggcagcagaagtagctaagctcggcgatttctatgtcaatgatgctttctcggctgctcaccgcgcccatgtttcgaccgaaggtctggctcacaagctgcctgctttcgctggtcgtgccatgcagaaagaattagaagctcttgaagctgcccttggtaagccgacccacccggtcgcagccgttgtcggtggtgctaaagtttctaccaagctcgacgttctgaccaaccttgtttccaaggttgaccatctgatcatcggtggtggtatggctaataccttcctcgctgctcagggtgttgatgttggtaaatcgctttgtgagcatgagctgaaagataccgttaaaggtattttcgctgctgctgaaaaaacgggctgcaaaatccatcttccgagcgatgtcgttgtcgccaaggaattcaaagccaatccgccgatccgtaccattccggtcagcgacgttgctgctgacgaaatgatccttgacgttggcccgaaagccgtcgctgctttgaccgaagttctgaaagcttccaagaccttggtctggaatggcccgttgggcgctttcgaaattgaacctttcgataaagctacggttgctctcgctaaggaagccgctgctttgaccaaagccggttctttgatctctgttgctggtggtggtgacacggttgccgctcttaaccatgctggtgtggcaaaagactttagctttgtctcaacggctggtggtgctttcctcgaatggatggaaggtaaagagctgccgggtgttaaagccctcgaagcttaa

SEQ ID NO: 57287 - protein, 397 aa, Zymomonas mobilis; identical to SEQ ID NO: 10473

SEQ ID NO: 57288 - DNA, 26 bp, Artificial sequence
  Primer sequence
atgtctttatcttcaaagttgtctgt

SEQ ID NO: 57289 - DNA, 27 bp, Artificial sequence
  Primer sequence
ttatttcttttcggataagaaagcaac

SEQ ID NO: 57290 - protein, 564 aa, Artificial sequence
  Consensus
  Variant (2)..(5): Xaa in position 2 to 5 is any amino acid
  Variant (7)..(8): Xaa in position 7 to 8 is any amino acid
  Variant (10)..(10): Xaa in position 10 is any amino acid
  Variant (11)..(14): Xaa in position 11 to 14 is any or no amino acid
  Variant (16)..(16): Xaa in position 16 is any amino acid
  Variant (19)..(19): Xaa in position 19 is any amino acid
  Variant (21)..(21): Xaa in position 21 is any amino acid
  Variant (26)..(29): Xaa in position 26 to 29 is any amino acid
  Variant (30)..(32): Xaa in position 30 to 32 is any or no amino acid
  Variant (34)..(37): Xaa in position 34 to 37 is any amino acid
  Variant (40)..(42): Xaa in position 40 to 42 is any amino acid
  Variant (47)..(53): Xaa in position 47 to 53 is any amino acid
  Variant (54)..(56): Xaa in position 54 to 56 is any or no amino acid
  Variant (60)..(60): Xaa in position 60 is any amino acid
  Variant (63)..(63): Xaa in position 63 is any amino acid
  Variant (67)..(73): Xaa in position 67 to 73 is any amino acid
  Variant (74)..(170): Xaa in position 74 to 170 is any or no amino acid
  Variant (173)..(173): Xaa in position 173 is any amino acid
  Variant (176)..(178): Xaa in position 176 to 178 is any amino acid
  Variant (180)..(182): Xaa in position 180 to 182 is any amino acid
  Variant (184)..(184): Xaa in position 184 is any amino acid
  Variant (185)..(190): Xaa in position 185 to 190 is any or no amino acid
  Variant (192)..(203): Xaa in position 192 to 203 is any amino acid
  Variant (204)..(211): Xaa in position 204 to 211 is any or no amino acid
  Variant (213)..(213): Xaa in position 213 is any or no amino acid
  Variant (220)..(220): Xaa in position 220 is any amino acid
  Variant (223)..(225): Xaa in position 223 to 225 is any amino acid
  Variant (227)..(237): Xaa in position 227 to 237 is any amino acid
  Variant (238)..(260): Xaa in position 238 to 260 is any or no amino acid
  Variant (262)..(262): Xaa in position 262 is any amino acid
  Variant (264)..(264): Xaa in position 264 is any amino acid
  Variant (266)..(268): Xaa in position 266 to 268 is any or no amino acid
  Variant (272)..(272): Xaa in position 272 is any amino acid
  Variant (277)..(277): Xaa in position 277 is any amino acid
  Variant (282)..(282): Xaa in position 282 is any amino acid
  Variant (285)..(286): Xaa in position 285 to 286 is any amino acid
  Variant (289)..(293): Xaa in position 289 to 293 is any amino acid
  Variant (294)..(300): Xaa in position 294 to 300 is any or no amino acid
  Variant (303)..(303): Xaa in position 303 is any amino acid
  Variant (306)..(307): Xaa in position 306 to 307 is any amino acid
  Variant (310)..(314): Xaa in position 310 to 314 is any amino acid
  Variant (315)..(316): Xaa in position 315 to 316 is any or no amino acid
  Variant (318)..(319): Xaa in position 318 to 319 is any amino acid
  Variant (321)..(321): Xaa in position 321 is any amino acid
  Variant (324)..(326): Xaa in position 324 to 326 is any amino acid
  Variant (335)..(335): Xaa in position 335 is any amino acid
  Variant (338)..(338): Xaa in position 338 is any amino acid
  Variant (341)..(342): Xaa in position 341 to 342 is any amino acid
  Variant (344)..(348): Xaa in position 344 to 348 is any amino acid
  Variant (349)..(351): Xaa in position 349 to 351 is any or no amino acid
  Variant (360)..(360): Xaa in position 360 is any amino acid
  Variant (363)..(370): Xaa in position 363 to 370 is any amino acid
  Variant (371)..(380): Xaa in position 371 to 380 is any or no amino acid
  Variant (382)..(382): Xaa in position 382 is any or no amino acid
  Variant (385)..(385): Xaa in position 385 is any amino acid
  Variant (387)..(394): Xaa in position 387 to 394 is any amino acid
  Variant (395)..(395): Xaa in position 395 is any or no amino acid
  Variant (398)..(401): Xaa in position 398 to 401 is any amino acid
  Variant (402)..(406): Xaa in position 402 to 406 is any or no amino acid
  Variant (408)..(408): Xaa in position 408 is any amino acid
  Variant (411)..(411): Xaa in position 411 is any amino acid
  Variant (413)..(425): Xaa in position 413 to 425 is any amino acid
  Variant (426)..(443): Xaa in position 426 to 443 is any or no amino acid
  Variant (445)..(450): Xaa in position 445 to 450 is any amino acid
  Variant (455)..(456): Xaa in position 455 to 456 is any amino acid
  Variant (458)..(464): Xaa in position 458 to 464 is any amino acid
  Variant (466)..(467): Xaa in position 466 to 467 is any amino acid
  Variant (468)..(475): Xaa in position 468 to 475 is any or no amino acid
  Variant (477)..(477): Xaa in position 477 is any amino acid
  Variant (485)..(485): Xaa in position 485 is any amino acid
  Variant (490)..(492): Xaa in position 490 to 492 is any amino acid
  Variant (493)..(493): Xaa in position 493 is any or no amino acid
  Variant (495)..(496): Xaa in position 495 to 496 is any amino acid
  Variant (499)..(500): Xaa in position 499 to 500 is any amino acid
  Variant (502)..(504): Xaa in position 502 to 504 is any amino acid
  Variant (506)..(509): Xaa in position 506 to 509 is any amino acid
  Variant (510)..(515): Xaa in position 510 to 515 is any or no amino acid
  Variant (518)..(518): Xaa in position 518 is any amino acid
  Variant (524)..(535): Xaa in position 524 to 535 is any amino acid
  Variant (536)..(539): Xaa in position 536 to 539 is any or no amino acid
  Variant (549)..(549): Xaa in position 549 is any amino acid
  Variant (552)..(552): Xaa in position 552 is any amino acid
  Variant (557)..(557): Xaa in position 557 is any amino acid
  Variant (562)..(563): Xaa in position 562 to 563 is any amino acid
LXXXXLXXKXXXXXVXIRXDXNVPLXXXXXXXIXXXXRIXXXLPTIXXXXXXXXXXVILXSHXGRPXXXXXXXXXXXXXXXXXXXXXXXXXXXXXXXXXXXXXXXXXXXXXXXXXXXXXXXXXXXXXXXXXXXXXXXXXXXXXXXXXXXXXXXXXXXXXXXXXXXXXXXXSLXPVXXXLXXXLXXXXXXXVXXXXXXXXXXXXXXXXXXXXGXVLLLENXRFXXXEXXXXXXXXXXXXXXXXXXXXXXXXXXXXXXXXXXAXLXDXXXVYVXDAFGXAHRAXASXXGVXXXXXXXXXXXXAGXLMXXELXXXXXXXLXXPXRPXXXILGGAKVSXKIXVIXXLXXXXXXXXLIIGGGMAXTFXXXXXXXXXXXXXXXXXXGXSLXEXXXXXXXXXLLXXXXXXXXXIXLPXDXXXXXXXXXXXXXXXXXXXXXXXXXXXXXXXIXXXXXXLDIGXXTXXXXXXXIXXXXXXXXXXAXTIVWNGPXGVFEXXXXFXXGTXXVXXXIXXXXXXXXXXSIXGGGDTXXXXXXXXXXXXXXXXSHISTGGGAXLEXLEGKXLPGVXXL

SEQ ID NO: 57291 - protein, 50 aa, Artificial sequence
  Consensus
  Variant (2)..(2): Xaa in position 2 is Phe, Ile, Leu or Val
  Variant (3)..(3): Xaa in position 3 is any amino acid
  Variant (5)..(5): Xaa in position 5 is any amino acid
  Variant (7)..(7): Xaa in position 7 is any amino acid
  Variant (9)..(9): Xaa in position 9 is Ser or Val
  Variant (11)..(20): Xaa in position 11 to 20 is any amino acid
  Variant (21)..(21): Xaa in position 21 is any or no amino acid
  Variant (23)..(44): Xaa in position 23 to 44 is any amino acid
  Variant (45)..(45): Xaa in position 45 is any or no amino acid
  Variant (47)..(47): Xaa in position 47 is any amino acid
  Variant (48)..(48): Xaa in position 48 is Gly or Ser
  Variant (49)..(49): Xaa in position 49 is Asp, Lys or Arg
  Variant (50)..(50): Xaa in position 50 is Ile, Pro or Val
VXXRXDXNXPXXXXXXXXXXXRXXXXXXXXXXXXXXXXXXXXXXXHXXXX

SEQ ID NO: 57292 - protein, 16 aa, Artificial sequence
  Consensus
  Variant (2)..(4): Xaa in position 2 to 4 is any amino acid
  Variant (5)..(5): Xaa in position 5 is any or no amino acid
  Variant (7)..(7): Xaa in position 7 is any or no amino acid
  Variant (10)..(10): Xaa in position 10 is any amino acid
  Variant (12)..(15): Xaa in position 12 to 15 is any amino acid
GXXXXLXENXRXXXXE

SEQ ID NO: 57293 - protein, 12 aa, Artificial sequence
  Consensus
  Variant (4)..(4): Xaa in position 4 is Ala, Gly or Ser
  Variant (5)..(5): Xaa in position 5 is Ala, Ser or Thr
  Variant (9)..(11): Xaa in position 9 to 11 is any amino acid
  Variant (12)..(12): Xaa in position 12 is Asp, Ser or Thr
DAFXXAHRXXXX

SEQ ID NO: 57294 - protein, 60 aa, Artificial sequence
  Consensus
  Variant (2)..(2): Xaa in position 2 is any amino acid
  Variant (4)..(4): Xaa in position 4 is any amino acid
  Variant (5)..(6): Xaa in position 5 to 6 is any or no amino acid
  Variant (8)..(20): Xaa in position 8 to 20 is any amino acid
  Variant (21)..(22): Xaa in position 21 to 22 is any or no amino acid
  Variant (24)..(25): Xaa in position 24 to 25 is any amino acid
  Variant (26)..(26): Xaa in position 26 is Ala, Gly, Ser, Thr or Val
  Variant (27)..(28): Xaa in position 27 to 28 is Ile, Leu, Met or Val
  Variant (29)..(29): Xaa in position 29 is Ala or Gly
  Variant (31)..(31): Xaa in position 31 is Ala or Ser
  Variant (33)..(33): Xaa in position 33 is Ile, Leu, Met or Val
  Variant (34)..(34): Xaa in position 34 is any amino acid
  Variant (35)..(35): Xaa in position 35 is Asp, Glu, Gly, Asn, Ser or Thr
  Variant (37)..(37): Xaa in position 37 is Phe, Ile, Leu or Met
  Variant (38)..(38): Xaa in position 38 is any amino acid
  Variant (39)..(39): Xaa in position 39 is Ala, Ile, Leu or Val
  Variant (40)..(40): Xaa in position 40 is Ile, Leu or Val
  Variant (41)..(42): Xaa in position 41 to 42 is any amino acid
  Variant (43)..(43): Xaa in position 43 is Ile, Leu or Met
  Variant (44)..(47): Xaa in position 44 to 47 is any amino acid
  Variant (48)..(48): Xaa in position 48 is Asp, Glu, Gly, Asn, Gln, Ser or Thr
  Variant (49)..(49): Xaa in position 49 is any amino acid
  Variant (50)..(50): Xaa in position 50 is Phe, Ile, Leu, Met or Val
  Variant (51)..(51): Xaa in position 51 is Phe, Ile, Leu or Val
  Variant (52)..(53): Xaa in position 52 to 53 is any amino acid
  Variant (55)..(55): Xaa in position 55 is Ala or Gly
  Variant (56)..(56): Xaa in position 56 is Ile, Leu or Met
  Variant (57)..(58): Xaa in position 57 to 58 is any amino acid
GXLXXXEXXXXXXXXXXXXXXXPXXXXXXGXKXXXKXXXXXXXXXXXXXXXXXGXXXXTF

SEQ ID NO: 57295 - protein, 62 aa, Artificial sequence
  Consensus
  Variant (2)..(2): Xaa in position 2 is any amino acid
  Variant (3)..(3): Xaa in position 3 is Ala or Gly
  Variant (4)..(5): Xaa in position 4 to 5 is any amino acid
  Variant (6)..(6): Xaa in position 6 is Ala, Ser or Thr
  Variant (7)..(13): Xaa in position 7 to 13 is any amino acid
  Variant (14)..(14): Xaa in position 14 is Phe, Ile, Leu, Met or Val
  Variant (15)..(16): Xaa in position 15 to 16 is any amino acid
  Variant (17)..(17): Xaa in position 17 is Ala, Cys, Ser, Thr or Val
  Variant (18)..(21): Xaa in position 18 to 21 is any amino acid
  Variant (26)..(26): Xaa in position 26 is any amino acid
  Variant (28)..(28): Xaa in position 28 is any amino acid
  Variant (31)..(36): Xaa in position 31 to 36 is any amino acid
  Variant (37)..(37): Xaa in position 37 is Ala, Gly or Pro
  Variant (39)..(54): Xaa in position 39 to 54 is any amino acid
  Variant (55)..(58): Xaa in position 55 to 58 is any or no amino acid
  Variant (62)..(62): Xaa in position 62 is Asp, Glu or Gly
DXXXXXXXXXXXXXXXXXXXXWNGPXGXFEXXXXXXXTXXXXXXXXXXXXXXXXXXXXGGGX

SEQ ID NO: 57296 - protein, 23 aa, Artificial sequence
  Consensus
  Variant (3)..(3): Xaa in position 3 is Ala or Gly
  Variant (7)..(7): Xaa in position 7 is any amino acid
  Variant (10)..(10): Xaa in position 10 is any amino acid
  Variant (11)..(11): Xaa in position 11 is Phe, Ile, Leu, Met or Val
  Variant (13)..(13): Xaa in position 13 is any or no amino acid
  Variant (15)..(15): Xaa in position 15 is any amino acid
  Variant (16)..(16): Xaa in position 16 is any or no amino acid
  Variant (18)..(18): Xaa in position 18 is any amino acid
  Variant (19)..(19): Xaa in position 19 is Ala, Cys, Gly or Ser
  Variant (20)..(22): Xaa in position 20 to 22 is any amino acid
  Variant (23)..(23): Xaa in position 23 is Ile, Leu, Met or Val
STXGGAXLEXXEXGXXLXXXXXX

SEQ ID NO: 57297 - DNA, 1113 bp, Saccharomyces cerevisiae; identical to SEQ ID NO: 1363
  CDS (1)..(1113)

SEQ ID NO: 57298 - protein, 370 aa, Saccharomyces cerevisiae; identical to SEQ ID NO: 1364

SEQ ID NO: 57299 - DNA, 1086 bp, Deinococcus radiodurans; identical to SEQ ID NO: 1327
  CDS (1)..(1086)

SEQ ID NO: 57300 - protein, 361 aa, Deinococcus radiodurans; identical to SEQ ID NO: 1328

SEQ ID NO: 57301 - DNA, 1071 bp, Salmonella enterica subsp. enterica serovar Typhi; identical to SEQ ID NO: 2245
  CDS (1)..(1071)

SEQ ID NO: 57302 - protein, 356 aa, Salmonella enterica subsp. enterica serovar Typhi; identical to SEQ ID NO: 2246

SEQ ID NO: 57303 - DNA, 1071 bp, Yersinia pestis; identical to SEQ ID NO: 2247
  CDS (1)..(1071)

SEQ ID NO: 57304 - protein, 356 aa, Yersinia pestis; identical to SEQ ID NO: 2248

SEQ ID NO: 57305 - DNA, 1047 bp, Yersinia pestis; identical to SEQ ID NO: 1331
  CDS (1)..(1047)

SEQ ID NO: 57306 - protein, 348 aa, Yersinia pestis; identical to SEQ ID NO: 1332

SEQ ID NO: 57307 - DNA, 1053 bp, Escherichia coli; identical to SEQ ID NO: 2251
  CDS (1)..(1053)

SEQ ID NO: 57308 - protein, 350 aa, Escherichia coli; identical to SEQ ID NO: 1580

SEQ ID NO: 57309 - DNA, 1071 bp, Escherichia coli; identical to SEQ ID NO: 1333
  CDS (1)..(1071)

SEQ ID NO: 57310 - protein, 356 aa, Escherichia coli; identical to SEQ ID NO: 1334

SEQ ID NO: 57311 - DNA, 1131 bp, Nostoc sp. PCC 7120; identical to SEQ ID NO: 1335
  CDS (1)..(1131)

SEQ ID NO: 57312 - protein, 376 aa, Nostoc sp. PCC 7120; identical to SEQ ID NO: 1336

SEQ ID NO: 57313 - DNA, 1053 bp, Salmonella enterica subsp. enterica serovar Typhi; identical to SEQ ID NO: 1337
  CDS (1)..(1053)

SEQ ID NO: 57314 - protein, 350 aa, Salmonella enterica subsp. enterica serovar Typhi; identical to SEQ ID NO: 1338

SEQ ID NO: 57315 - DNA, 1077 bp, Pseudomonas aeruginosa; identical to SEQ ID NO: 1339
  CDS (1)..(1077)

SEQ ID NO: 57316 - protein, 358 aa, Pseudomonas aeruginosa; identical to SEQ ID NO: 1340

SEQ ID NO: 57317 - DNA, 1074 bp, Vibrio cholerae; identical to SEQ ID NO: 1343
  CDS (1)..(1074)

SEQ ID NO: 57318 - protein, 357 aa, Vibrio cholerae; identical to SEQ ID NO: 1344

SEQ ID NO: 57319 - DNA, 1038 bp, Lactococcus lactis subsp. lactis; identical to SEQ ID NO: 1345
  CDS (1)..(1038)

SEQ ID NO: 57320 - protein, 345 aa, Lactococcus lactis subsp. lactis; identical to SEQ ID NO: 1346

SEQ ID NO: 57321 - DNA, 1023 bp, Lactococcus lactis subsp. lactis; identical to SEQ ID NO: 1347
  CDS (1)..(1023)

SEQ ID NO: 57322 - protein, 340 aa, Lactococcus lactis subsp. lactis; identical to SEQ ID NO: 1348

SEQ ID NO: 57323 - DNA, 1032 bp, Streptococcus pneumoniae; identical to SEQ ID NO: 1349
  CDS (1)..(1032)

SEQ ID NO: 57324 - protein, 343 aa, Streptococcus pneumoniae; identical to SEQ ID NO: 1350

SEQ ID NO: 57325 - DNA, 1056 bp, Neisseria meningitidis; identical to SEQ ID NO: 2269
  CDS (1)..(1056)

SEQ ID NO: 57326 - protein, 351 aa, Neisseria meningitidis; identical to SEQ ID NO: 2270

SEQ ID NO: 57327 - DNA, 1095 bp, Pseudomonas aeruginosa; identical to SEQ ID NO: 1351
  CDS (1)..(1095)

SEQ ID NO: 57328 - protein, 364 aa, Pseudomonas aeruginosa; identical to SEQ ID NO: 1352

SEQ ID NO: 57329 - DNA, 1032 bp, Streptococcus pneumoniae; identical to SEQ ID NO: 1355
  CDS (1)..(1032)

SEQ ID NO: 57330 - protein, 343 aa, Streptococcus pneumoniae; identical to SEQ ID NO: 1356

SEQ ID NO: 57331 - DNA, 1143 bp, Xylella fastidiosa; identical to SEQ ID NO: 1603
  CDS (1)..(1143)

SEQ ID NO: 57332 - protein, 380 aa, Xylella fastidiosa; identical to SEQ ID NO: 1604

SEQ ID NO: 57333 - DNA, 1047 bp, Buchnera aphidicola; identical to SEQ ID NO: 1357
  CDS (1)..(1047)

SEQ ID NO: 57334 - protein, 348 aa, Buchnera aphidicola; identical to SEQ ID NO: 1358

SEQ ID NO: 57335 - DNA, 1104 bp, Corynebacterium glutamicum; identical to SEQ ID NO: 2279
  CDS (1)..(1104)

SEQ ID NO: 57336 - protein, 367 aa, Corynebacterium glutamicum; identical to SEQ ID NO: 2280

SEQ ID NO: 57337 - DNA, 1089 bp, Haemophilus influenzae; identical to SEQ ID NO: 1359
  CDS (1)..(1089)

SEQ ID NO: 57338 - protein, 362 aa, Haemophilus influenzae; identical to SEQ ID NO: 1360

SEQ ID NO: 57339 - DNA, 1502 bp, Candida albicans; identical to SEQ ID NO: 1361
  CDS (336)..(1442)

SEQ ID NO: 57340 - protein, 368 aa, Candida albicans; identical to SEQ ID NO: 1362

SEQ ID NO: 57341 - DNA, 2048 bp, Saccharomyces cerevisiae; identical to SEQ ID NO: 1365
  CDS (619)..(1731)

SEQ ID NO: 57342 - protein, 370 aa, Saccharomyces cerevisiae; identical to SEQ ID NO: 1366

SEQ ID NO: 57343 - DNA, 1107 bp, Schizosaccharomyces pombe; identical to SEQ ID NO: 1367
  CDS (1)..(1107)

SEQ ID NO: 57344 - protein, 368 aa, Schizosaccharomyces pombe; identical to SEQ ID NO: 1368

SEQ ID NO: 57345 - DNA, 1089 bp, Amycolatopsis orientalis; identical to SEQ ID NO: 1369
  CDS (1)..(1089)

SEQ ID NO: 57346 - protein, 362 aa, Amycolatopsis orientalis; identical to SEQ ID NO: 1370

SEQ ID NO: 57347 - DNA, 1119 bp, Schizosaccharomyces pombe; identical to SEQ ID NO: 1371
  CDS (1)..(1119)

SEQ ID NO: 57348 - protein, 372 aa, Schizosaccharomyces pombe; identical to SEQ ID NO: 1372

SEQ ID NO: 57349 - DNA, 1083 bp, Methylophilus methylotrophus; identical to SEQ ID NO: 1375
  CDS (1)..(1083)

SEQ ID NO: 57350 - protein, 360 aa, Methylophilus methylotrophus; identical to SEQ ID NO: 1376

SEQ ID NO: 57351 - DNA, 1770 bp, Debaryomyces hansenii; identical to SEQ ID NO: 2295
  CDS (1)..(1770)

SEQ ID NO: 57352 - protein, 589 aa, Debaryomyces hansenii; identical to SEQ ID NO: 2296

SEQ ID NO: 57353 - DNA, 1107 bp, Debaryomyces hansenii; identical to SEQ ID NO: 1377
  CDS (1)..(1107)

SEQ ID NO: 57354 - protein, 368 aa, Debaryomyces hansenii; identical to SEQ ID NO: 1378

SEQ ID NO: 57355 - DNA, 1074 bp, Yarrowia lipolytica; identical to SEQ ID NO: 1379
  CDS (1)..(1074)

SEQ ID NO: 57356 - protein, 357 aa, Yarrowia lipolytica; identical to SEQ ID NO: 1380

SEQ ID NO: 57357 - DNA, 1089 bp, Yarrowia lipolytica; identical to SEQ ID NO: 1381
  CDS (1)..(1089)

SEQ ID NO: 57358 - protein, 362 aa, Yarrowia lipolytica; identical to SEQ ID NO: 1382

SEQ ID NO: 57359 - DNA, 1119 bp, Kluyveromyces lactis; identical to SEQ ID NO: 1383
  CDS (1)..(1119)

SEQ ID NO: 57360 - protein, 372 aa, Kluyveromyces lactis; identical to SEQ ID NO: 1384

SEQ ID NO: 57361 - DNA, 1095 bp, Kluyveromyces lactis; identical to SEQ ID NO: 1385
  CDS (1)..(1095)

SEQ ID NO: 57362 - protein, 364 aa, Kluyveromyces lactis; identical to SEQ ID NO: 1386

SEQ ID NO: 57363 - DNA, 1074 bp, Erwinia carotovora subsp; identical to SEQ ID NO: 1387
  CDS (1)..(1074)

SEQ ID NO: 57364 - protein, 357 aa, Erwinia carotovora subsp; identical to SEQ ID NO: 1388

SEQ ID NO: 57365 - DNA, 1047 bp, Erwinia carotovora subsp; identical to SEQ ID NO: 1389
  CDS (1)..(1047)

SEQ ID NO: 57366 - protein, 348 aa, Erwinia carotovora subsp; identical to SEQ ID NO: 1390

SEQ ID NO: 57367 - DNA, 1056 bp, Erwinia carotovora subsp; identical to SEQ ID NO: 1391
  CDS (1)..(1056)

SEQ ID NO: 57368 - protein, 351 aa, Erwinia carotovora subsp; identical to SEQ ID NO: 1392

SEQ ID NO: 57369 - DNA, 1113 bp, Acinetobacter sp; identical to SEQ ID NO: 1393
  CDS (1)..(1113)

SEQ ID NO: 57370 - protein, 370 aa, Acinetobacter sp; identical to SEQ ID NO: 1394

SEQ ID NO: 57371 - DNA, 1056 bp, Acinetobacter sp; identical to SEQ ID NO: 1395
  CDS (1)..(1056)

SEQ ID NO: 57372 - protein, 351 aa, Acinetobacter sp; identical to SEQ ID NO: 1396

SEQ ID NO: 57373 - DNA, 1119 bp, Candida glabrata; identical to SEQ ID NO: 1397
  CDS (1)..(1119)

SEQ ID NO: 57374 - protein, 372 aa, Candida glabrata; identical to SEQ ID NO: 1398

SEQ ID NO: 57375 - DNA, 1071 bp, Candida glabrata; identical to SEQ ID NO: 1399
  CDS (1)..(1071)

SEQ ID NO: 57376 - protein, 356 aa, Candida glabrata; identical to SEQ ID NO: 1400

SEQ ID NO: 57377 - DNA, 1083 bp, Photobacterium profundum; identical to SEQ ID NO: 1401
  CDS (1)..(1083)

SEQ ID NO: 57378 - protein, 360 aa, Photobacterium profundum; identical to SEQ ID NO: 1402

SEQ ID NO: 57379 - DNA, 1053 bp, Photobacterium profundum; identical to SEQ ID NO: 1403
  CDS (1)..(1053)

SEQ ID NO: 57380 - protein, 350 aa, Photobacterium profundum; identical to SEQ ID NO: 1404

SEQ ID NO: 57381 - DNA, 1113 bp, Photobacterium profundum; identical to SEQ ID NO: 1405
  CDS (1)..(1113)

SEQ ID NO: 57382 - protein, 370 aa, Photobacterium profundum; identical to SEQ ID NO: 1406

SEQ ID NO: 57383 - DNA, 1056 bp, Photobacterium profundum; identical to SEQ ID NO: 1407
  CDS (1)..(1056)

SEQ ID NO: 57384 - protein, 351 aa, Photobacterium profundum; identical to SEQ ID NO: 1408

SEQ ID NO: 57385 - DNA, 1092 bp, Parachlamydia sp; identical to SEQ ID NO: 1409
  CDS (1)..(1092)

SEQ ID NO: 57386 - protein, 363 aa, Parachlamydia sp; identical to SEQ ID NO: 1410

SEQ ID NO: 57387 - DNA, 1095 bp, Rhodopseudomonas palustris; identical to SEQ ID NO: 1411
  CDS (1)..(1095)

SEQ ID NO: 57388 - protein, 364 aa, Rhodopseudomonas palustris; identical to SEQ ID NO: 1412

SEQ ID NO: 57389 - DNA, 1100 bp, Amycolatopsis methanolica; identical to SEQ ID NO: 1413
  CDS (1)..(1086)

SEQ ID NO: 57390 - protein, 361 aa, Amycolatopsis methanolica; identical to SEQ ID NO: 1414

SEQ ID NO: 57391 - DNA, 1071 bp, Treponema denticola; identical to SEQ ID NO: 1415
  CDS (1)..(1071)

SEQ ID NO: 57392 - protein, 356 aa, Treponema denticola; identical to SEQ ID NO: 1416

SEQ ID NO: 57393 - DNA, 1068 bp, Geobacter sulfurreducens; identical to SEQ ID NO: 1417
  CDS (1)..(1068)

SEQ ID NO: 57394 - protein, 355 aa, Geobacter sulfurreducens; identical to SEQ ID NO: 1418

SEQ ID NO: 57395 - DNA, 1095 bp, Ashbya gossypii; identical to SEQ ID NO: 1419
  CDS (1)..(1095)

SEQ ID NO: 57396 - protein, 364 aa, Ashbya gossypii; identical to SEQ ID NO: 1420

SEQ ID NO: 57397 - DNA, 1122 bp, Ashbya gossypii; identical to SEQ ID NO: 1421
  CDS (1)..(1122)

SEQ ID NO: 57398 - protein, 373 aa, Ashbya gossypii; identical to SEQ ID NO: 1422

SEQ ID NO: 57399 - DNA, 1098 bp, Amycolatopsis balhimycina; identical to SEQ ID NO: 1423
  CDS (1)..(1098)

SEQ ID NO: 57400 - protein, 365 aa, Amycolatopsis balhimycina; identical to SEQ ID NO: 1424

SEQ ID NO: 57401 - DNA, 1053 bp, Vibrio vulnificus; identical to SEQ ID NO: 2345
  CDS (1)..(1053)

SEQ ID NO: 57402 - protein, 350 aa, Vibrio vulnificus; identical to SEQ ID NO: 2346

SEQ ID NO: 57403 - DNA, 1047 bp, Photorhabdus luminescens; identical to SEQ ID NO: 1427
  CDS (1)..(1047)

SEQ ID NO: 57404 - protein, 348 aa, Photorhabdus luminescens; identical to SEQ ID NO: 1428

SEQ ID NO: 57405 - DNA, 1053 bp, Photorhabdus luminescens; identical to SEQ ID NO: 1429
  CDS (1)..(1053)

SEQ ID NO: 57406 - protein, 350 aa, Photorhabdus luminescens; identical to SEQ ID NO: 1430

SEQ ID NO: 57407 - DNA, 1095 bp, Photorhabdus luminescens; identical to SEQ ID NO: 1431
  CDS (1)..(1095)

SEQ ID NO: 57408 - protein, 364 aa, Photorhabdus luminescens; identical to SEQ ID NO: 1432

SEQ ID NO: 57409 - DNA, 1119 bp, Gloeobacter violaceus; identical to SEQ ID NO: 1433
  CDS (1)..(1119)

SEQ ID NO: 57410 - protein, 372 aa, Gloeobacter violaceus; identical to SEQ ID NO: 1434

SEQ ID NO: 57411 - DNA, 1107 bp, Chromobacterium violaceum; identical to SEQ ID NO: 1435
  CDS (1)..(1107)

SEQ ID NO: 57412 - protein, 368 aa, Chromobacterium violaceum; identical to SEQ ID NO: 1436

SEQ ID NO: 57413 - DNA, 1059 bp, Chromobacterium violaceum; identical to SEQ ID NO: 1437
  CDS (1)..(1059)

SEQ ID NO: 57414 - protein, 352 aa, Chromobacterium violaceum; identical to SEQ ID NO: 1438

SEQ ID NO: 57415 - DNA, 1140 bp, Neurospora crassa; identical to SEQ ID NO: 1439
  CDS (1)..(1140)

SEQ ID NO: 57416 - protein, 379 aa, Neurospora crassa; identical to SEQ ID NO: 1440

SEQ ID NO: 57417 - DNA, 1092 bp, Neurospora crassa; identical to SEQ ID NO: 1441
  CDS (1)..(1092)

SEQ ID NO: 57418 - protein, 363 aa, Neurospora crassa; identical to SEQ ID NO: 1442

SEQ ID NO: 57419 - DNA, 1068 bp, Synechococcus sp; identical to SEQ ID NO: 1443
  CDS (1)..(1068)

SEQ ID NO: 57420 - protein, 355 aa, Synechococcus sp; identical to SEQ ID NO: 1444

SEQ ID NO: 57421 - DNA, 1053 bp, Rhodopirellula baltica; identical to SEQ ID NO: 1445
  CDS (1)..(1053)

SEQ ID NO: 57422 - protein, 350 aa, Rhodopirellula baltica; identical to SEQ ID NO: 1446

SEQ ID NO: 57423 - DNA, 1068 bp, Prochlorococcus marinus subsp; identical to SEQ ID NO: 1447
  CDS (1)..(1068)

SEQ ID NO: 57424 - protein, 355 aa, Prochlorococcus marinus subsp; identical to SEQ ID NO: 1448

SEQ ID NO: 57425 - DNA, 1083 bp, Prochlorococcus marinus; identical to SEQ ID NO: 1449
  CDS (1)..(1083)

SEQ ID NO: 57426 - protein, 360 aa, Prochlorococcus marinus; identical to SEQ ID NO: 1450

SEQ ID NO: 57427 - DNA, 1074 bp, Prochlorococcus marinus; identical to SEQ ID NO: 1451
  CDS (1)..(1074)

SEQ ID NO: 57428 - protein, 357 aa, Prochlorococcus marinus; identical to SEQ ID NO: 1452

SEQ ID NO: 57429 - DNA, 1113 bp, Haemophilus ducreyi; identical to SEQ ID NO: 1453
  CDS (1)..(1113)

SEQ ID NO: 57430 - protein, 370 aa, Haemophilus ducreyi; identical to SEQ ID NO: 1454

SEQ ID NO: 57431 - DNA, 1080 bp, Haemophilus ducreyi; identical to SEQ ID NO: 1455
  CDS (1)..(1080)

SEQ ID NO: 57432 - protein, 359 aa, Haemophilus ducreyi; identical to SEQ ID NO: 1456

SEQ ID NO: 57433 - DNA, 1086 bp, Candidatus Blochmannia floridanus; identical to SEQ ID NO: 1457
  CDS (1)..(1086)

SEQ ID NO: 57434 - protein, 361 aa, Candidatus Blochmannia floridanus; identical to SEQ ID NO: 1458

SEQ ID NO: 57435 - DNA, 1074 bp, Bordetella pertussis; identical to SEQ ID NO: 2379
  CDS (1)..(1074)

SEQ ID NO: 57436 - protein, 357 aa, Bordetella pertussis; identical to SEQ ID NO: 1460

SEQ ID NO: 57437 - DNA, 1119 bp, Bordetella bronchiseptica; identical to SEQ ID NO: 1461
  CDS (1)..(1119)

SEQ ID NO: 57438 - protein, 372 aa, Bordetella bronchiseptica; identical to SEQ ID NO: 1462

SEQ ID NO: 57439 - DNA, 1179 bp, Nitrosomonas europaea; identical to SEQ ID NO: 1463
  CDS (1)..(1179)

SEQ ID NO: 57440 - protein, 392 aa, Nitrosomonas europaea; identical to SEQ ID NO: 1464

SEQ ID NO: 57441 - DNA, 1083 bp, Coxiella burnetii; identical to SEQ ID NO: 1465
  CDS (1)..(1083)

SEQ ID NO: 57442 - protein, 360 aa, Coxiella burnetii; identical to SEQ ID NO: 1466

SEQ ID NO: 57443 - DNA, 1053 bp, Vibrio parahaemolyticus; identical to SEQ ID NO: 1471
  CDS (1)..(1053)

SEQ ID NO: 57444 - protein, 350 aa, Vibrio parahaemolyticus; identical to SEQ ID NO: 1472

SEQ ID NO: 57445 - DNA, 1053 bp, Vibrio parahaemolyticus; identical to SEQ ID NO: 1473
  CDS (1)..(1053)

SEQ ID NO: 57446 - protein, 350 aa, Vibrio parahaemolyticus; identical to SEQ ID NO: 1474

SEQ ID NO: 57447 - DNA, 1074 bp, Vibrio parahaemolyticus; identical to SEQ ID NO: 1475
  CDS (1)..(1074)

SEQ ID NO: 57448 - protein, 357 aa, Vibrio parahaemolyticus; identical to SEQ ID NO: 1476

SEQ ID NO: 57449 - DNA, 1083 bp, Pseudomonas syringae; identical to SEQ ID NO: 1477
  CDS (1)..(1083)

SEQ ID NO: 57450 - protein, 360 aa, Pseudomonas syringae; identical to SEQ ID NO: 1478

SEQ ID NO: 57451 - DNA, 1077 bp, Pseudomonas syringae; identical to SEQ ID NO: 1479
  CDS (1)..(1077)

SEQ ID NO: 57452 - protein, 358 aa, Pseudomonas syringae; identical to SEQ ID NO: 1480

SEQ ID NO: 57453 - DNA, 1062 bp, Pseudomonas putida; identical to SEQ ID NO: 1481
  CDS (1)..(1062)

SEQ ID NO: 57454 - protein, 353 aa, Pseudomonas putida; identical to SEQ ID NO: 1482

SEQ ID NO: 57455 - DNA, 1113 bp, Pseudomonas putida; identical to SEQ ID NO: 1483
  CDS (1)..(1113)

SEQ ID NO: 57456 - protein, 370 aa, Pseudomonas putida; identical to SEQ ID NO: 1484

SEQ ID NO: 57457 - DNA, 1086 bp, Bradyrhizobium japonicum; identical to SEQ ID NO: 1485
  CDS (1)..(1086)

SEQ ID NO: 57458 - protein, 361 aa, Bradyrhizobium japonicum; identical to SEQ ID NO: 1486

SEQ ID NO: 57459 - DNA, 1053 bp, Yersinia pestis; identical to SEQ ID NO: 1487
  CDS (1)..(1053)

SEQ ID NO: 57460 - protein, 350 aa, Yersinia pestis; identical to SEQ ID NO: 1488

SEQ ID NO: 57461 - DNA, 1038 bp, Wigglesworthia glossinidia brevipalpis; identical to SEQ ID NO: 1491
  CDS (1)..(1038)

SEQ ID NO: 57462 - protein, 345 aa, Wigglesworthia glossinidia brevipalpis; identical to SEQ ID NO: 1492

SEQ ID NO: 57463 - DNA, 1071 bp, Vibrio vulnificus; identical to SEQ ID NO: 1739
  CDS (1)..(1071)

SEQ ID NO: 57464 - protein, 356 aa, Vibrio vulnificus; identical to SEQ ID NO: 1740

SEQ ID NO: 57465 - DNA, 1053 bp, Vibrio vulnificus; identical to SEQ ID NO: 1493
  CDS (1)..(1053)

SEQ ID NO: 57466 - protein, 350 aa, Vibrio vulnificus; identical to SEQ ID NO: 1494

SEQ ID NO: 57467 - DNA, 1071 bp, Vibrio vulnificus; identical to SEQ ID NO: 1497
  CDS (1)..(1071)

SEQ ID NO: 57468 - protein, 356 aa, Vibrio vulnificus; identical to SEQ ID NO: 1498

SEQ ID NO: 57469 - DNA, 1062 bp, Synechococcus elongatus; identical to SEQ ID NO: 1499
  CDS (1)..(1062)

SEQ ID NO: 57470 - protein, 353 aa, Synechococcus elongatus; identical to SEQ ID NO: 1500

SEQ ID NO: 57471 - DNA, 1032 bp, Streptococcus mutans; identical to SEQ ID NO: 1501
  CDS (1)..(1032)

SEQ ID NO: 57472 - protein, 343 aa, Streptococcus mutans; identical to SEQ ID NO: 1502

SEQ ID NO: 57473 - DNA, 1035 bp, Streptococcus mutans; identical to SEQ ID NO: 1503
  CDS (1)..(1035)

SEQ ID NO: 57474 - protein, 344 aa, Streptococcus mutans; identical to SEQ ID NO: 1504

SEQ ID NO: 57475 - DNA, 1008 bp, Streptococcus agalactiae; identical to SEQ ID NO: 1505
  CDS (1)..(1008)

SEQ ID NO: 57476 - protein, 335 aa, Streptococcus agalactiae; identical to SEQ ID NO: 1506

SEQ ID NO: 57477 - DNA, 1065 bp, Shewanella oneidensis; identical to SEQ ID NO: 1507
  CDS (1)..(1065)

SEQ ID NO: 57478 - protein, 354 aa, Shewanella oneidensis; identical to SEQ ID NO: 1508

SEQ ID NO: 57479 - DNA, 1092 bp, Shewanella oneidensis; identical to SEQ ID NO: 1509
  CDS (1)..(1092)

SEQ ID NO: 57480 - protein, 363 aa, Shewanella oneidensis; identical to SEQ ID NO: 1510

SEQ ID NO: 57481 - DNA, 1059 bp, Shewanella oneidensis; identical to SEQ ID NO: 1511
  CDS (1)..(1059)

SEQ ID NO: 57482 - protein, 352 aa, Shewanella oneidensis; identical to SEQ ID NO: 1512

SEQ ID NO: 57483 - DNA, 1170 bp, Corynebacterium efficiens; identical to SEQ ID NO: 1515
  CDS (1)..(1170)

SEQ ID NO: 57484 - protein, 389 aa, Corynebacterium efficiens; identical to SEQ ID NO: 1516

SEQ ID NO: 57485 - DNA, 1134 bp, Bifidobacterium longum; identical to SEQ ID NO: 1517
  CDS (1)..(1134)

SEQ ID NO: 57486 - protein, 377 aa, Bifidobacterium longum; identical to SEQ ID NO: 1518

SEQ ID NO: 57487 - DNA, 1233 bp, Bifidobacterium longum; identical to SEQ ID NO: 1519
  CDS (1)..(1233)

SEQ ID NO: 57488 - protein, 410 aa, Bifidobacterium longum; identical to SEQ ID NO: 1520

SEQ ID NO: 57489 - DNA, 1221 bp, Phytophthora infestans; identical to SEQ ID NO: 1521
  CDS (20)..(1153)

SEQ ID NO: 57490 - protein, 377 aa, Phytophthora infestans; identical to SEQ ID NO: 1522

SEQ ID NO: 57491 - DNA, 1062 bp, Chlorobium tepidum; identical to SEQ ID NO: 1523
  CDS (1)..(1062)

SEQ ID NO: 57492 - protein, 353 aa, Chlorobium tepidum; identical to SEQ ID NO: 1524

SEQ ID NO: 57493 - DNA, 1074 bp, Xanthomonas campestris; identical to SEQ ID NO: 1525
  CDS (1)..(1074)

SEQ ID NO: 57494 - protein, 357 aa, Xanthomonas campestris; identical to SEQ ID NO: 1526

SEQ ID NO: 57495 - DNA, 1074 bp, Xanthomonas axonopodis; identical to SEQ ID NO: 1527
  CDS (1)..(1074)

SEQ ID NO: 57496 - protein, 357 aa, Xanthomonas axonopodis; identical to SEQ ID NO: 1528

SEQ ID NO: 57497 - DNA, 1080 bp, Ralstonia solanacearum; identical to SEQ ID NO: 1529
  CDS (1)..(1080)

SEQ ID NO: 57498 - protein, 359 aa, Ralstonia solanacearum; identical to SEQ ID NO: 1530

SEQ ID NO: 57499 - DNA, 1179 bp, Ralstonia solanacearum; identical to SEQ ID NO: 1531
  CDS (1)..(1179)

SEQ ID NO: 57500 - protein, 392 aa, Ralstonia solanacearum; identical to SEQ ID NO: 1532

SEQ ID NO: 57501 - DNA, 1065 bp, Synechococcus sp; identical to SEQ ID NO: 1533
  CDS (1)..(1065)

SEQ ID NO: 57502 - protein, 354 aa, Synechococcus sp; identical to SEQ ID NO: 1534

SEQ ID NO: 57503 - DNA, 1035 bp, Escherichia coli; identical to SEQ ID NO: 1535
  CDS (1)..(1035)

SEQ ID NO: 57504 - protein, 344 aa, Escherichia coli; identical to SEQ ID NO: 1536

SEQ ID NO: 57505 - DNA, 1200 bp, Stigmatella aurantiaca; identical to SEQ ID NO: 1537
  CDS (62)..(1147)

SEQ ID NO: 57506 - protein, 361 aa, Stigmatella aurantiaca; identical to SEQ ID NO: 1538

SEQ ID NO: 57507 - DNA, 1083 bp, Amycolatopsis mediterranei; identical to SEQ ID NO: 1541
  CDS (1)..(1083)

SEQ ID NO: 57508 - protein, 360 aa, Amycolatopsis mediterranei; identical to SEQ ID NO: 1542

SEQ ID NO: 57509 - DNA, 1053 bp, Pasteurella multocida; identical to SEQ ID NO: 1543
  CDS (1)..(1053)

SEQ ID NO: 57510 - protein, 350 aa, Pasteurella multocida; identical to SEQ ID NO: 1544

SEQ ID NO: 57511 - DNA, 1086 bp, Pasteurella multocida; identical to SEQ ID NO: 1545
  CDS (1)..(1086)

SEQ ID NO: 57512 - protein, 361 aa, Pasteurella multocida; identical to SEQ ID NO: 1546

SEQ ID NO: 57513 - DNA, 1125 bp, Emericella nidulans; identical to SEQ ID NO: 1547
  CDS (1)..(1125)

SEQ ID NO: 57514 - protein, 374 aa, Emericella nidulans; identical to SEQ ID NO: 1548

SEQ ID NO: 57515 - DNA, 1089 bp, Emericella nidulans; identical to SEQ ID NO: 1549
  CDS (1)..(1089)

SEQ ID NO: 57516 - protein, 362 aa, Emericella nidulans; identical to SEQ ID NO: 1550

SEQ ID NO: 57517 - DNA, 1239 bp, Vibrio cholerae; identical to SEQ ID NO: 1551
  CDS (114)..(1175)

SEQ ID NO: 57518 - protein, 353 aa, Vibrio cholerae; identical to SEQ ID NO: 1552

SEQ ID NO: 57519 - DNA, 2184 bp, Candida albicans; identical to SEQ ID NO: 1553
  CDS (461)..(1573)

SEQ ID NO: 57520 - protein, 370 aa, Candida albicans; identical to SEQ ID NO: 1554

SEQ ID NO: 57521 - DNA, 1047 bp, Buchnera aphidicola; identical to SEQ ID NO: 1555
  CDS (1)..(1047)

SEQ ID NO: 57522 - protein, 348 aa, Buchnera aphidicola; identical to SEQ ID NO: 1556

SEQ ID NO: 57523 - DNA, 1047 bp, Buchnera aphidicola; identical to SEQ ID NO: 1557
  CDS (1)..(1047)

SEQ ID NO: 57524 - protein, 348 aa, Buchnera aphidicola; identical to SEQ ID NO: 1558

SEQ ID NO: 57525 - DNA, 1047 bp, Erwinia herbicola; identical to SEQ ID NO: 1559
  CDS (1)..(1047)

SEQ ID NO: 57526 - protein, 348 aa, Erwinia herbicola; identical to SEQ ID NO: 1560

SEQ ID NO: 57527 - DNA, 1047 bp, Salmonella typhimurium; identical to SEQ ID NO: 1561
  CDS (1)..(1047)

SEQ ID NO: 57528 - protein, 348 aa, Salmonella typhimurium; identical to SEQ ID NO: 1562

SEQ ID NO: 57529 - DNA, 1047 bp, Shigella flexneri; identical to SEQ ID NO: 2473
  CDS (1)..(1047)

SEQ ID NO: 57530 - protein, 348 aa, Shigella flexneri; identical to SEQ ID NO: 2474

SEQ ID NO: 57531 - DNA, 25 bp, Artificial sequence
  Primer sequence
atgttcattaaaaacgatcacgccg

SEQ ID NO: 57532 - DNA, 25 bp, Artificial sequence
  Primer sequence
ctattttttcaaggcctttcttctg

SEQ ID NO: 57533 - protein, 353 aa, Artificial sequence; identical to SEQ ID NO: 24922
  Consensus
  Variant (2)..(3): Xaa in position 2 to 3 is any amino acid
  Variant (5)..(11): Xaa in position 5 to 11 is any amino acid
  Variant (13)..(24): Xaa in position 13 to 24 is any amino acid
  Variant (26)..(30): Xaa in position 26 to 30 is any amino acid
  Variant (32)..(33): Xaa in position 32 to 33 is any amino acid
  Variant (35)..(35): Xaa in position 35 is any amino acid
  Variant (37)..(37): Xaa in position 37 is any amino acid
  Variant (39)..(46): Xaa in position 39 to 46 is any amino acid
  Variant (51)..(51): Xaa in position 51 is any amino acid
  Variant (54)..(56): Xaa in position 54 to 56 is any amino acid
  Variant (58)..(59): Xaa in position 58 to 59 is any amino acid
  Variant (62)..(63): Xaa in position 62 to 63 is any amino acid
  Variant (65)..(76): Xaa in position 65 to 76 is any amino acid
  Variant (78)..(80): Xaa in position 78 to 80 is any amino acid
  Variant (83)..(83): Xaa in position 83 is any amino acid
  Variant (85)..(85): Xaa in position 85 is any amino acid
  Variant (91)..(93): Xaa in position 91 to 93 is any amino acid
  Variant (100)..(100): Xaa in position 100 is any amino acid
  Variant (103)..(112): Xaa in position 103 to 112 is any amino acid
  Variant (115)..(117): Xaa in position 115 to 117 is any amino acid
  Variant (119)..(119): Xaa in position 119 is any amino acid
  Variant (121)..(130): Xaa in position 121 to 130 is any amino acid
  Variant (132)..(132): Xaa in position 132 is any amino acid
  Variant (134)..(134): Xaa in position 134 is any amino acid
  Variant (136)..(136): Xaa in position 136 is any amino acid
  Variant (139)..(142): Xaa in position 139 to 142 is any amino acid
  Variant (144)..(146): Xaa in position 144 to 146 is any amino acid
  Variant (148)..(152): Xaa in position 148 to 152 is any amino acid
  Variant (163)..(163): Xaa in position 163 is any amino acid
  Variant (166)..(168): Xaa in position 166 to 168 is any amino acid
  Variant (171)..(171): Xaa in position 171 is any amino acid
  Variant (174)..(174): Xaa in position 174 is any amino acid
  Variant (176)..(176): Xaa in position 176 is any amino acid
  Variant (181)..(181): Xaa in position 181 is any amino acid
  Variant (183)..(183): Xaa in position 183 is any amino acid
  Variant (185)..(188): Xaa in position 185 to 188 is any amino acid
  Variant (190)..(191): Xaa in position 190 to 191 is any amino acid
  Variant (193)..(195): Xaa in position 193 to 195 is any amino acid
  Variant (197)..(199): Xaa in position 197 to 199 is any amino acid
  Variant (201)..(201): Xaa in position 201 is any amino acid
  Variant (203)..(208): Xaa in position 203 to 208 is any amino acid
  Variant (210)..(215): Xaa in position 210 to 215 is any amino acid
  Variant (217)..(217): Xaa in position 217 is any amino acid
  Variant (220)..(222): Xaa in position 220 to 222 is any amino acid
  Variant (224)..(225): Xaa in position 224 to 225 is any amino acid
  Variant (230)..(238): Xaa in position 230 to 238 is any amino acid
  Variant (241)..(269): Xaa in position 241 to 269 is any amino acid
  Variant (271)..(271): Xaa in position 271 is any amino acid
  Variant (274)..(274): Xaa in position 274 is any amino acid
  Variant (277)..(277): Xaa in position 277 is any amino acid
  Variant (279)..(282): Xaa in position 279 to 282 is any amino acid
  Variant (284)..(285): Xaa in position 284 to 285 is any amino acid
  Variant (287)..(292): Xaa in position 287 to 292 is any amino acid
  Variant (294)..(296): Xaa in position 294 to 296 is any amino acid
  Variant (298)..(305): Xaa in position 298 to 305 is any amino acid
  Variant (307)..(307): Xaa in position 307 is any amino acid
  Variant (309)..(309): Xaa in position 309 is any amino acid
  Variant (312)..(315): Xaa in position 312 to 315 is any amino acid
  Variant (317)..(317): Xaa in position 317 is any amino acid
  Variant (319)..(334): Xaa in position 319 to 334 is any amino acid
  Variant (337)..(337): Xaa in position 337 is any amino acid
  Variant (339)..(339): Xaa in position 339 is any amino acid
  Variant (342)..(342): Xaa in position 342 is any amino acid
  Variant (344)..(345): Xaa in position 344 to 345 is any amino acid
  Variant (347)..(348): Xaa in position 347 to 348 is any amino acid
  Variant (350)..(352): Xaa in position 350 to 352 is any amino acid

SEQ ID NO: 57534 - protein, 72 aa, Artificial sequence; identical to SEQ ID NO: 2906
  Consensus
  Variant (5)..(5): Xaa in position 5 is Ile, Val, Ser or Leu
  Variant (6)..(6): Xaa in position 6 is His or Asp
  Variant (7)..(7): Xaa in position 7 is Asp or Asn
  Variant (8)..(10): Xaa in position 8 to 10 is any amino acid
  Variant (11)..(11): Xaa in position 11 is Ala, Val or Gly
  Variant (12)..(12): Xaa in position 12 is any amino acid
  Variant (13)..(13): Xaa in position 13 is Glu, Asp, Ala or Gln
  Variant (15)..(15): Xaa in position 15 is Ala, Gly or Cys
  Variant (16)..(17): Xaa in position 16 to 17 is any amino acid
  Variant (18)..(18): Xaa in position 18 is Leu, Ile or Phe
  Variant (19)..(28): Xaa in position 19 to 28 is any amino acid
  Variant (29)..(30): Xaa in position 29 to 30 is any or no amino acid
  Variant (31)..(31): Xaa in position 31 is Leu, Ile, Phe or Met
  Variant (32)..(32): Xaa in position 32 is any amino acid
  Variant (33)..(33): Xaa in position 33 is Ile, Val, Leu or Met
  Variant (34)..(34): Xaa in position 34 is Val, Ile or Leu
  Variant (37)..(37): Xaa in position 37 is Val, Ala or Thr
  Variant (39)..(39): Xaa in position 39 is Phe, Leu, Thr or Val
  Variant (40)..(40): Xaa in position 40 is Glu or Ala
  Variant (45)..(46): Xaa in position 45 to 46 is any amino acid
  Variant (47)..(47): Xaa in position 47 is any or no amino acid
  Variant (49)..(49): Xaa in position 49 is Trp or Tyr
  Variant (50)..(50): Xaa in position 50 is Lys or Arg
  Variant (52)..(52): Xaa in position 52 is Leu, Phe, Met or Tyr
  Variant (53)..(53): Xaa in position 53 is Ile, Val, Ala or Leu
  Variant (54)..(54): Xaa in position 54 is any amino acid
  Variant (55)..(55): Xaa in position 55 is Asp, Glu or Gln
  Variant (57)..(57): Xaa in position 57 is any amino acid
  Variant (58)..(58): Xaa in position 58 is Leu, Met, Ile, Val, Ala or Thr
  Variant (59)..(59): Xaa in position 59 is Asp, Asn or Ser
  Variant (60)..(63): Xaa in position 60 to 63 is any amino acid
  Variant (64)..(64): Xaa in position 64 is Ile, Val, Leu or Met
  Variant (65)..(66): Xaa in position 65 to 66 is any amino acid
  Variant (68)..(68): Xaa in position 68 is Leu, Ile, Met or Val
  Variant (69)..(70): Xaa in position 69 to 70 is any amino acid
  Variant (71)..(71): Xaa in position 71 is Ala, Ser, Gly, Val or Thr

SEQ ID NO: 57535 - protein, 76 aa, Artificial sequence; identical to SEQ ID NO: 2907
  Consensus
  Variant (1)..(1): Xaa in position 1 is Ala or Ser
  Variant (2)..(2): Xaa in position 2 is Ile or Val
  Variant (6)..(6): Xaa in position 6 is Thr, Ser or Asn
  Variant (7)..(7): Xaa in position 7 is Thr, Val, Ala, Ser or Ile
  Variant (8)..(8): Xaa in position 8 is Glu or Ala
  Variant (9)..(9): Xaa in position 9 is Ser, Asp or Asn
  Variant (11)..(11): Xaa in position 11 is any amino acid
  Variant (14)..(14): Xaa in position 14 is Glu, Gln, Phe or Met
  Variant (15)..(15): Xaa in position 15 is Leu, Met, Val, Phe or Ile
  Variant (16)..(16): Xaa in position 16 is Ala, Ser, Thr, Cys or Val
  Variant (18)..(18): Xaa in position 18 is Gly, Ala or Asn
  Variant (19)..(21): Xaa in position 19 to 21 is any amino acid
  Variant (22)..(22): Xaa in position 22 is Pro or Ala
  Variant (23)..(23): Xaa in position 23 is Val, Ile, Thr or Leu
  Variant (25)..(25): Xaa in position 25 is Phe, Met, Tyr or Ile
  Variant (28)..(28): Xaa in position 28 is any amino acid
  Variant (29)..(29): Xaa in position 29 is Thr, Ser or Arg
  Variant (30)..(30): Xaa in position 30 is any amino acid
  Variant (32)..(35): Xaa in position 32 to 35 is any amino acid
  Variant (36)..(36): Xaa in position 36 is Ala or Met
  Variant (37)..(37): Xaa in position 37 is any amino acid
  Variant (38)..(38): Xaa in position 38 is Asp, Asn or Glu
  Variant (39)..(39): Xaa in position 39 is Ala or Gly
  Variant (40)..(41): Xaa in position 40 to 41 is any amino acid
  Variant (42)..(42): Xaa in position 42 is Ala or Ser
  Variant (43)..(43): Xaa in position 43 is Ala, Ser, Val or Thr
  Variant (44)..(46): Xaa in position 44 to 46 is any amino acid
  Variant (47)..(47): Xaa in position 47 is His or Gln
  Variant (48)..(48): Xaa in position 48 is any amino acid
  Variant (49)..(49): Xaa in position 49 is Phe, Tyr, His or Val
  Variant (50)..(51): Xaa in position 50 to 51 is any amino acid
  Variant (52)..(55): Xaa in position 52 to 55 is any or no amino acid
  Variant (57)..(60): Xaa in position 57 to 60 is any amino acid
  Variant (61)..(62): Xaa in position 61 to 62 is any or no amino acid
  Variant (63)..(63): Xaa in position 63 is Thr or Ser
  Variant (64)..(64): Xaa in position 64 is any amino acid
  Variant (67)..(69): Xaa in position 67 to 69 is any amino acid
  Variant (70)..(70): Xaa in position 70 is His or Phe
  Variant (71)..(71): Xaa in position 71 is Val, Ile, Leu or Ala
  Variant (72)..(72): Xaa in position 72 is Ile or Val
  Variant (73)..(73): Xaa in position 73 is Leu or Met
  Variant (76)..(76): Xaa in position 76 is Gly, Ala or Ser

SEQ ID NO: 57536 - protein, 83 aa, Artificial sequence; identical to SEQ ID NO: 2908
  Consensus
  Variant (1)..(1): Xaa in position 1 is Leu, Ile or Val
  Variant (2)..(2): Xaa in position 2 is Met, Val, Ile or Leu
  Variant (3)..(3): Xaa in position 3 is Ile or Val
  Variant (5)..(5): Xaa in position 5 is Cys, Phe, Ala, Thr or Tyr
  Variant (6)..(6): Xaa in position 6 is Ser, Asn or Ala
  Variant (8)..(8): Xaa in position 8 is Gly, Ala or Asp
  Variant (10)..(10): Xaa in position 10 is Ser or Cys
  Variant (11)..(11): Xaa in position 11 is any amino acid
  Variant (13)..(15): Xaa in position 13 to 15 is any amino acid
  Variant (16)..(16): Xaa in position 16 is Arg, Asn, Lys, Leu or Glu
  Variant (18)..(19): Xaa in position 18 to 19 is any amino acid
  Variant (20)..(20): Xaa in position 20 is Val or Ile
  Variant (21)..(26): Xaa in position 21 to 26 is any amino acid
  Variant (27)..(27): Xaa in position 27 is Gln, Asn or Arg
  Variant (28)..(28): Xaa in position 28 is Ile, Leu, Val, Arg or Met
  Variant (29)..(30): Xaa in position 29 to 30 is any amino acid
  Variant (31)..(31): Xaa in position 31 is Gly, Asn or Asp
  Variant (32)..(32): Xaa in position 32 is any amino acid
  Variant (33)..(37): Xaa in position 33 to 37 is any or no amino acid
  Variant (38)..(38): Xaa in position 38 is Ile, Val or Leu
  Variant (39)..(39): Xaa in position 39 is any amino acid
  Variant (41)..(41): Xaa in position 41 is any amino acid
  Variant (43)..(43): Xaa in position 43 is Ile, Leu, Val, Ala or Met
  Variant (46)..(46): Xaa in position 46 is His, Phe, Asn or Tyr
  Variant (47)..(47): Xaa in position 47 is Leu or Ile
  Variant (48)..(49): Xaa in position 48 to 49 is any amino acid
  Variant (51)..(51): Xaa in position 51 is any amino acid
  Variant (53)..(57): Xaa in position 53 to 57 is any amino acid
  Variant (58)..(69): Xaa in position 58 to 69 is any or no amino acid
  Variant (71)..(71): Xaa in position 71 is any amino acid
  Variant (73)..(73): Xaa in position 73 is Ile or Val
  Variant (76)..(76): Xaa in position 76 is any amino acid
  Variant (78)..(78): Xaa in position 78 is Ile, Leu or Val
  Variant (79)..(79): Xaa in position 79 is any amino acid
  Variant (80)..(80): Xaa in position 80 is Trp, Ile, Leu or Phe
  Variant (81)..(82): Xaa in position 81 to 82 is any amino acid
  Variant (83)..(83): Xaa in position 83 is Thr or Ser

SEQ ID NO: 57537 - DNA, 1755 bp, Saccharomyces cerevisiae; identical to SEQ ID NO: 7718
  CDS (1)..(1755)

SEQ ID NO: 57538 - protein, 584 aa, Saccharomyces cerevisiae; identical to SEQ ID NO: 7719

SEQ ID NO: 57539 - DNA, 1560 bp, Glycine max; identical to SEQ ID NO: 7720
  CDS (1)..(1560)

SEQ ID NO: 57540 - protein, 519 aa, Glycine max; identical to SEQ ID NO: 7721

SEQ ID NO: 57541 - DNA, 1536 bp, Glycine max; identical to SEQ ID NO: 7722
  CDS (1)..(1536)

SEQ ID NO: 57542 - protein, 511 aa, Glycine max; identical to SEQ ID NO: 7723

SEQ ID NO: 57543 - DNA, 2856 bp, Homo sapiens (man); identical to SEQ ID NO: 7724
  CDS (180)..(1658)

SEQ ID NO: 57544 - protein, 492 aa, Homo sapiens (man); identical to SEQ ID NO: 7725

SEQ ID NO: 57545 - DNA, 2487 bp, Oryctolagus cuniculus (domestic rabbit); identical to SEQ ID NO: 7726
  CDS (124)..(1602)

SEQ ID NO: 57546 - protein, 492 aa, Oryctolagus cuniculus (domestic rabbit); identical to SEQ ID NO: 7727

SEQ ID NO: 57547 - DNA, 3642 bp, Saccharomyces cerevisiae; identical to SEQ ID NO: 7728
  CDS (551)..(3205)

SEQ ID NO: 57548 - protein, 884 aa, Saccharomyces cerevisiae; identical to SEQ ID NO: 168

SEQ ID NO: 57549 - DNA, 1774 bp, Mus musculus (house mouse); identical to SEQ ID NO: 7730
  CDS (80)..(1561)

SEQ ID NO: 57550 - protein, 493 aa, Mus musculus (house mouse); identical to SEQ ID NO: 7731

SEQ ID NO: 57551 - DNA, 2798 bp, Leishmania donovani; identical to SEQ ID NO: 7732
  CDS (676)..(2319)

SEQ ID NO: 57552 - protein, 547 aa, Leishmania donovani; identical to SEQ ID NO: 7733

SEQ ID NO: 57553 - DNA, 1536 bp, Arabidopsis thaliana (mouse-ear cress); identical to SEQ ID NO: 7734
  CDS (1)..(1536)

SEQ ID NO: 57554 - protein, 511 aa, Arabidopsis thaliana (mouse-ear cress); identical to SEQ ID NO: 7735

SEQ ID NO: 57555 - DNA, 1482 bp, Arabidopsis thaliana (mouse-ear cress); identical to SEQ ID NO: 7736
  CDS (1)..(1482)

SEQ ID NO: 57556 - protein, 493 aa, Arabidopsis thaliana (mouse-ear cress); identical to SEQ ID NO: 172

SEQ ID NO: 57557 - DNA, 1395 bp, Salmonella enterica subsp. enterica serovar Typhi; identical to SEQ ID NO: 7738
  CDS (1)..(1395)

SEQ ID NO: 57558 - protein, 464 aa, Salmonella enterica subsp. enterica serovar Typhi; identical to SEQ ID NO: 7739

SEQ ID NO: 57559 - DNA, 2568 bp, Saccharomyces cerevisiae; identical to SEQ ID NO: 7740
  CDS (461)..(2299)

SEQ ID NO: 57560 - protein, 612 aa, Saccharomyces cerevisiae; identical to SEQ ID NO: 7741

SEQ ID NO: 57561 - DNA, 1449 bp, Bacillus subtilis; identical to SEQ ID NO: 173
  CDS (1)..(1449)

SEQ ID NO: 57562 - protein, 482 aa, Bacillus subtilis; identical to SEQ ID NO: 174

SEQ ID NO: 57563 - DNA, 1644 bp, Arabidopsis thaliana (mouse-ear cress); identical to SEQ ID NO: 175
  CDS (1)..(1644)

SEQ ID NO: 57564 - protein, 547 aa, Arabidopsis thaliana (mouse-ear cress); identical to SEQ ID NO: 176

SEQ ID NO: 57565 - DNA, 1560 bp, Caulobacter crescentus; identical to SEQ ID NO: 7746
  CDS (1)..(1560)

SEQ ID NO: 57566 - protein, 519 aa, Caulobacter crescentus; identical to SEQ ID NO: 7747

SEQ ID NO: 57567 - DNA, 1386 bp, Bacillus subtilis; identical to SEQ ID NO: 7748
  CDS (1)..(1386)

SEQ ID NO: 57568 - protein, 461 aa, Bacillus subtilis; identical to SEQ ID NO: 7749

SEQ ID NO: 57569 - DNA, 1743 bp, Arabidopsis thaliana (mouse-ear cress); identical to SEQ ID NO: 7750
  CDS (1)..(1743)

SEQ ID NO: 57570 - protein, 580 aa, Arabidopsis thaliana (mouse-ear cress); identical to SEQ ID NO: 7751

SEQ ID NO: 57571 - DNA, 1774 bp, Arabidopsis thaliana (mouse-ear cress); identical to SEQ ID NO: 7752
  CDS (1)..(1743)

SEQ ID NO: 57572 - protein, 580 aa, Arabidopsis thaliana (mouse-ear cress); identical to SEQ ID NO: 7753

SEQ ID NO: 57573 - DNA, 1554 bp, Arabidopsis thaliana (mouse-ear cress); identical to SEQ ID NO: 7754
  CDS (1)..(1554)

SEQ ID NO: 57574 - protein, 517 aa, Arabidopsis thaliana (mouse-ear cress); identical to SEQ ID NO: 7755

SEQ ID NO: 57575 - DNA, 1260 bp, Bacillus subtilis; identical to SEQ ID NO: 7756
  CDS (1)..(1260)

SEQ ID NO: 57576 - protein, 419 aa, Bacillus subtilis; identical to SEQ ID NO: 7757

SEQ ID NO: 57577 - DNA, 1518 bp, Bacillus subtilis; identical to SEQ ID NO: 7758
  CDS (16)..(1389)

SEQ ID NO: 57578 - protein, 457 aa, Bacillus subtilis; identical to SEQ ID NO: 7759

SEQ ID NO: 57579 - DNA, 1695 bp, Arabidopsis thaliana (mouse-ear cress); identical to SEQ ID NO: 7760
  CDS (12)..(1475)

SEQ ID NO: 57580 - protein, 487 aa, Arabidopsis thaliana (mouse-ear cress); identical to SEQ ID NO: 7761

SEQ ID NO: 57581 - DNA, 1395 bp, Bacillus subtilis; identical to SEQ ID NO: 177
  CDS (1)..(1395)

SEQ ID NO: 57582 - protein, 464 aa, Bacillus subtilis; identical to SEQ ID NO: 178

SEQ ID NO: 57583 - DNA, 1780 bp, Arabidopsis thaliana (mouse-ear cress); identical to SEQ ID NO: 7764
  CDS (1)..(1749)

SEQ ID NO: 57584 - protein, 582 aa, Arabidopsis thaliana (mouse-ear cress); identical to SEQ ID NO: 7765

SEQ ID NO: 57585 - DNA, 1368 bp, Clostridium acetobutylicum; identical to SEQ ID NO: 7766
  CDS (1)..(1368)

SEQ ID NO: 57586 - protein, 455 aa, Clostridium acetobutylicum; identical to SEQ ID NO: 7767

SEQ ID NO: 57587 - DNA, 1422 bp, Bacillus subtilis; identical to SEQ ID NO: 7768
  CDS (1)..(1422)

SEQ ID NO: 57588 - protein, 473 aa, Bacillus subtilis; identical to SEQ ID NO: 7769

SEQ ID NO: 57589 - DNA, 1566 bp, Arabidopsis thaliana (mouse-ear cress); identical to SEQ ID NO: 181
  CDS (1)..(1566)

SEQ ID NO: 57590 - protein, 521 aa, Arabidopsis thaliana (mouse-ear cress); identical to SEQ ID NO: 182

SEQ ID NO: 57591 - DNA, 1302 bp, Lactococcus lactis subsp. lactis; identical to SEQ ID NO: 7772
  CDS (1)..(1302)

SEQ ID NO: 57592 - protein, 433 aa, Lactococcus lactis subsp. lactis; identical to SEQ ID NO: 7773

SEQ ID NO: 57593 - DNA, 1536 bp, Arabidopsis thaliana (mouse-ear cress); identical to SEQ ID NO: 183
  CDS (1)..(1536)

SEQ ID NO: 57594 - protein, 511 aa, Arabidopsis thaliana (mouse-ear cress); identical to SEQ ID NO: 184

SEQ ID NO: 57595 - DNA, 1410 bp, Clostridium acetobutylicum; identical to SEQ ID NO: 185
  CDS (1)..(1410)

SEQ ID NO: 57596 - protein, 469 aa, Clostridium acetobutylicum; identical to SEQ ID NO: 186

SEQ ID NO: 57597 - DNA, 2890 bp, Saccharomyces cerevisiae; identical to SEQ ID NO: 189
  CDS (818)..(2443)

SEQ ID NO: 57598 - protein, 541 aa, Saccharomyces cerevisiae; identical to SEQ ID NO: 190

SEQ ID NO: 57599 - DNA, 2613 bp, Mus musculus (house mouse); identical to SEQ ID NO: 7780
  CDS (180)..(1658)

SEQ ID NO: 57600 - protein, 492 aa, Mus musculus (house mouse); identical to SEQ ID NO: 7781

SEQ ID NO: 57601 - DNA, 1559 bp, Synechocystis sp; identical to SEQ ID NO: 7782
  CDS (92)..(1498)

SEQ ID NO: 57602 - protein, 468 aa, Synechocystis sp; identical to SEQ ID NO: 7783

SEQ ID NO: 57603 - DNA, 1704 bp, Kluyveromyces marxianus var. lactis, Candida sphaerica; identical to SEQ ID NO: 193
  CDS (1)..(1704)

SEQ ID NO: 57604 - protein, 567 aa, Kluyveromyces marxianus var. lactis, Candida sphaerica; identical to SEQ ID NO: 194

SEQ ID NO: 57605 - DNA, 1545 bp, Arabidopsis thaliana (mouse-ear cress); identical to SEQ ID NO: 7786
  CDS (1)..(1545)

SEQ ID NO: 57606 - protein, 514 aa, Arabidopsis thaliana (mouse-ear cress); identical to SEQ ID NO: 7787

SEQ ID NO: 57607 - DNA, 1853 bp, Nicotiana tabacum (common tobacco); identical to SEQ ID NO: 7788
  CDS (103)..(1674)

SEQ ID NO: 57608 - protein, 523 aa, Nicotiana tabacum (common tobacco); identical to SEQ ID NO: 7789

SEQ ID NO: 57609 - DNA, 2114 bp, Saccharomyces cerevisiae; identical to SEQ ID NO: 7790
  CDS (373)..(2076)

SEQ ID NO: 57610 - protein, 567 aa, Saccharomyces cerevisiae; identical to SEQ ID NO: 196

SEQ ID NO: 57611 - DNA, 1605 bp, Chlorella kessleri; identical to SEQ ID NO: 7792
  CDS (1)..(1605)

SEQ ID NO: 57612 - protein, 534 aa, Chlorella kessleri; identical to SEQ ID NO: 7793

SEQ ID NO: 57613 - DNA, 2160 bp, Saccharomyces cerevisiae; identical to SEQ ID NO: 197
  CDS (216)..(1928)

SEQ ID NO: 57614 - protein, 570 aa, Saccharomyces cerevisiae; identical to SEQ ID NO: 198

SEQ ID NO: 57615 - DNA, 1673 bp, Rattus norvegicus (Norway rat); identical to SEQ ID NO: 7796
  CDS (85)..(1566)

SEQ ID NO: 57616 - protein, 493 aa, Rattus norvegicus (Norway rat); identical to SEQ ID NO: 7797

SEQ ID NO: 57617 - DNA, 2209 bp, Saccharomyces cerevisiae; identical to SEQ ID NO: 7798
  CDS (213)..(1925)

SEQ ID NO: 57618 - protein, 570 aa, Saccharomyces cerevisiae; identical to SEQ ID NO: 7799

SEQ ID NO: 57619 - DNA, 3025 bp, Saccharomyces cerevisiae; identical to SEQ ID NO: 201
  CDS (510)..(2288)

SEQ ID NO: 57620 - protein, 592 aa, Saccharomyces cerevisiae; identical to SEQ ID NO: 202

SEQ ID NO: 57621 - DNA, 1683 bp, Saccharomyces cerevisiae; identical to SEQ ID NO: 7802
  CDS (1)..(1683)

SEQ ID NO: 57622 - protein, 560 aa, Saccharomyces cerevisiae; identical to SEQ ID NO: 7803

SEQ ID NO: 57623 - DNA, 1463 bp, Klebsiella oxytoca; identical to SEQ ID NO: 7804
  CDS (27)..(1445)

SEQ ID NO: 57624 - protein, 472 aa, Klebsiella oxytoca; identical to SEQ ID NO: 7805

SEQ ID NO: 57625 - DNA, 1641 bp, Saccharomyces cerevisiae; identical to SEQ ID NO: 203
  CDS (1)..(1641)

SEQ ID NO: 57626 - protein, 546 aa, Saccharomyces cerevisiae; identical to SEQ ID NO: 204

SEQ ID NO: 57627 - DNA, 1695 bp, Saccharomyces cerevisiae; identical to SEQ ID NO: 205
  CDS (1)..(1695)

SEQ ID NO: 57628 - protein, 564 aa, Saccharomyces cerevisiae; identical to SEQ ID NO: 206

SEQ ID NO: 57629 - DNA, 3277 bp, Saccharomyces cerevisiae; identical to SEQ ID NO: 207
  CDS (802)..(2505)

SEQ ID NO: 57630 - protein, 567 aa, Saccharomyces cerevisiae; identical to SEQ ID NO: 208

SEQ ID NO: 57631 - DNA, 1710 bp, Saccharomyces cerevisiae; identical to SEQ ID NO: 209
  CDS (1)..(1710)

SEQ ID NO: 57632 - protein, 569 aa, Saccharomyces cerevisiae; identical to SEQ ID NO: 210

SEQ ID NO: 57633 - DNA, 1701 bp, Kluyveromyces marxianus var. lactis, Candida sphaerica; identical to SEQ ID NO: 211
  CDS (1)..(1701)

SEQ ID NO: 57634 - protein, 566 aa, Kluyveromyces marxianus var. lactis, Candida sphaerica; identical to SEQ ID NO: 212

SEQ ID NO: 57635 - DNA, 1704 bp, Saccharomyces cerevisiae; identical to SEQ ID NO: 7816
  CDS (1)..(1704)

SEQ ID NO: 57636 - protein, 567 aa, Saccharomyces cerevisiae; identical to SEQ ID NO: 7817

SEQ ID NO: 57637 - DNA, 3323 bp, Saccharomyces cerevisiae; identical to SEQ ID NO: 217
  CDS (1189)..(2883)

SEQ ID NO: 57638 - protein, 564 aa, Saccharomyces cerevisiae; identical to SEQ ID NO: 218

SEQ ID NO: 57639 - DNA, 3143 bp, Saccharomyces cerevisiae; identical to SEQ ID NO: 219
  CDS (962)..(2686)

SEQ ID NO: 57640 - protein, 574 aa, Saccharomyces cerevisiae; identical to SEQ ID NO: 220

SEQ ID NO: 57641 - DNA, 4409 bp, Saccharomyces cerevisiae; identical to SEQ ID NO: 221
  CDS (1233)..(3524)

SEQ ID NO: 57642 - protein, 763 aa, Saccharomyces cerevisiae; identical to SEQ ID NO: 222

SEQ ID NO: 57643 - DNA, 1668 bp, Saccharomyces cerevisiae; identical to SEQ ID NO: 7824
  CDS (1)..(1668)

SEQ ID NO: 57644 - protein, 555 aa, Saccharomyces cerevisiae; identical to SEQ ID NO: 7825

SEQ ID NO: 57645 - DNA, 1542 bp, Arabidopsis thaliana (mouse-ear cress); identical to SEQ ID NO: 7826
  CDS (1)..(1542)

SEQ ID NO: 57646 - protein, 513 aa, Arabidopsis thaliana (mouse-ear cress); identical to SEQ ID NO: 7827

SEQ ID NO: 57647 - DNA, 1524 bp, Arabidopsis thaliana (mouse-ear cress); identical to SEQ ID NO: 7828
  CDS (1)..(1524)

SEQ ID NO: 57648 - protein, 507 aa, Arabidopsis thaliana (mouse-ear cress); identical to SEQ ID NO: 7829

SEQ ID NO: 57649 - DNA, 1868 bp, Arabidopsis thaliana (mouse-ear cress); identical to SEQ ID NO: 7830
  CDS (73)..(1653)

SEQ ID NO: 57650 - protein, 526 aa, Arabidopsis thaliana (mouse-ear cress); identical to SEQ ID NO: 7831

SEQ ID NO: 57651 - DNA, 1527 bp, Arabidopsis thaliana (mouse-ear cress); identical to SEQ ID NO: 7832
  CDS (1)..(1527)

SEQ ID NO: 57652 - protein, 508 aa, Arabidopsis thaliana (mouse-ear cress); identical to SEQ ID NO: 7833

SEQ ID NO: 57653 - DNA, 2118 bp, Lycopersicon esculentum (tomato); identical to SEQ ID NO: 7834
  CDS (93)..(1664)

SEQ ID NO: 57654 - protein, 523 aa, Lycopersicon esculentum (tomato); identical to SEQ ID NO: 7835

SEQ ID NO: 57655 - DNA, 1779 bp, Ricinus communis (castor bean); identical to SEQ ID NO: 7836
  CDS (86)..(1657)

SEQ ID NO: 57656 - protein, 523 aa, Ricinus communis (castor bean); identical to SEQ ID NO: 7837

SEQ ID NO: 57657 - DNA, 1966 bp, Ricinus communis (castor bean); identical to SEQ ID NO: 7838
  misc_feature (412)..(413): n is a, c, g, or t
  misc_feature (427)..(428): n is a, c, g, or t
  CDS (63)..(1595)

SEQ ID NO: 57658 - protein, 510 aa, Ricinus communis (castor bean); identical to SEQ ID NO: 7839
  misc_feature (117)..(117): Xaa can be any naturally occuring amino acid
  misc_feature (122)..(122): Xaa can be any naturally occuring amino acid

SEQ ID NO: 57659 - DNA, 1861 bp, Ricinus communis (castor bean); identical to SEQ ID NO: 7840
  CDS (102)..(1670)

SEQ ID NO: 57660 - protein, 522 aa, Ricinus communis (castor bean); identical to SEQ ID NO: 7841

SEQ ID NO: 57661 - DNA, 1672 bp, Vicia faba (fava bean); identical to SEQ ID NO: 7842
  CDS (18)..(1568)

SEQ ID NO: 57662 - protein, 516 aa, Vicia faba (fava bean); identical to SEQ ID NO: 7843

SEQ ID NO: 57663 - DNA, 2020 bp, Beta vulgaris (beet); identical to SEQ ID NO: 229
  CDS (190)..(1662)

SEQ ID NO: 57664 - protein, 490 aa, Beta vulgaris (beet); identical to SEQ ID NO: 230

SEQ ID NO: 57665 - DNA, 1925 bp, Beta vulgaris (beet); identical to SEQ ID NO: 7846
  CDS (40)..(1689)

SEQ ID NO: 57666 - protein, 549 aa, Beta vulgaris (beet); identical to SEQ ID NO: 7847

SEQ ID NO: 57667 - DNA, 1820 bp, Picea abies (Norway spruce); identical to SEQ ID NO: 7848
  CDS (33)..(1574)

SEQ ID NO: 57668 - protein, 513 aa, Picea abies (Norway spruce); identical to SEQ ID NO: 7849

SEQ ID NO: 57669 - DNA, 1920 bp, Caenorhabditis elegans; identical to SEQ ID NO: 7850
  CDS (1)..(1920)

SEQ ID NO: 57670 - protein, 639 aa, Caenorhabditis elegans; identical to SEQ ID NO: 7851

SEQ ID NO: 57671 - DNA, 1821 bp, Caenorhabditis elegans; identical to SEQ ID NO: 7852
  CDS (1)..(1821)

SEQ ID NO: 57672 - protein, 606 aa, Caenorhabditis elegans; identical to SEQ ID NO: 7853

SEQ ID NO: 57673 - DNA, 1842 bp, Caenorhabditis elegans; identical to SEQ ID NO: 7854
  CDS (1)..(1842)

SEQ ID NO: 57674 - protein, 613 aa, Caenorhabditis elegans; identical to SEQ ID NO: 7855

SEQ ID NO: 57675 - DNA, 1419 bp, Streptomyces coelicolor; identical to SEQ ID NO: 7856
  CDS (1)..(1419)

SEQ ID NO: 57676 - protein, 472 aa, Streptomyces coelicolor; identical to SEQ ID NO: 7857

SEQ ID NO: 57677 - DNA, 1674 bp, Schizosaccharomyces pombe; identical to SEQ ID NO: 233
  CDS (1)..(1674)

SEQ ID NO: 57678 - protein, 557 aa, Schizosaccharomyces pombe; identical to SEQ ID NO: 234

SEQ ID NO: 57679 - DNA, 2407 bp, Schizosaccharomyces pombe; identical to SEQ ID NO: 7860
  CDS (401)..(2128)

SEQ ID NO: 57680 - protein, 575 aa, Schizosaccharomyces pombe; identical to SEQ ID NO: 7861

SEQ ID NO: 57681 - DNA, 1998 bp, Neurospora crassa; identical to SEQ ID NO: 7862
  CDS (1)..(1998)

SEQ ID NO: 57682 - protein, 665 aa, Neurospora crassa; identical to SEQ ID NO: 7863

SEQ ID NO: 57683 - DNA, 1678 bp, Arabidopsis thaliana (mouse-ear cress); identical to SEQ ID NO: 7864
  CDS (40)..(1530)

SEQ ID NO: 57684 - protein, 496 aa, Arabidopsis thaliana (mouse-ear cress); identical to SEQ ID NO: 7865

SEQ ID NO: 57685 - DNA, 2072 bp, Mus sp; identical to SEQ ID NO: 7866
  CDS (21)..(1454)

SEQ ID NO: 57686 - protein, 477 aa, Mus sp; identical to SEQ ID NO: 7867

SEQ ID NO: 57687 - DNA, 2177 bp, Homo sapiens; identical to SEQ ID NO: 7868
  CDS (288)..(2177)

SEQ ID NO: 57688 - protein, 629 aa, Homo sapiens; identical to SEQ ID NO: 7869

SEQ ID NO: 57689 - DNA, 1422 bp, Bacillus megaterium; identical to SEQ ID NO: 7870
  CDS (1)..(1422)

SEQ ID NO: 57690 - protein, 473 aa, Bacillus megaterium; identical to SEQ ID NO: 7871

SEQ ID NO: 57691 - DNA, 1711 bp, Amanita muscaria; identical to SEQ ID NO: 247
  CDS (38)..(1600)

SEQ ID NO: 57692 - protein, 520 aa, Amanita muscaria; identical to SEQ ID NO: 248

SEQ ID NO: 57693 - DNA, 2700 bp, Kluyveromyces lactis; identical to SEQ ID NO: 7874
  CDS (453)..(2603)

SEQ ID NO: 57694 - protein, 716 aa, Kluyveromyces lactis; identical to SEQ ID NO: 7875

SEQ ID NO: 57695 - DNA, 2065 bp, Prunus armeniaca; identical to SEQ ID NO: 7876
  CDS (363)..(1790)

SEQ ID NO: 57696 - protein, 475 aa, Prunus armeniaca; identical to SEQ ID NO: 7877

SEQ ID NO: 57697 - DNA, 1893 bp, Petunia hybrida; identical to SEQ ID NO: 7878
  CDS (253)..(1785)

SEQ ID NO: 57698 - protein, 510 aa, Petunia hybrida; identical to SEQ ID NO: 7879

SEQ ID NO: 57699 - DNA, 1425 bp, Tetragenococcus halophilus; identical to SEQ ID NO: 249
  CDS (1)..(1425)

SEQ ID NO: 57700 - protein, 474 aa, Tetragenococcus halophilus; identical to SEQ ID NO: 250

SEQ ID NO: 57701 - DNA, 2846 bp, Pichia stipitis; identical to SEQ ID NO: 251
  CDS (175)..(1836)

SEQ ID NO: 57702 - protein, 553 aa, Pichia stipitis; identical to SEQ ID NO: 252

SEQ ID NO: 57703 - DNA, 2054 bp, Beta vulgaris subsp; identical to SEQ ID NO: 253
  CDS (94)..(1731)

SEQ ID NO: 57704 - protein, 545 aa, Beta vulgaris subsp; identical to SEQ ID NO: 254

SEQ ID NO: 57705 - DNA, 1708 bp, Taenia solium; identical to SEQ ID NO: 7886
  CDS (46)..(1548)

SEQ ID NO: 57706 - protein, 500 aa, Taenia solium; identical to SEQ ID NO: 7887

SEQ ID NO: 57707 - DNA, 1753 bp, Medicago truncatula; identical to SEQ ID NO: 7888
  CDS (29)..(1585)

SEQ ID NO: 57708 - protein, 518 aa, Medicago truncatula; identical to SEQ ID NO: 7889

SEQ ID NO: 57709 - DNA, 1726 bp, Saccharum hybrid; identical to SEQ ID NO: 7890
  CDS (73)..(1629)

SEQ ID NO: 57710 - protein, 518 aa, Saccharum hybrid; identical to SEQ ID NO: 7891

SEQ ID NO: 57711 - DNA, 1638 bp, Debaryomyces hansenii; identical to SEQ ID NO: 265
  CDS (1)..(1638)

SEQ ID NO: 57712 - protein, 545 aa, Debaryomyces hansenii; identical to SEQ ID NO: 266

SEQ ID NO: 57713 - DNA, 1737 bp, Debaryomyces hansenii; identical to SEQ ID NO: 277
  CDS (1)..(1737)

SEQ ID NO: 57714 - protein, 578 aa, Debaryomyces hansenii; identical to SEQ ID NO: 278

SEQ ID NO: 57715 - DNA, 1584 bp, Debaryomyces hansenii; identical to SEQ ID NO: 279
  CDS (1)..(1584)

SEQ ID NO: 57716 - protein, 527 aa, Debaryomyces hansenii; identical to SEQ ID NO: 280

SEQ ID NO: 57717 - DNA, 1674 bp, Debaryomyces hansenii; identical to SEQ ID NO: 281
  CDS (1)..(1674)

SEQ ID NO: 57718 - protein, 557 aa, Debaryomyces hansenii; identical to SEQ ID NO: 282

SEQ ID NO: 57719 - DNA, 1671 bp, Debaryomyces hansenii; identical to SEQ ID NO: 7900
  CDS (1)..(1671)

SEQ ID NO: 57720 - protein, 556 aa, Debaryomyces hansenii; identical to SEQ ID NO: 7901

SEQ ID NO: 57721 - DNA, 1947 bp, Debaryomyces hansenii; identical to SEQ ID NO: 7902
  CDS (1)..(1947)

SEQ ID NO: 57722 - protein, 648 aa, Debaryomyces hansenii; identical to SEQ ID NO: 7903

SEQ ID NO: 57723 - DNA, 2196 bp, Debaryomyces hansenii; identical to SEQ ID NO: 287
  CDS (1)..(2196)

SEQ ID NO: 57724 - protein, 731 aa, Debaryomyces hansenii; identical to SEQ ID NO: 288

SEQ ID NO: 57725 - DNA, 1659 bp, Debaryomyces hansenii; identical to SEQ ID NO: 291
  CDS (1)..(1659)

SEQ ID NO: 57726 - protein, 552 aa, Debaryomyces hansenii; identical to SEQ ID NO: 292

SEQ ID NO: 57727 - DNA, 1623 bp, Yarrowia lipolytica; identical to SEQ ID NO: 293
  CDS (1)..(1623)

SEQ ID NO: 57728 - protein, 540 aa, Yarrowia lipolytica; identical to SEQ ID NO: 294

SEQ ID NO: 57729 - DNA, 1602 bp, Yarrowia lipolytica; identical to SEQ ID NO: 295
  CDS (1)..(1602)

SEQ ID NO: 57730 - protein, 533 aa, Yarrowia lipolytica; identical to SEQ ID NO: 296

SEQ ID NO: 57731 - DNA, 1980 bp, Yarrowia lipolytica; identical to SEQ ID NO: 7912
  CDS (1)..(1980)

SEQ ID NO: 57732 - protein, 659 aa, Yarrowia lipolytica; identical to SEQ ID NO: 7913

SEQ ID NO: 57733 - DNA, 1548 bp, Yarrowia lipolytica; identical to SEQ ID NO: 305
  CDS (1)..(1548)

SEQ ID NO: 57734 - protein, 515 aa, Yarrowia lipolytica; identical to SEQ ID NO: 306

SEQ ID NO: 57735 - DNA, 1665 bp, Yarrowia lipolytica; identical to SEQ ID NO: 309
  CDS (1)..(1665)

SEQ ID NO: 57736 - protein, 554 aa, Yarrowia lipolytica; identical to SEQ ID NO: 310

SEQ ID NO: 57737 - DNA, 2364 bp, Kluyveromyces lactis; identical to SEQ ID NO: 317
  CDS (1)..(2364)

SEQ ID NO: 57738 - protein, 787 aa, Kluyveromyces lactis; identical to SEQ ID NO: 318

SEQ ID NO: 57739 - DNA, 1710 bp, Kluyveromyces lactis; identical to SEQ ID NO: 7920
  CDS (1)..(1710)

SEQ ID NO: 57740 - protein, 569 aa, Kluyveromyces lactis; identical to SEQ ID NO: 7921

SEQ ID NO: 57741 - DNA, 1530 bp, Equus caballus; identical to SEQ ID NO: 7922
  misc_feature (46)..(46): n is a, c, g, or t
  CDS (1)..(1530)

SEQ ID NO: 57742 - protein, 509 aa, Equus caballus; identical to SEQ ID NO: 7923
  misc_feature (16)..(16): Xaa can be any naturally occuring amino acid

SEQ ID NO: 57743 - DNA, 1850 bp, Oryza sativa; identical to SEQ ID NO: 7924
  CDS (99)..(1634)

SEQ ID NO: 57744 - protein, 511 aa, Oryza sativa; identical to SEQ ID NO: 7925

SEQ ID NO: 57745 - DNA, 1644 bp, Candida glabrata; identical to SEQ ID NO: 7926
  CDS (1)..(1644)

SEQ ID NO: 57746 - protein, 547 aa, Candida glabrata; identical to SEQ ID NO: 7927

SEQ ID NO: 57747 - DNA, 2571 bp, Candida glabrata; identical to SEQ ID NO: 329
  CDS (1)..(2571)

SEQ ID NO: 57748 - protein, 856 aa, Candida glabrata; identical to SEQ ID NO: 330

SEQ ID NO: 57749 - DNA, 1713 bp, Candida glabrata; identical to SEQ ID NO: 7930
  CDS (1)..(1713)

SEQ ID NO: 57750 - protein, 570 aa, Candida glabrata; identical to SEQ ID NO: 7931

SEQ ID NO: 57751 - DNA, 2289 bp, Candida glabrata; identical to SEQ ID NO: 331
  CDS (1)..(2289)

SEQ ID NO: 57752 - protein, 762 aa, Candida glabrata; identical to SEQ ID NO: 332

SEQ ID NO: 57753 - DNA, 1695 bp, Candida glabrata; identical to SEQ ID NO: 335
  CDS (1)..(1695)

SEQ ID NO: 57754 - protein, 564 aa, Candida glabrata; identical to SEQ ID NO: 336

SEQ ID NO: 57755 - DNA, 1692 bp, Candida glabrata; identical to SEQ ID NO: 341
  CDS (1)..(1692)

SEQ ID NO: 57756 - protein, 563 aa, Candida glabrata; identical to SEQ ID NO: 342

SEQ ID NO: 57757 - DNA, 1707 bp, Candida glabrata; identical to SEQ ID NO: 343
  CDS (1)..(1707)

SEQ ID NO: 57758 - protein, 568 aa, Candida glabrata; identical to SEQ ID NO: 344

SEQ ID NO: 57759 - DNA, 1671 bp, Candida glabrata; identical to SEQ ID NO: 345
  CDS (1)..(1671)

SEQ ID NO: 57760 - protein, 556 aa, Candida glabrata; identical to SEQ ID NO: 346

SEQ ID NO: 57761 - DNA, 1754 bp, Oryza sativa; identical to SEQ ID NO: 7942
  CDS (115)..(1677)

SEQ ID NO: 57762 - protein, 520 aa, Oryza sativa; identical to SEQ ID NO: 7943

SEQ ID NO: 57763 - DNA, 2196 bp, Oryza sativa; identical to SEQ ID NO: 7944
  CDS (301)..(1746)

SEQ ID NO: 57764 - protein, 481 aa, Oryza sativa; identical to SEQ ID NO: 7945

SEQ ID NO: 57765 - DNA, 2048 bp, Equus caballus; identical to SEQ ID NO: 355
  misc_feature (1853)..(1853): n is a, c, g, or t
  CDS (178)..(1752)

SEQ ID NO: 57766 - protein, 524 aa, Equus caballus; identical to SEQ ID NO: 356

SEQ ID NO: 57767 - DNA, 1443 bp, Photobacterium profundum; identical to SEQ ID NO: 7948
  CDS (1)..(1443)

SEQ ID NO: 57768 - protein, 480 aa, Photobacterium profundum; identical to SEQ ID NO: 7949

SEQ ID NO: 57769 - DNA, 2181 bp, Drosophila melanogaster; identical to SEQ ID NO: 7950
  CDS (549)..(2015)

SEQ ID NO: 57770 - protein, 488 aa, Drosophila melanogaster; identical to SEQ ID NO: 7951

SEQ ID NO: 57771 - DNA, 2536 bp, Pichia angusta; identical to SEQ ID NO: 7952
  CDS (578)..(2203)

SEQ ID NO: 57772 - protein, 541 aa, Pichia angusta; identical to SEQ ID NO: 7953

SEQ ID NO: 57773 - DNA, 1544 bp, Bos taurus; identical to SEQ ID NO: 7954
  CDS (12)..(1541)

SEQ ID NO: 57774 - protein, 509 aa, Bos taurus; identical to SEQ ID NO: 7955

SEQ ID NO: 57775 - DNA, 1590 bp, Oryza sativa; identical to SEQ ID NO: 7956
  CDS (1)..(1590)

SEQ ID NO: 57776 - protein, 529 aa, Oryza sativa; identical to SEQ ID NO: 7957

SEQ ID NO: 57777 - DNA, 1548 bp, Oryza sativa; identical to SEQ ID NO: 7958
  CDS (1)..(1548)

SEQ ID NO: 57778 - protein, 515 aa, Oryza sativa; identical to SEQ ID NO: 7959

SEQ ID NO: 57779 - DNA, 2355 bp, Oryctolagus cuniculus; identical to SEQ ID NO: 7960
  CDS (1)..(1530)

SEQ ID NO: 57780 - protein, 509 aa, Oryctolagus cuniculus; identical to SEQ ID NO: 7961

SEQ ID NO: 57781 - DNA, 2073 bp, Bos taurus; identical to SEQ ID NO: 7962
  CDS (96)..(1532)

SEQ ID NO: 57782 - protein, 478 aa, Bos taurus; identical to SEQ ID NO: 7963

SEQ ID NO: 57783 - DNA, 1560 bp, Oryza sativa; identical to SEQ ID NO: 7964
  CDS (1)..(1560)

SEQ ID NO: 57784 - protein, 519 aa, Oryza sativa; identical to SEQ ID NO: 7965

SEQ ID NO: 57785 - DNA, 1891 bp, Plantago major; identical to SEQ ID NO: 369
  CDS (146)..(1738)

SEQ ID NO: 57786 - protein, 530 aa, Plantago major; identical to SEQ ID NO: 370

SEQ ID NO: 57787 - DNA, 1987 bp, Plantago major; identical to SEQ ID NO: 371
  CDS (116)..(1705)

SEQ ID NO: 57788 - protein, 529 aa, Plantago major; identical to SEQ ID NO: 372

SEQ ID NO: 57789 - DNA, 1407 bp, Bacillus cereus; identical to SEQ ID NO: 7970
  CDS (1)..(1407)

SEQ ID NO: 57790 - protein, 468 aa, Bacillus cereus; identical to SEQ ID NO: 7971

SEQ ID NO: 57791 - DNA, 1431 bp, Mycobacterium paratuberculosis; identical to SEQ ID NO: 7972
  CDS (1)..(1431)

SEQ ID NO: 57792 - protein, 476 aa, Mycobacterium paratuberculosis; identical to SEQ ID NO: 7973

SEQ ID NO: 57793 - DNA, 1716 bp, Ashbya gossypii; identical to SEQ ID NO: 7974
  CDS (1)..(1716)

SEQ ID NO: 57794 - protein, 571 aa, Ashbya gossypii; identical to SEQ ID NO: 7975

SEQ ID NO: 57795 - DNA, 1608 bp, Ashbya gossypii; identical to SEQ ID NO: 375
  CDS (1)..(1608)

SEQ ID NO: 57796 - protein, 535 aa, Ashbya gossypii; identical to SEQ ID NO: 376

SEQ ID NO: 57797 - DNA, 1641 bp, Ashbya gossypii; identical to SEQ ID NO: 377
  CDS (1)..(1641)

SEQ ID NO: 57798 - protein, 546 aa, Ashbya gossypii; identical to SEQ ID NO: 378

SEQ ID NO: 57799 - DNA, 1620 bp, Ashbya gossypii; identical to SEQ ID NO: 379
  CDS (1)..(1620)

SEQ ID NO: 57800 - protein, 539 aa, Ashbya gossypii; identical to SEQ ID NO: 380

SEQ ID NO: 57801 - DNA, 1644 bp, Ashbya gossypii; identical to SEQ ID NO: 381
  CDS (1)..(1644)

SEQ ID NO: 57802 - protein, 547 aa, Ashbya gossypii; identical to SEQ ID NO: 382

SEQ ID NO: 57803 - DNA, 1995 bp, Ashbya gossypii; identical to SEQ ID NO: 383
  CDS (1)..(1995)

SEQ ID NO: 57804 - protein, 664 aa, Ashbya gossypii; identical to SEQ ID NO: 384

SEQ ID NO: 57805 - DNA, 1476 bp, Shigella flexneri; identical to SEQ ID NO: 7986
  CDS (1)..(1476)

SEQ ID NO: 57806 - protein, 491 aa, Shigella flexneri; identical to SEQ ID NO: 7987

SEQ ID NO: 57807 - DNA, 1557 bp, Oryza sativa; identical to SEQ ID NO: 7988
  CDS (1)..(1557)

SEQ ID NO: 57808 - protein, 518 aa, Oryza sativa; identical to SEQ ID NO: 7989

SEQ ID NO: 57809 - DNA, 1774 bp, Anopheles gambiae str; identical to SEQ ID NO: 7990
  CDS (94)..(1542)

SEQ ID NO: 57810 - protein, 482 aa, Anopheles gambiae str; identical to SEQ ID NO: 7991

SEQ ID NO: 57811 - DNA, 1785 bp, Neurospora crassa; identical to SEQ ID NO: 7992
  CDS (1)..(1785)

SEQ ID NO: 57812 - protein, 594 aa, Neurospora crassa; identical to SEQ ID NO: 7993

SEQ ID NO: 57813 - DNA, 1620 bp, Neurospora crassa; identical to SEQ ID NO: 387
  CDS (1)..(1620)

SEQ ID NO: 57814 - protein, 539 aa, Neurospora crassa; identical to SEQ ID NO: 388

SEQ ID NO: 57815 - DNA, 1752 bp, Neurospora crassa; identical to SEQ ID NO: 401
  CDS (1)..(1752)

SEQ ID NO: 57816 - protein, 583 aa, Neurospora crassa; identical to SEQ ID NO: 402

SEQ ID NO: 57817 - DNA, 1464 bp, Neurospora crassa; identical to SEQ ID NO: 7998
  CDS (1)..(1464)

SEQ ID NO: 57818 - protein, 487 aa, Neurospora crassa; identical to SEQ ID NO: 7999

SEQ ID NO: 57819 - DNA, 1509 bp, Mycobacterium bovis; identical to SEQ ID NO: 425
  CDS (1)..(1509)

SEQ ID NO: 57820 - protein, 502 aa, Mycobacterium bovis; identical to SEQ ID NO: 426

SEQ ID NO: 57821 - DNA, 1455 bp, Rhodopirellula baltica; identical to SEQ ID NO: 8002
  CDS (1)..(1455)

SEQ ID NO: 57822 - protein, 484 aa, Rhodopirellula baltica; identical to SEQ ID NO: 8003

SEQ ID NO: 57823 - DNA, 1847 bp, Oryza sativa; identical to SEQ ID NO: 8004
  CDS (94)..(1647)

SEQ ID NO: 57824 - protein, 517 aa, Oryza sativa; identical to SEQ ID NO: 8005

SEQ ID NO: 57825 - DNA, 2251 bp, Oryza sativa; identical to SEQ ID NO: 427
  CDS (152)..(1723)

SEQ ID NO: 57826 - protein, 523 aa, Oryza sativa; identical to SEQ ID NO: 428

SEQ ID NO: 57827 - DNA, 1894 bp, Glycine max; identical to SEQ ID NO: 8008
  CDS (163)..(1734)

SEQ ID NO: 57828 - protein, 523 aa, Glycine max; identical to SEQ ID NO: 8009

SEQ ID NO: 57829 - DNA, 1648 bp, Orobanche ramosa; identical to SEQ ID NO: 429
  CDS (46)..(1605)

SEQ ID NO: 57830 - protein, 519 aa, Orobanche ramosa; identical to SEQ ID NO: 430

SEQ ID NO: 57831 - DNA, 1975 bp, Oryza sativa; identical to SEQ ID NO: 8012
  CDS (96)..(1604)

SEQ ID NO: 57832 - protein, 502 aa, Oryza sativa; identical to SEQ ID NO: 8013

SEQ ID NO: 57833 - DNA, 2458 bp, Oryza sativa; identical to SEQ ID NO: 8014
  CDS (510)..(2255)

SEQ ID NO: 57834 - protein, 581 aa, Oryza sativa; identical to SEQ ID NO: 8015

SEQ ID NO: 57835 - DNA, 2574 bp, Oryza sativa; identical to SEQ ID NO: 435
  CDS (569)..(2089)

SEQ ID NO: 57836 - protein, 506 aa, Oryza sativa; identical to SEQ ID NO: 436

SEQ ID NO: 57837 - DNA, 1413 bp, Streptomyces avermitilis; identical to SEQ ID NO: 8018
  CDS (1)..(1413)

SEQ ID NO: 57838 - protein, 470 aa, Streptomyces avermitilis; identical to SEQ ID NO: 8019

SEQ ID NO: 57839 - DNA, 1230 bp, Coxiella burnetii; identical to SEQ ID NO: 8020
  CDS (1)..(1230)

SEQ ID NO: 57840 - protein, 409 aa, Coxiella burnetii; identical to SEQ ID NO: 8021

SEQ ID NO: 57841 - DNA, 1407 bp, Shigella flexneri; identical to SEQ ID NO: 8022
  CDS (1)..(1407)

SEQ ID NO: 57842 - protein, 468 aa, Shigella flexneri; identical to SEQ ID NO: 8023

SEQ ID NO: 57843 - DNA, 1927 bp, Prunus cerasus; identical to SEQ ID NO: 441
  CDS (56)..(1585)

SEQ ID NO: 57844 - protein, 509 aa, Prunus cerasus; identical to SEQ ID NO: 442

SEQ ID NO: 57845 - DNA, 1838 bp, Medicago truncatula; identical to SEQ ID NO: 8026
  CDS (112)..(1650)

SEQ ID NO: 57846 - protein, 512 aa, Medicago truncatula; identical to SEQ ID NO: 8027

SEQ ID NO: 57847 - DNA, 1764 bp, Datisca glomerata; identical to SEQ ID NO: 8028
  CDS (79)..(1650)

SEQ ID NO: 57848 - protein, 523 aa, Datisca glomerata; identical to SEQ ID NO: 8029

SEQ ID NO: 57849 - DNA, 2032 bp, Prunus cerasus; identical to SEQ ID NO: 443
  CDS (74)..(1690)

SEQ ID NO: 57850 - protein, 538 aa, Prunus cerasus; identical to SEQ ID NO: 444

SEQ ID NO: 57851 - DNA, 1784 bp, Malus domestica; identical to SEQ ID NO: 8032
  CDS (116)..(1561)

SEQ ID NO: 57852 - protein, 481 aa, Malus domestica; identical to SEQ ID NO: 8033

SEQ ID NO: 57853 - DNA, 2012 bp, Malus domestica; identical to SEQ ID NO: 445
  CDS (104)..(1579)

SEQ ID NO: 57854 - protein, 491 aa, Malus domestica; identical to SEQ ID NO: 446

SEQ ID NO: 57855 - DNA, 2178 bp, Mesembryanthemum crystallinum; identical to SEQ ID NO: 8036
  CDS (512)..(2008)

SEQ ID NO: 57856 - protein, 498 aa, Mesembryanthemum crystallinum; identical to SEQ ID NO: 8037

SEQ ID NO: 57857 - DNA, 1569 bp, Oryza sativa; identical to SEQ ID NO: 8038
  CDS (1)..(1569)

SEQ ID NO: 57858 - protein, 522 aa, Oryza sativa; identical to SEQ ID NO: 8039

SEQ ID NO: 57859 - DNA, 1724 bp, Oryza sativa; identical to SEQ ID NO: 8040
  CDS (1)..(1578)

SEQ ID NO: 57860 - protein, 525 aa, Oryza sativa; identical to SEQ ID NO: 8041

SEQ ID NO: 57861 - DNA, 1422 bp, Pseudomonas syringae; identical to SEQ ID NO: 8042
  CDS (1)..(1422)

SEQ ID NO: 57862 - protein, 473 aa, Pseudomonas syringae; identical to SEQ ID NO: 8043

SEQ ID NO: 57863 - DNA, 1467 bp, Lactobacillus plantarum; identical to SEQ ID NO: 8044
  CDS (1)..(1467)

SEQ ID NO: 57864 - protein, 488 aa, Lactobacillus plantarum; identical to SEQ ID NO: 8045

SEQ ID NO: 57865 - DNA, 1413 bp, Lactobacillus plantarum; identical to SEQ ID NO: 8046
  CDS (1)..(1413)

SEQ ID NO: 57866 - protein, 470 aa, Lactobacillus plantarum; identical to SEQ ID NO: 8047

SEQ ID NO: 57867 - DNA, 1401 bp, Lactobacillus plantarum; identical to SEQ ID NO: 8048
  CDS (1)..(1401)

SEQ ID NO: 57868 - protein, 466 aa, Lactobacillus plantarum; identical to SEQ ID NO: 8049

SEQ ID NO: 57869 - DNA, 1383 bp, Bacteroides thetaiotaomicron; identical to SEQ ID NO: 8050
  CDS (1)..(1383)

SEQ ID NO: 57870 - protein, 460 aa, Bacteroides thetaiotaomicron; identical to SEQ ID NO: 8051

SEQ ID NO: 57871 - DNA, 1407 bp, Bacteroides thetaiotaomicron; identical to SEQ ID NO: 453
  CDS (1)..(1407)

SEQ ID NO: 57872 - protein, 468 aa, Bacteroides thetaiotaomicron; identical to SEQ ID NO: 454

SEQ ID NO: 57873 - DNA, 1455 bp, Bacteroides thetaiotaomicron; identical to SEQ ID NO: 8054
  CDS (1)..(1455)

SEQ ID NO: 57874 - protein, 484 aa, Bacteroides thetaiotaomicron; identical to SEQ ID NO: 8055

SEQ ID NO: 57875 - DNA, 1407 bp, Bacteroides thetaiotaomicron; identical to SEQ ID NO: 455
  CDS (1)..(1407)

SEQ ID NO: 57876 - protein, 468 aa, Bacteroides thetaiotaomicron; identical to SEQ ID NO: 456

SEQ ID NO: 57877 - DNA, 1404 bp, Staphylococcus epidermidis; identical to SEQ ID NO: 457
  CDS (1)..(1404)

SEQ ID NO: 57878 - protein, 467 aa, Staphylococcus epidermidis; identical to SEQ ID NO: 458

SEQ ID NO: 57879 - DNA, 1392 bp, Oceanobacillus iheyensis; identical to SEQ ID NO: 8060
  CDS (1)..(1392)

SEQ ID NO: 57880 - protein, 463 aa, Oceanobacillus iheyensis; identical to SEQ ID NO: 8061

SEQ ID NO: 57881 - DNA, 1548 bp, Escherichia coli O6; identical to SEQ ID NO: 8062
  CDS (1)..(1548)

SEQ ID NO: 57882 - protein, 515 aa, Escherichia coli O6; identical to SEQ ID NO: 8063

SEQ ID NO: 57883 - DNA, 1554 bp, Bifidobacterium longum; identical to SEQ ID NO: 8064
  CDS (1)..(1554)

SEQ ID NO: 57884 - protein, 517 aa, Bifidobacterium longum; identical to SEQ ID NO: 8065

SEQ ID NO: 57885 - DNA, 1515 bp, Arabidopsis thaliana; identical to SEQ ID NO: 8066
  CDS (1)..(1515)

SEQ ID NO: 57886 - protein, 504 aa, Arabidopsis thaliana; identical to SEQ ID NO: 8067

SEQ ID NO: 57887 - DNA, 1545 bp, Aspergillus niger; identical to SEQ ID NO: 459
  CDS (1)..(1545)

SEQ ID NO: 57888 - protein, 514 aa, Aspergillus niger; identical to SEQ ID NO: 460

SEQ ID NO: 57889 - DNA, 1752 bp, Aspergillus niger; identical to SEQ ID NO: 463
  CDS (1)..(1752)

SEQ ID NO: 57890 - protein, 583 aa, Aspergillus niger; identical to SEQ ID NO: 464

SEQ ID NO: 57891 - DNA, 1584 bp, Emericella nidulans; identical to SEQ ID NO: 467
  CDS (1)..(1584)

SEQ ID NO: 57892 - protein, 527 aa, Emericella nidulans; identical to SEQ ID NO: 468

SEQ ID NO: 57893 - DNA, 1512 bp, Arabidopsis thaliana; identical to SEQ ID NO: 8074
  CDS (1)..(1512)

SEQ ID NO: 57894 - protein, 503 aa, Arabidopsis thaliana; identical to SEQ ID NO: 472

SEQ ID NO: 57895 - DNA, 1837 bp, Arabidopsis thaliana; identical to SEQ ID NO: 8076
  CDS (131)..(1699)

SEQ ID NO: 57896 - protein, 522 aa, Arabidopsis thaliana; identical to SEQ ID NO: 8077

SEQ ID NO: 57897 - DNA, 1536 bp, Oryza sativa; identical to SEQ ID NO: 8078
  CDS (1)..(1536)

SEQ ID NO: 57898 - protein, 511 aa, Oryza sativa; identical to SEQ ID NO: 8079

SEQ ID NO: 57899 - DNA, 1673 bp, Drosophila melanogaster; identical to SEQ ID NO: 8080
  CDS (88)..(1554)

SEQ ID NO: 57900 - protein, 488 aa, Drosophila melanogaster; identical to SEQ ID NO: 8081

SEQ ID NO: 57901 - DNA, 2234 bp, Kluyveromyces lactis; identical to SEQ ID NO: 473
  CDS (402)..(2102)

SEQ ID NO: 57902 - protein, 566 aa, Kluyveromyces lactis; identical to SEQ ID NO: 474

SEQ ID NO: 57903 - DNA, 1476 bp, Corynebacterium glutamicum; identical to SEQ ID NO: 8084
  CDS (1)..(1476)

SEQ ID NO: 57904 - protein, 491 aa, Corynebacterium glutamicum; identical to SEQ ID NO: 476

SEQ ID NO: 57905 - DNA, 1446 bp, Xanthomonas campestris; identical to SEQ ID NO: 8086
  CDS (1)..(1446)

SEQ ID NO: 57906 - protein, 481 aa, Xanthomonas campestris; identical to SEQ ID NO: 8087

SEQ ID NO: 57907 - DNA, 1428 bp, Xanthomonas axonopodis; identical to SEQ ID NO: 8088
  CDS (1)..(1428)

SEQ ID NO: 57908 - protein, 475 aa, Xanthomonas axonopodis; identical to SEQ ID NO: 8089

SEQ ID NO: 57909 - DNA, 1778 bp, Apium graveolens var; identical to SEQ ID NO: 8090
  CDS (79)..(1650)

SEQ ID NO: 57910 - protein, 523 aa, Apium graveolens var; identical to SEQ ID NO: 8091

SEQ ID NO: 57911 - DNA, 2118 bp, Homo sapiens; identical to SEQ ID NO: 8092
  CDS (110)..(1603)

SEQ ID NO: 57912 - protein, 497 aa, Homo sapiens; identical to SEQ ID NO: 8093

SEQ ID NO: 57913 - DNA, 1449 bp, Arabidopsis thaliana; identical to SEQ ID NO: 8094
  CDS (1)..(1449)

SEQ ID NO: 57914 - protein, 482 aa, Arabidopsis thaliana; identical to SEQ ID NO: 482

SEQ ID NO: 57915 - DNA, 1561 bp, Arabidopsis thaliana; identical to SEQ ID NO: 8096
  CDS (1)..(1530)

SEQ ID NO: 57916 - protein, 509 aa, Arabidopsis thaliana; identical to SEQ ID NO: 8097

SEQ ID NO: 57917 - DNA, 1420 bp, Arabidopsis thaliana; identical to SEQ ID NO: 8098
  CDS (1)..(1389)

SEQ ID NO: 57918 - protein, 462 aa, Arabidopsis thaliana; identical to SEQ ID NO: 8099

SEQ ID NO: 57919 - DNA, 1998 bp, Oryza sativa; identical to SEQ ID NO: 8100
  CDS (197)..(1717)

SEQ ID NO: 57920 - protein, 506 aa, Oryza sativa; identical to SEQ ID NO: 8101

SEQ ID NO: 57921 - DNA, 2145 bp, Homo sapiens; identical to SEQ ID NO: 8102
  CDS (46)..(1479)

SEQ ID NO: 57922 - protein, 477 aa, Homo sapiens; identical to SEQ ID NO: 8103

SEQ ID NO: 57923 - DNA, 1419 bp, Salmonella typhimurium; identical to SEQ ID NO: 8104
  CDS (1)..(1419)

SEQ ID NO: 57924 - protein, 472 aa, Salmonella typhimurium; identical to SEQ ID NO: 8105

SEQ ID NO: 57925 - DNA, 2039 bp, Olea europaea; identical to SEQ ID NO: 8106
  CDS (133)..(1767)

SEQ ID NO: 57926 - protein, 544 aa, Olea europaea; identical to SEQ ID NO: 8107

SEQ ID NO: 57927 - DNA, 1521 bp, Arabidopsis thaliana; identical to SEQ ID NO: 8108
  CDS (1)..(1521)

SEQ ID NO: 57928 - protein, 506 aa, Arabidopsis thaliana; identical to SEQ ID NO: 8109

SEQ ID NO: 57929 - DNA, 1557 bp, Arabidopsis thaliana; identical to SEQ ID NO: 8110
  CDS (1)..(1467)

SEQ ID NO: 57930 - protein, 488 aa, Arabidopsis thaliana; identical to SEQ ID NO: 8111

SEQ ID NO: 57931 - DNA, 1876 bp, Arabidopsis thaliana; identical to SEQ ID NO: 8112
  CDS (87)..(1727)

SEQ ID NO: 57932 - protein, 546 aa, Arabidopsis thaliana; identical to SEQ ID NO: 8113

SEQ ID NO: 57933 - DNA, 1377 bp, Arabidopsis thaliana; identical to SEQ ID NO: 8114
  CDS (1)..(1377)

SEQ ID NO: 57934 - protein, 458 aa, Arabidopsis thaliana; identical to SEQ ID NO: 8115

SEQ ID NO: 57935 - DNA, 1608 bp, Oryza sativa; identical to SEQ ID NO: 8116
  CDS (1)..(1608)

SEQ ID NO: 57936 - protein, 535 aa, Oryza sativa; identical to SEQ ID NO: 8117

SEQ ID NO: 57937 - DNA, 1606 bp, Arabidopsis thaliana; identical to SEQ ID NO: 8118
  CDS (18)..(1454)

SEQ ID NO: 57938 - protein, 478 aa, Arabidopsis thaliana; identical to SEQ ID NO: 8119

SEQ ID NO: 57939 - DNA, 1787 bp, Arabidopsis thaliana; identical to SEQ ID NO: 8120
  CDS (100)..(1524)

SEQ ID NO: 57940 - protein, 474 aa, Arabidopsis thaliana; identical to SEQ ID NO: 8121

SEQ ID NO: 57941 - DNA, 1539 bp, Oryza sativa; identical to SEQ ID NO: 8122
  CDS (1)..(1539)

SEQ ID NO: 57942 - protein, 512 aa, Oryza sativa; identical to SEQ ID NO: 8123

SEQ ID NO: 57943 - DNA, 1702 bp, Oryza sativa; identical to SEQ ID NO: 8124
  CDS (87)..(1628)

SEQ ID NO: 57944 - protein, 513 aa, Oryza sativa; identical to SEQ ID NO: 8125

SEQ ID NO: 57945 - DNA, 1569 bp, Uromyces fabae; identical to SEQ ID NO: 487
  CDS (1)..(1569)

SEQ ID NO: 57946 - protein, 522 aa, Uromyces fabae; identical to SEQ ID NO: 488

SEQ ID NO: 57947 - DNA, 1380 bp, Sulfolobus tokodaii; identical to SEQ ID NO: 8128
  CDS (1)..(1380)

SEQ ID NO: 57948 - protein, 459 aa, Sulfolobus tokodaii; identical to SEQ ID NO: 8129

SEQ ID NO: 57949 - DNA, 1503 bp, Thermoplasma volcanium; identical to SEQ ID NO: 8130
  CDS (1)..(1503)

SEQ ID NO: 57950 - protein, 500 aa, Thermoplasma volcanium; identical to SEQ ID NO: 8131

SEQ ID NO: 57951 - DNA, 1440 bp, Zymomonas mobilis; identical to SEQ ID NO: 493
  CDS (1)..(1440)

SEQ ID NO: 57952 - protein, 479 aa, Zymomonas mobilis; identical to SEQ ID NO: 494

SEQ ID NO: 57953 - DNA, 1865 bp, Arabidopsis thaliana; identical to SEQ ID NO: 8134
  CDS (66)..(1742)

SEQ ID NO: 57954 - protein, 558 aa, Arabidopsis thaliana; identical to SEQ ID NO: 8135

SEQ ID NO: 57955 - DNA, 1545 bp, Arabidopsis thaliana; identical to SEQ ID NO: 8136
  CDS (1)..(1545)

SEQ ID NO: 57956 - protein, 514 aa, Arabidopsis thaliana; identical to SEQ ID NO: 8137

SEQ ID NO: 57957 - DNA, 1766 bp, Apium graveolens var; identical to SEQ ID NO: 495
  CDS (17)..(1558)

SEQ ID NO: 57958 - protein, 513 aa, Apium graveolens var; identical to SEQ ID NO: 496

SEQ ID NO: 57959 - DNA, 2041 bp, Mesembryanthemum crystallinum; identical to SEQ ID NO: 497
  CDS (118)..(1785)

SEQ ID NO: 57960 - protein, 555 aa, Mesembryanthemum crystallinum; identical to SEQ ID NO: 498

SEQ ID NO: 57961 - DNA, 1961 bp, Saccharomyces pastorianus; identical to SEQ ID NO: 8142
  CDS (192)..(1904)

SEQ ID NO: 57962 - protein, 570 aa, Saccharomyces pastorianus; identical to SEQ ID NO: 8143

SEQ ID NO: 57963 - DNA, 1458 bp, Thermoplasma acidophilum; identical to SEQ ID NO: 8144
  CDS (1)..(1458)

SEQ ID NO: 57964 - protein, 485 aa, Thermoplasma acidophilum; identical to SEQ ID NO: 8145

SEQ ID NO: 57965 - DNA, 1413 bp, Lactobacillus casei; identical to SEQ ID NO: 8146
  CDS (1)..(1413)

SEQ ID NO: 57966 - protein, 470 aa, Lactobacillus casei; identical to SEQ ID NO: 8147

SEQ ID NO: 57967 - DNA, 1699 bp, Lycopersicon esculentum; identical to SEQ ID NO: 8148
  CDS (24)..(1466)

SEQ ID NO: 57968 - protein, 480 aa, Lycopersicon esculentum; identical to SEQ ID NO: 8149

SEQ ID NO: 57969 - DNA, 2013 bp, Mesembryanthemum crystallinum; identical to SEQ ID NO: 8150
  CDS (131)..(1876)

SEQ ID NO: 57970 - protein, 581 aa, Mesembryanthemum crystallinum; identical to SEQ ID NO: 8151

SEQ ID NO: 57971 - DNA, 2422 bp, Mesembryanthemum crystallinum; identical to SEQ ID NO: 8152
  CDS (386)..(2131)

SEQ ID NO: 57972 - protein, 581 aa, Mesembryanthemum crystallinum; identical to SEQ ID NO: 8153

SEQ ID NO: 57973 - DNA, 1864 bp, Spinacia oleracea; identical to SEQ ID NO: 501
  CDS (61)..(1716)

SEQ ID NO: 57974 - protein, 551 aa, Spinacia oleracea; identical to SEQ ID NO: 502

SEQ ID NO: 57975 - DNA, 1822 bp, Arabidopsis thaliana; identical to SEQ ID NO: 503
  CDS (65)..(1684)

SEQ ID NO: 57976 - protein, 539 aa, Arabidopsis thaliana; identical to SEQ ID NO: 504

SEQ ID NO: 57977 - DNA, 1545 bp, Arabidopsis thaliana; identical to SEQ ID NO: 8158
  CDS (1)..(1545)

SEQ ID NO: 57978 - protein, 514 aa, Arabidopsis thaliana; identical to SEQ ID NO: 8159

SEQ ID NO: 57979 - DNA, 1624 bp, Arabidopsis thaliana; identical to SEQ ID NO: 8160
  CDS (73)..(1464)

SEQ ID NO: 57980 - protein, 463 aa, Arabidopsis thaliana; identical to SEQ ID NO: 8161

SEQ ID NO: 57981 - DNA, 1578 bp, Arabidopsis thaliana; identical to SEQ ID NO: 8162
  CDS (1)..(1434)

SEQ ID NO: 57982 - protein, 477 aa, Arabidopsis thaliana; identical to SEQ ID NO: 8163

SEQ ID NO: 57983 - DNA, 1524 bp, Arabidopsis thaliana; identical to SEQ ID NO: 8164
  CDS (1)..(1524)

SEQ ID NO: 57984 - protein, 507 aa, Arabidopsis thaliana; identical to SEQ ID NO: 8165

SEQ ID NO: 57985 - DNA, 1976 bp, Lycopersicon esculentum; identical to SEQ ID NO: 8166
  CDS (87)..(1658)

SEQ ID NO: 57986 - protein, 523 aa, Lycopersicon esculentum; identical to SEQ ID NO: 8167

SEQ ID NO: 57987 - DNA, 1653 bp, Pichia stipitis; identical to SEQ ID NO: 505
  CDS (1)..(1653)

SEQ ID NO: 57988 - protein, 550 aa, Pichia stipitis; identical to SEQ ID NO: 506

SEQ ID NO: 57989 - DNA, 2169 bp, Drosophila melanogaster; identical to SEQ ID NO: 8170
  CDS (579)..(2024)

SEQ ID NO: 57990 - protein, 481 aa, Drosophila melanogaster; identical to SEQ ID NO: 8171

SEQ ID NO: 57991 - DNA, 1587 bp, Drosophila melanogaster; identical to SEQ ID NO: 8172
  CDS (47)..(1444)

SEQ ID NO: 57992 - protein, 465 aa, Drosophila melanogaster; identical to SEQ ID NO: 8173

SEQ ID NO: 57993 - DNA, 2514 bp, Drosophila melanogaster; identical to SEQ ID NO: 8174
  CDS (463)..(2082)

SEQ ID NO: 57994 - protein, 539 aa, Drosophila melanogaster; identical to SEQ ID NO: 8175

SEQ ID NO: 57995 - DNA, 1560 bp, Vitis vinifera; identical to SEQ ID NO: 8176
  CDS (1)..(1560)

SEQ ID NO: 57996 - protein, 519 aa, Vitis vinifera; identical to SEQ ID NO: 8177

SEQ ID NO: 57997 - DNA, 1686 bp, Arabidopsis thaliana; identical to SEQ ID NO: 8178
  CDS (130)..(1521)

SEQ ID NO: 57998 - protein, 463 aa, Arabidopsis thaliana; identical to SEQ ID NO: 8179

SEQ ID NO: 57999 - DNA, 2468 bp, Mus musculus; identical to SEQ ID NO: 515
  CDS (34)..(1605)

SEQ ID NO: 58000 - protein, 523 aa, Mus musculus; identical to SEQ ID NO: 516

SEQ ID NO: 58001 - DNA, 2355 bp, Canis familiaris; identical to SEQ ID NO: 517
  CDS (201)..(1688)

SEQ ID NO: 58002 - protein, 495 aa, Canis familiaris; identical to SEQ ID NO: 518

SEQ ID NO: 58003 - DNA, 1485 bp, Ovis aries; identical to SEQ ID NO: 519
  CDS (1)..(1485)

SEQ ID NO: 58004 - protein, 494 aa, Ovis aries; identical to SEQ ID NO: 520

SEQ ID NO: 58005 - DNA, 2425 bp, Kluyveromyces lactis; identical to SEQ ID NO: 523
  CDS (539)..(2194)

SEQ ID NO: 58006 - protein, 551 aa, Kluyveromyces lactis; identical to SEQ ID NO: 524

SEQ ID NO: 58007 - DNA, 2353 bp, Chlorella kessleri; identical to SEQ ID NO: 8188
  CDS (57)..(1679)

SEQ ID NO: 58008 - protein, 540 aa, Chlorella kessleri; identical to SEQ ID NO: 8189

SEQ ID NO: 58009 - DNA, 1731 bp, Saccharomyces cerevisiae; identical to SEQ ID NO: 8190
  CDS (1)..(1731)

SEQ ID NO: 58010 - protein, 576 aa, Saccharomyces cerevisiae; identical to SEQ ID NO: 526

SEQ ID NO: 58011 - DNA, 3261 bp, Homo sapiens; identical to SEQ ID NO: 8192
  CDS (109)..(1998): Xaa of translated CDS can stand for any naturally occuring amino acid which can be translated from respective CDS-codon

SEQ ID NO: 58012 - protein, 629 aa, Homo sapiens; identical to SEQ ID NO: 8193
  misc_feature (227)..(227): Xaa can be any naturally occuring amino acid
  misc_feature (436)..(436): Xaa can be any naturally occuring amino acid

SEQ ID NO: 58013 - DNA, 2504 bp, Rattus norvegicus; identical to SEQ ID NO: 8194
  CDS (145)..(2001)

SEQ ID NO: 58014 - protein, 618 aa, Rattus norvegicus; identical to SEQ ID NO: 8195

SEQ ID NO: 58015 - DNA, 3642 bp, Saccharomyces cerevisiae; identical to SEQ ID NO: 7728
  CDS (749)..(3205)

SEQ ID NO: 58016 - protein, 818 aa, Saccharomyces cerevisiae; identical to SEQ ID NO: 8197

SEQ ID NO: 58017 - DNA, 1374 bp, Lactobacillus brevis; identical to SEQ ID NO: 8198
  CDS (1)..(1374)

SEQ ID NO: 58018 - protein, 457 aa, Lactobacillus brevis; identical to SEQ ID NO: 8199

SEQ ID NO: 58019 - DNA, 1500 bp, Xenopus laevis; identical to SEQ ID NO: 8200
  CDS (1)..(1500)

SEQ ID NO: 58020 - protein, 499 aa, Xenopus laevis; identical to SEQ ID NO: 8201

SEQ ID NO: 58021 - DNA, 1470 bp, Gadus morhua; identical to SEQ ID NO: 8202
  CDS (1)..(1470)

SEQ ID NO: 58022 - protein, 489 aa, Gadus morhua; identical to SEQ ID NO: 8203

SEQ ID NO: 58023 - DNA, 25 bp, Artificial sequence
  Primer sequence
atgggaatacacataccatatctca

SEQ ID NO: 58024 - DNA, 26 bp, Artificial sequence
  Primer sequence
ctatatatcctctataatctcttgag

SEQ ID NO: 58025 - protein, 728 aa, Artificial sequence; identical to SEQ ID NO: 34657
  Consensus
  Variant (2)..(3): Xaa in position 2 to 3 is any amino acid
  Variant (8)..(9): Xaa in position 8 to 9 is any amino acid
  Variant (10)..(44): Xaa in position 10 to 44 is any or no amino acid
  Variant (46)..(46): Xaa in position 46 is any amino acid
  Variant (48)..(67): Xaa in position 48 to 67 is any amino acid
  Variant (68)..(88): Xaa in position 68 to 88 is any or no amino acid
  Variant (90)..(93): Xaa in position 90 to 93 is any amino acid
  Variant (95)..(97): Xaa in position 95 to 97 is any amino acid
  Variant (99)..(109): Xaa in position 99 to 109 is any amino acid
  Variant (113)..(114): Xaa in position 113 to 114 is any amino acid
  Variant (116)..(124): Xaa in position 116 to 124 is any amino acid
  Variant (126)..(131): Xaa in position 126 to 131 is any amino acid
  Variant (133)..(136): Xaa in position 133 to 136 is any amino acid
  Variant (137)..(155): Xaa in position 137 to 155 is any or no amino acid
  Variant (157)..(158): Xaa in position 157 to 158 is any amino acid
  Variant (161)..(161): Xaa in position 161 is any amino acid
  Variant (163)..(163): Xaa in position 163 is any amino acid
  Variant (165)..(165): Xaa in position 165 is any amino acid
  Variant (169)..(174): Xaa in position 169 to 174 is any amino acid
  Variant (181)..(181): Xaa in position 181 is any amino acid
  Variant (184)..(184): Xaa in position 184 is any amino acid
  Variant (185)..(186): Xaa in position 185 to 186 is any or no amino acid
  Variant (189)..(189): Xaa in position 189 is any or no amino acid
  Variant (191)..(195): Xaa in position 191 to 195 is any amino acid
  Variant (197)..(197): Xaa in position 197 is any amino acid
  Variant (199)..(200): Xaa in position 199 to 200 is any amino acid
  Variant (203)..(212): Xaa in position 203 to 212 is any amino acid
  Variant (213)..(256): Xaa in position 213 to 256 is any or no amino acid
  Variant (259)..(261): Xaa in position 259 to 261 is any amino acid
  Variant (264)..(267): Xaa in position 264 to 267 is any amino acid
  Variant (269)..(277): Xaa in position 269 to 277 is any amino acid
  Variant (278)..(278): Xaa in position 278 is any or no amino acid
  Variant (287)..(294): Xaa in position 287 to 294 is any amino acid
  Variant (295)..(338): Xaa in position 295 to 338 is any or no amino acid
  Variant (340)..(342): Xaa in position 340 to 342 is any amino acid
  Variant (344)..(363): Xaa in position 344 to 363 is any amino acid
  Variant (364)..(411): Xaa in position 364 to 411 is any or no amino acid
  Variant (413)..(414): Xaa in position 413 to 414 is any amino acid
  Variant (416)..(417): Xaa in position 416 to 417 is any amino acid
  Variant (419)..(421): Xaa in position 419 to 421 is any amino acid
  Variant (424)..(425): Xaa in position 424 to 425 is any amino acid
  Variant (427)..(427): Xaa in position 427 is any amino acid
  Variant (429)..(429): Xaa in position 429 is any amino acid
  Variant (431)..(431): Xaa in position 431 is any amino acid
  Variant (434)..(436): Xaa in position 434 to 436 is any amino acid
  Variant (439)..(452): Xaa in position 439 to 452 is any amino acid
  Variant (453)..(465): Xaa in position 453 to 465 is any or no amino acid
  Variant (467)..(479): Xaa in position 467 to 479 is any amino acid
  Variant (483)..(483): Xaa in position 483 is any amino acid
  Variant (487)..(487): Xaa in position 487 is any amino acid
  Variant (489)..(489): Xaa in position 489 is any amino acid
  Variant (491)..(491): Xaa in position 491 is any amino acid
  Variant (492)..(502): Xaa in position 492 to 502 is any or no amino acid
  Variant (504)..(522): Xaa in position 504 to 522 is any amino acid
  Variant (523)..(622): Xaa in position 523 to 622 is any or no amino acid
  Variant (624)..(627): Xaa in position 624 to 627 is any amino acid
  Variant (628)..(628): Xaa in position 628 is any or no amino acid
  Variant (631)..(632): Xaa in position 631 to 632 is any amino acid
  Variant (634)..(637): Xaa in position 634 to 637 is any amino acid
  Variant (639)..(639): Xaa in position 639 is any amino acid
  Variant (641)..(641): Xaa in position 641 is any amino acid
  Variant (643)..(643): Xaa in position 643 is any amino acid
  Variant (645)..(646): Xaa in position 645 to 646 is any amino acid
  Variant (648)..(648): Xaa in position 648 is any amino acid
  Variant (650)..(650): Xaa in position 650 is any or no amino acid
  Variant (652)..(654): Xaa in position 652 to 654 is any amino acid
  Variant (656)..(657): Xaa in position 656 to 657 is any or no amino acid
  Variant (659)..(660): Xaa in position 659 to 660 is any or no amino acid
  Variant (662)..(665): Xaa in position 662 to 665 is any amino acid
  Variant (667)..(672): Xaa in position 667 to 672 is any amino acid
  Variant (674)..(679): Xaa in position 674 to 679 is any amino acid
  Variant (681)..(687): Xaa in position 681 to 687 is any amino acid
  Variant (688)..(698): Xaa in position 688 to 698 is any or no amino acid
  Variant (700)..(701): Xaa in position 700 to 701 is any amino acid
  Variant (703)..(711): Xaa in position 703 to 711 is any amino acid
  Variant (713)..(716): Xaa in position 713 to 716 is any amino acid
  Variant (723)..(724): Xaa in position 723 to 724 is any amino acid
  Variant (727)..(727): Xaa in position 727 is any amino acid

SEQ ID NO: 58026 - protein, 20 aa, Artificial sequence
  Consensus
  Variant (1)..(1): Xaa in position 1 is Leu, Val, Ile, Met, Phe or Ala
  Variant (2)..(4): Xaa in position 2 to 4 is any amino acid
  Variant (5)..(5): Xaa in position 5 is Gln, Asn, Gly or Leu
  Variant (6)..(6): Xaa in position 6 is Gln or Ile
  Variant (7)..(8): Xaa in position 7 to 8 is any amino acid
  Variant (10)..(10): Xaa in position 10 is any amino acid
  Variant (11)..(11): Xaa in position 11 is Asn, Asp, Ser, Pro or Glu
  Variant (12)..(14): Xaa in position 12 to 14 is any amino acid
  Variant (15)..(15): Xaa in position 15 is Tyr, Phe, Leu or Ser
  Variant (16)..(16): Xaa in position 16 is Tyr or Phe
  Variant (17)..(19): Xaa in position 17 to 19 is any amino acid
  Variant (20)..(20): Xaa in position 20 is Ile, Leu, Val or Phe
XXXXXXXXGXXXXXXXXXXX

SEQ ID NO: 58027 - DNA, 657 bp, Saccharomyces cerevisiae
  CDS (1)..(657)
atggcagattattcttcccttactgttgttcaattgaaagatttactgaccaagagaaatctgtctgtaggcggattgaagaatgaactagttcaaagactgataaaggacgatgaagaatcaaagggtgaaagtgaagtttctccacaggaacaaaaccaggaacaagggtcagaacctgcggcgatagaagaaccagcctcccagaacattactgaaaaaaaggaagtttcaagcgagcctaaagaaacaaacgaacccaaggaggaaaataaggacgttcaaaagccctctgatggaccttctgctactgcttcagagaacgaacaagctgctgcttccactgctgctcccgctttgtcaccagaagaaattaaggccaaagcattggatcttttaaataagaaactgcaccgcgctaacaaattcggtcaagatcaagcggatattgactctttacaaagacagataaatcgtgtggagaagtttggtgttgacttgaatagcaagttggctgaagaactgggccttgtcagtaggaaaaatgaacctgaaagtggcaataacggtaaatttaaaaatagaaacaaaaatgcaaacaaccgctccagagtaagtaaaaacaggagaggcaaccgctctggttacagaagataa

SEQ ID NO: 58028 - protein, 218 aa, Saccharomyces cerevisiae
MADYSSLTVVQLKDLLTKRNLSVGGLKNELVQRLIKDDEESKGESEVSPQEQNQEQGSEPAAIEEPASQNITEKKEVSSEPKETNEPKEENKDVQKPSDGPSATASENEQAAASTAAPALSPEEIKAKALDLLNKKLHRANKFGQDQADIDSLQRQINRVEKFGVDLNSKLAEELGLVSRKNEPESGNNGKFKNRNKNANNRSRVSKNRRGNRSGYRR

SEQ ID NO: 58029 - DNA, 618 bp, Eremothecium gossypii
  CDS (1)..(618)
atggacatcgatcacgtggcatcagcggcgcgcaaagcgggcgcgaccgacgccaccggctggccctggctggccaaccgtcagagccacgacgagatgacggactacgccagcatgacagttgcacagctgaaggacgtgctcaaggagcgcgagcttcccacacagggcctaaaagcggcgcttgtggagcggctgcagcaggcagacgcgacagcggctgagcctaccgacgcgaccacgcgtcctgccgcagaggagcacacgccggaggcggcggagcctgctgcaacgcctgcagaggccgaggctcctgtggctgagcagcgtgcagcagctgagccccgcacgctctcccccgaagagatgaagcaggctgctgtggcgcacctcagcaagaaattgcaccgcgcacgcaagttcggcgaggacgacgcggcagtgggtgcgctgcaaaagcagctagcgcggctcgagaagttcggcctggacctaacgacgcagcttgcccaggagctcggtttcggccgcggccctgcggcggccgtcggaaagcatgccttccacaggcgacgtggctaccaccagggcaagaagtttaaggcccagcgcaggtga

SEQ ID NO: 58030 - protein, 205 aa, Eremothecium gossypii
MDIDHVASAARKAGATDATGWPWLANRQSHDEMTDYASMTVAQLKDVLKERELPTQGLKAALVERLQQADATAAEPTDATTRPAAEEHTPEAAEPAATPAEAEAPVAEQRAAAEPRTLSPEEMKQAAVAHLSKKLHRARKFGEDDAAVGALQKQLARLEKFGLDLTTQLAQELGFGRGPAAAVGKHAFHRRRGYHQGKKFKAQRR

SEQ ID NO: 58031 - DNA, 1908 bp, Magnaporthe grisea 70-15
  CDS (1)..(1908)
atgacgactgactggagtaaaaacaaggttgtcgaccttagagccgagctcactcgcagaggcctagctaccaatggcctaaagcaggaactggtagatcgcctgacaagcgacgatgaagccaagctgaaggaggaacctgaagccgatgcgcccaagcctgatgatcaatcaccccccgccgatgaatcgacagatgttgcagccgaacaacctgaagctgtgcaagaaaccgcaacaccccaacaagccgaacctgcgcaggacctgccgaacgagaccacgacagaggcgcaagaaattgcaaattccgatgcgcccgcagctcttttggctgatgcagtcggcgatgagaagaaacgcaagcgtcgctcagccagtccgccaccgcctcacgatgatacaccgaggaagcgtcttcggcaggagaatagcgacgtaatggagaacggtggcaatgatgccgatccagtcaccagtgatctctcacagcctgtatctgccacccacgatgatgaagatgtcaccatgcaggaaggtgcggaacatcaggccgcaccaacggcaaaagatgctacacgcggagccccaccagagtccagccaaaagatggagcaagaggatgttgttgactacggagccgactcgccggtagctcagcaagacacggagcaggtttcctcaaataagcaagagtcgggagacggcgatatcgacatgaaggacgttgcgaaagatgccgccctacagggtacagaccaattttattacgacgtccctcgcgcaagagatggggatgactctgttgagcctgcgctgcaccctgcaaccgatagtctgttcattggtaactttatgcgcccgcttcgagccgacgttgtcgaggatcatcttgttgaactggccatgagccctggtgcggcacccgatcgctcggtactgtcacagttgtgggtagacagtattcgtacccacgctcttgtacagttccaatccgttgcagccgcatcccgtgtacggacagctctccacggaaaagtgtggccagacgagaggaacaggaaagcgctttgggttgacttcatcccgtcagatcaggttagtgactggatcgccaaggagaaggcagagggaagtagcagaaggggcgacgtctctaggtgggaggtggtgtaccagaaagagggcgacatcatggttgcaacgcaccaagtcgccattgcagagccaaaaacaaccgcaccgccatcaggaccgaacggtgcatcgcgggctgtacctaccggcccagcaaaccagtacccgggcatagaatctgcaccatcaggtcctcgcaacatgggcggtcgacgtggtgccggcgatgcccgaggaaatggacacgagcgtacacgcacatcaccgtctatcagttggcagcccgtttctgctgatcttgctcgccggcgactcgacaacctcaacggcttcgtctccaaggacccaaatcgcgacgtaggccgcgattgccaccgttactcctttactcgaagtgaccagttcatagaccgcggcccagagatgtttgttggaattcggcccccgcaccgtgaacgcgagcgtcgtcagatgggcggccaggctggtgggcatgcaaacggtggtggtgcgagagcaggagctggtggatctggccatggctcatcacgccaacccctcccaccccaatcatatgaggctcctgctcctaggcgtggtcctcgaggtggaggtggccgccgtaacaggcatggtggcggtggcggaggcgggaattctgggtatgggcgatatggtcaagggggtcgtttcggtgatggcctagcccctaggtatgaagatttcaggtacaggccttcggacaatgaccatcggtcagacaggcgatga

SEQ ID NO: 58032 - protein, 635 aa, Magnaporthe grisea 70-15
MTTDWSKNKVVDLRAELTRRGLATNGLKQELVDRLTSDDEAKLKEEPEADAPKPDDQSPPADESTDVAAEQPEAVQETATPQQAEPAQDLPNETTTEAQEIANSDAPAALLADAVGDEKKRKRRSASPPPPHDDTPRKRLRQENSDVMENGGNDADPVTSDLSQPVSATHDDEDVTMQEGAEHQAAPTAKDATRGAPPESSQKMEQEDVVDYGADSPVAQQDTEQVSSNKQESGDGDIDMKDVAKDAALQGTDQFYYDVPRARDGDDSVEPALHPATDSLFIGNFMRPLRADVVEDHLVELAMSPGAAPDRSVLSQLWVDSIRTHALVQFQSVAAASRVRTALHGKVWPDERNRKALWVDFIPSDQVSDWIAKEKAEGSSRRGDVSRWEVVYQKEGDIMVATHQVAIAEPKTTAPPSGPNGASRAVPTGPANQYPGIESAPSGPRNMGGRRGAGDARGNGHERTRTSPSISWQPVSADLARRRLDNLNGFVSKDPNRDVGRDCHRYSFTRSDQFIDRGPEMFVGIRPPHRERERRQMGGQAGGHANGGGARAGAGGSGHGSSRQPLPPQSYEAPAPRRGPRGGGGRRNRHGGGGGGGNSGYGRYGQGGRFGDGLAPRYEDFRYRPSDNDHRSDRR

SEQ ID NO: 58033 - DNA, 933 bp, Magnaporthe grisea 70-15
  CDS (1)..(933)
atggctgagtactcatcaatgaaagttcccgagctcaagaagatgctcggcgaacgcggcctcccgcagtctggcaacaaaccggacctgattgcgcgcctcaaggaggacgacgagaagaaggagcctgccggcgcaaagacgacagacagcaagcccgccgccgagaccgaggacgtcatcaactgggacgacgaggacgacacggccgcagcaaagccacaacccgctgctgcaccagcggctgcggagccggccaagactgccgagcccgccgcgaaaccgtcagagcctgcacccgctgcggacaagtcagcagatgcgcccgcgtcatccacaaaggaggaagcttccgctgccgcacccgcagatgctacccccgccgccagtgcaggagacgaggccaaggcgcccgcagaacccacagagcccgccaagccggccctgagccaaaacctcccatcgacgtcggtcgacgccgaggcagccaagcgggcggcgcgtgcaaagaggttcggcattgaggcgccgacagaggacgaagaggcgcgcaggaaggctgagcgcgcaaagaagtttggtgtcgaggacgctacaaaggcgctcgacgccagccggttggactcggcgctgccggaccgcccgctgaagcgcgggcgcgacaagggcgaacagcagcaggagggtggtgagggtaaggggaacggcgccaagcgccagcaacagcagcagggcggcggcgacgggcgaaggaacaacaacagggacggtggccggcgcgacaggaggaggggacgccccaacggcggcggcggcggtggtggtggtggcgcgaggaacggtggcggcggcggtggtggttccggtattctcaacgacccggagcagaagcgcaaggccgaggcgagggccgcgaggttcgcttcatcatga

SEQ ID NO: 58034 - protein, 310 aa, Magnaporthe grisea 70-15
MAEYSSMKVPELKKMLGERGLPQSGNKPDLIARLKEDDEKKEPAGAKTTDSKPAAETEDVINWDDEDDTAAAKPQPAAAPAAAEPAKTAEPAAKPSEPAPAADKSADAPASSTKEEASAAAPADATPAASAGDEAKAPAEPTEPAKPALSQNLPSTSVDAEAAKRAARAKRFGIEAPTEDEEARRKAERAKKFGVEDATKALDASRLDSALPDRPLKRGRDKGEQQQEGGEGKGNGAKRQQQQQGGGDGRRNNNRDGGRRDRRRGRPNGGGGGGGGGARNGGGGGGGSGILNDPEQKRKAEARAARFASS

SEQ ID NO: 58035 - DNA, 780 bp, Gibberella zeae PH-1
  CDS (1)..(780)
atggctgaatactccacgcttaaggtgcctgagctcaaaaagctgttggcggaaaagagccttcctcagactggaaacaaggccgatcttatcgccagactccaggagaacgacaagcagtccgagacagaggcgaagcctgccgagaacaaagaagacgagatcagctacagtgatgatgaggctcccgccgcacctgctgctgccgccccagttacttcggcacccgttgccgatgcccctgctgccgaggccgctcctgccgaacccacgaatgctgaggagcctgctgcggtagaagcacctgcagagacagcagaggcgcctgctgagcctgaaaagtcttacgccatgggattatcatccactgctgccgatgatgaggccaagaagcgtgctgaacgtgctaagcgatttggcattgaagaggacgaagacgcgatcaagcgcgctgatcgtgcgaagagattcggtctcgatgagaaggagttggctactaccctggactctgctcttcctgagcgctcccgaaagcgaggccgagaccgcaacaccgagactgaagggaaccgaccggaaaagcgacagagcatggacagacgaaatggtcctggcggtcgacaacgtagaggccgtggtggtcgcgacaacggtcgcgatcgcggtgctcgaaaggagggcactcaaaaggagggtgccgcaacccgaagtggtatccttgatgacccaactgagaaagccaaggcggagaaacgcgcagccaggttcgctgggaactga

SEQ ID NO: 58036 - protein, 259 aa, Gibberella zeae PH-1
MAEYSTLKVPELKKLLAEKSLPQTGNKADLIARLQENDKQSETEAKPAENKEDEISYSDDEAPAAPAAAAPVTSAPVADAPAAEAAPAEPTNAEEPAAVEAPAETAEAPAEPEKSYAMGLSSTAADDEAKKRAERAKRFGIEEDEDAIKRADRAKRFGLDEKELATTLDSALPERSRKRGRDRNTETEGNRPEKRQSMDRRNGPGGRQRRGRGGRDNGRDRGARKEGTQKEGAATRSGILDDPTEKAKAEKRAARFAGN

SEQ ID NO: 58037 - DNA, 885 bp, Aspergillus nidulans FGSC A4
  CDS (1)..(885)
atggccaccgactacgccaagaagaccaacgctgagctcgttgagatcctcaagtcacggaacctccctcacactggcaagaaggcggacatggttgcgcgcctcctggaagacgacagctcgaaagccgctgcgcccgctcaaaacgagaacgcggatgatgtgatcgactgggaggatgatgaagttcctgccgcaacctctaccacgacgaccaaagccgccgagactgatgctgcagctgcagctgtggctccggcccctgctgaagagaccgccaccgccgctcccaaggcggaggaaaccgaaacagatggcgcgaaatcggcgacgggagcaaccaaagacagtgcaaagccctcaggtacagtagaaccgacgggcgcggaggaacaggcagcccagcagcctgcggaggagaagccagcacccaacttcgctctcggtctcactgtgacggatttggaggaagagttgaagaagcgcaaggcccgcgcggagaagttcggtatcacggaggagtcgcaggctgcgattgacgaggcggcgaagaagcttgaacgcgctaaacggttcggcacagcgggtgaagcgcctgctgtggagagcgtgagccggcttgaccaggctttgccggagggatcacggaagaggggtcgtggtgagaacgaccagggtggccgaggcggcaagaaacggaatcacaacgggcggaacaaccagcgccagcgtggtcgcggccatagaggccagggacaaggccagagccagaagcacggacaggcccagaaatctgctacgaataacggcgcctcgaatggctggagtgagaaggataaggcggccatggaggctcggaagaaacgcttcggcaccggcgcgtga

SEQ ID NO: 58038 - protein, 294 aa, Aspergillus nidulans FGSC A4
MATDYAKKTNAELVEILKSRNLPHTGKKADMVARLLEDDSSKAAAPAQNENADDVIDWEDDEVPAATSTTTTKAAETDAAAAAVAPAPAEETATAAPKAEETETDGAKSATGATKDSAKPSGTVEPTGAEEQAAQQPAEEKPAPNFALGLTVTDLEEELKKRKARAEKFGITEESQAAIDEAAKKLERAKRFGTAGEAPAVESVSRLDQALPEGSRKRGRGENDQGGRGGKKRNHNGRNNQRQRGRGHRGQGQGQSQKHGQAQKSATNNGASNGWSEKDKAAMEARKKRFGTGA

SEQ ID NO: 58039 - DNA, 693 bp, Candida glabrata CBS138
  CDS (1)..(693)
atgagcaattattctgcgttgactgtggtgcaattgaaggagctgctgactgagcgtaatctgtccgtcgcgggcttgaagaaccagttggttgagcgtttaactaacgatgacaaggccaaggaggctgctggtgaggctgctccagctcctgtgaccgaagaggctgcaccagcaccagctgctgcaccagtggctgctgaagttgaggaggccaagccagaagaggccaagccagaagaagaaacaaaggctgagccggccagcaatgaggctgctccagctgttgcaagcgagcagccagcggaagctagtgaggacaagcctgctgaggttcaagaaaaggcacctgaggtaaaagagccagagaaggagcttttcgatattctaacagcggaagagatcaagcaaagagccaccgaattgatagacaagaaacttcaccgtgcgaagaagttcggtgctgaacaagaccaaattgactcattggagaagctgaaggtgagaatcgatagatttggtgtcgaccgtaatatgtctattgctcttgaacttggcttggtaaagcctaaggaagtgcgtcaacaaaacagaagcaacaagaacaacaatagaaacggtcacaaaggaggtaataacaagaacagaaagggtagagtgaacaagaatagaggttctggtagaaggtggtaa

SEQ ID NO: 58040 - protein, 230 aa, Candida glabrata CBS138
MSNYSALTVVQLKELLTERNLSVAGLKNQLVERLTNDDKAKEAAGEAAPAPVTEEAAPAPAAAPVAAEVEEAKPEEAKPEEETKAEPASNEAAPAVASEQPAEASEDKPAEVQEKAPEVKEPEKELFDILTAEEIKQRATELIDKKLHRAKKFGAEQDQIDSLEKLKVRIDRFGVDRNMSIALELGLVKPKEVRQQNRSNKNNNRNGHKGGNNKNRKGRVNKNRGSGRRW

SEQ ID NO: 58041 - DNA, 732 bp, Kluyveromyces lactis NRRL Y-1140
  CDS (1)..(732)
atgttgacatttgatatatgtatacgtatcttggaaacgacttattggcatgcgcgactaccgagacaattggaaagtaaaacctcctcttttcccgacccgaactattcaaaaacatattctcctttgttcgctatgtcgtattctggtaacaccgttgctcaattgaaggagttgttgaagcaaagaaatctatctacagatggtttgaaagcagacctaataaacagactacaagatgatgactccacaaaaaacagtgcaaccaatgaaccatcgtctatagcggaagtagaagcgaccgcttctgccaccgctgccgctgcccctacgataacttcttccatcccagatgctgtacctgcagatgcatcagctgcggttcctgaaaatgaaaacgtaccatctaccgaagaagacaaactcgaaaaaactcctcctgctaccccagccccaaagaatccagagctatcgcaagatcaattgaaacaagcggccattgaccatttacagaaaaaaatctatcgtgctgaaaaattcggacaagatgattctaccatcgatgacttgcaaaggcagatcaaccgtattgaaaagttcggtttagatttgtctacccaattggctaaggagctaggattcggtaagggtcccgacgcagccgtcggtaagccagacaggaaatccttccagaagaaaaatcgtaataaatcaaacaacaaacgccgttaa

SEQ ID NO: 58042 - protein, 243 aa, Kluyveromyces lactis NRRL Y-1140
MLTFDICIRILETTYWHARLPRQLESKTSSFPDPNYSKTYSPLFAMSYSGNTVAQLKELLKQRNLSTDGLKADLINRLQDDDSTKNSATNEPSSIAEVEATASATAAAAPTITSSIPDAVPADASAAVPENENVPSTEEDKLEKTPPATPAPKNPELSQDQLKQAAIDHLQKKIYRAEKFGQDDSTIDDLQRQINRIEKFGLDLSTQLAKELGFGKGPDAAVGKPDRKSFQKKNRNKSNNKRR

SEQ ID NO: 58043 - DNA, 579 bp, Debaryomyces hansenii CBS767
  CDS (1)..(579)
atgtcagactactcatcccaaacagttgttcaattaaaagaattgctaacttcaagaagtttgccaacagatggtaaaaaggctgatttggttcaacgtttagttgacaacgatgcgcaatctagtggagcacaaccggaagaaacacaacaaactgaaagtactgctacttctgtagaagagccagtagctgaaaaagaatcagaatctaacaatgattcagaagcaactttgaaggtaattcaaccaacagaaaaaagtgaagaagctacgaatgaggaggaagccaagcaaaaacctccagttttgacaccagaagaaagaaaacaattagccgttcaattgataaacaaaaagattcaaagagcagaaaagtttggtgatgaaactgcagcagaggccgctagaaaagatttagctagagttgaaaaattcggagtagaattaggtactgcattggccagagagatcggtcttgttgacaaaagcttaccaaatggccataagaagcatttcaagaaaaactataaggacaagaaaaactttaagcccaacttcaaaaatagacgtagaaactaa

SEQ ID NO: 58044 - protein, 192 aa, Debaryomyces hansenii CBS767
MSDYSSQTVVQLKELLTSRSLPTDGKKADLVQRLVDNDAQSSGAQPEETQQTESTATSVEEPVAEKESESNNDSEATLKVIQPTEKSEEATNEEEAKQKPPVLTPEERKQLAVQLINKKIQRAEKFGDETAAEAARKDLARVEKFGVELGTALAREIGLVDKSLPNGHKKHFKKNYKDKKNFKPNFKNRRRN

SEQ ID NO: 58045 - DNA, 741 bp, Yarrowia lipolytica CLIB99
  CDS (1)..(741)
atgtccgactattccagcaaaaaagtggccgagctcaaggagcttttgtcggcccggggcctggctgtttccggcaacaaggccgatctggtggctcgattagaggaggccgacaaggccatcccggccgacaaggcggcggccaccgctgaggctggtgctgccgccgacgcagccgtcgacgcggccgtggaggagacttcctctgccaccgcgactgctcccgaggtgattgaggttgccaagaccgaggagtccgctcctgctgctgatgctgctgctgctgctgctgctgctgctaccaaggagactccctcgacctccaccgaagccatcaccgtggaagacgacgtggaggagacggttgtggagctttccgatgaggacaagcagaagcaggcaattgaggatctggaaaagcagatcaagcgaaagaagcggtttgcgaccggcgacaacgacgcagatatcgccgagctggaaaaacagctggagcgaatcaagcgattcggagtgactgccgtcgccacgaacgacctgtcgctggacaagggcctggacaccttggccaagggccgacgaaaggagagcggcaaggtgcgacgagagtccgtgtccgccaaggacaagaacacagcccacccctacaataagagcgagaacggtctcaagcccggcgtgaaaattgctactgtggacgaggagaagatcaaggcccgacaggcccgatttttccagtag

SEQ ID NO: 58046 - protein, 246 aa, Yarrowia lipolytica CLIB99
MSDYSSKKVAELKELLSARGLAVSGNKADLVARLEEADKAIPADKAAATAEAGAAADAAVDAAVEETSSATATAPEVIEVAKTEESAPAADAAAAAAAAATKETPSTSTEAITVEDDVEETVVELSDEDKQKQAIEDLEKQIKRKKRFATGDNDADIAELEKQLERIKRFGVTAVATNDLSLDKGLDTLAKGRRKESGKVRRESVSAKDKNTAHPYNKSENGLKPGVKIATVDEEKIKARQARFFQ

SEQ ID NO: 58047 - DNA, 1314 bp, Entamoeba histolytica HM-1:IMSS
  CDS (1)..(1314)
atgtctagattgaatagaggaggtaaaattgcatctcttattgatcgttatgaaaataacgacaaaaaaaagcaagaagatgctagaattgtagctgaagtccgtgcttctcctagaaaagcagctgaagcaaaggctaaagaagaagctgaagcaaaaaagatacaagaagaaaatgaaaaaaaaattttagaagaagccagaatcaaagaagaagctgaagcaaaagccaaagaagaagctgaagcaaaagctaaagaagaagctgaagcaaaagctaaagaagaagctgaagcaaaagctaaagaagaagctgaagcaaaagccaaagaagaagctgaagcaaaagctaaagaagaagctgaagcaaaagccaaagaagaagctgaagcaaaagctaaagaagaagctgaagcaaaagctaaagaagaagctgaagcaaaagctaaagaagaagctgaagcaaaagctaaagaagaagctgaagcaaaagccaaagaagaagctgaagcaaaagctaaagaagaagctgaagcaaaagccaaagaagaagctgaagcaaaagctaaagaagaagctgaagcaaaagctaaagaagaagctgaagcaaaagctaaagaagaagctgaagcaaaagctaaagaagaagctgaaaagaaagctaaagaagaagttaaagaagaaaataaagaagaagttaaagaagaagttaaagaagaagttaaagaagaagttaaagaagaaaataaagaagaaaataaagaagaaaataaagaagaaaataaagaagaaaataaagaagaaaataaagaagaaaataaagaagaaagtgaggttcaagatactacaccatctgaaagagtaatgtcaaaaggagagaagaaagcaagaaaagcacttgaaaaagttggacttgttgaagtaccaaatgttattgaattttcacttaaaagagcaggaagtaaattcgttattaatcagccagctgtttataaacttccatcaagtgaacattatgtagtatacggtgaaccaagaaatgaatatatggacgaaaagactaaacgtattcttgaacaacttcaagctaacatgaaagaacaacaaaatacaactgaagagaaaaaagaagaacaagtcaatgaaagtagtgctccagctaccactgaagctgttgaagatgatggatatgttccagttgaagctgatgtcaatgtgcttatgtctcaagctaacaccacacacgaaaaagcatatgcagctcttaaaaagacaaaaggtgatcttgtgagtgctttctttgaattccaataa

SEQ ID NO: 58048 - protein, 437 aa, Entamoeba histolytica HM-1:IMSS
MSRLNRGGKIASLIDRYENNDKKKQEDARIVAEVRASPRKAAEAKAKEEAEAKKIQEENEKKILEEARIKEEAEAKAKEEAEAKAKEEAEAKAKEEAEAKAKEEAEAKAKEEAEAKAKEEAEAKAKEEAEAKAKEEAEAKAKEEAEAKAKEEAEAKAKEEAEAKAKEEAEAKAKEEAEAKAKEEAEAKAKEEAEAKAKEEAEAKAKEEAEAKAKEEAEKKAKEEVKEENKEEVKEEVKEEVKEEVKEENKEENKEENKEENKEENKEENKEENKEESEVQDTTPSERVMSKGEKKARKALEKVGLVEVPNVIEFSLKRAGSKFVINQPAVYKLPSSEHYVVYGEPRNEYMDEKTKRILEQLQANMKEQQNTTEEKKEEQVNESSAPATTEAVEDDGYVPVEADVNVLMSQANTTHEKAYAALKKTKGDLVSAFFEFQ

SEQ ID NO: 58049 - DNA, 582 bp, Candida albicans SC5314
  CDS (1)..(582): transl_table=12
atgtcagattattcaactcaaacagtagctcaattaaaggagattttaaaaggaaaaggtttatcaattgaaggtaaaaaagcagatttagttcaaagattacatgaacacgacactcaacaacaacaaccaccaccacaacaacaacaaccagaaccagaagtagccgaacaacaaccagagcaaccagaaactaaattagagggaaaaacacaagaaaatgaaagcacactaactgttattcaaccaaaagaacaacaacaacaacaacaacaacaagaagaaccaaaaccaaaacaattatctccagaagaaaggaaacaattagctattgaattattaactaaaaaagttcaacgtgctgaaaaatttggtgatgaacaagctgctaatgatgcaaaaaaagatttggcaagagtagagaaatttggagttgaattgggaacagcattggctagagaaattggattagtggataattccttatcaaacaagaaatttaatcatcataaacgtaataataaacgtggattcaagggtaataaaggtagaaaaggggggtttagaaagaatcgtaattag

SEQ ID NO: 58050 - protein, 193 aa, Candida albicans SC5314
MSDYSTQTVAQLKEILKGKGLSIEGKKADLVQRLHEHDTQQQQPPPQQQQPEPEVAEQQPEQPETKLEGKTQENESTLTVIQPKEQQQQQQQQEEPKPKQLSPEERKQLAIELLTKKVQRAEKFGDEQAANDAKKDLARVEKFGVELGTALAREIGLVDNSLSNKKFNHHKRNNKRGFKGNKGRKGGFRKNRN

SEQ ID NO: 58051 - DNA, 909 bp, Aspergillus fumigatus Af293
  CDS (1)..(909)
atgaccaccgactacagcaagaagacgaacgcggagctagtggagattctcaaatctcgctcgctccctcacacaggcaagaaggcggagatggtcgctcgcctccaggaagacgaccaaaacaaagccaaggccgcaacggcccctgcccctgcccctgctgcaaagactgacgccgcggacgacgtcattgactgggaagatgatgatgtacctgctgctgatactactgccgtgaagccttcaactgaggctggcgccgctgccattgctgctggcggcaaaggtgcggtcgccaaccccgtcgctgttccgaaccagaaagtcgataccgaccccgctactacgaacgatctgaaggtcgaatcaaagggcgcggcaccatcggccgagagtggggcgcaagggcacgaaggcacggaaggtgcgccagttgaggcagcacctgctgcgccggccgaagaaaaaccggcaccggactattctatggggctgcccatcaccgagatggaagaggagttgaagaaacgcaaggctcgcgcggagaagtttggtattaccgaggagtctaaggctgcaattgcggaggcggagaagcaactcgaaagggcgaagcggttcggtactgtggttcatcctactcctgctggtggtgtcaaaggcctggacgaagctctcccgacagagaagtctcgcaagagaggccggggtgataatgaccaagcctcacgagggggcaagcgacgtgatattggcggccgaggcaaattccggggaaaaggccgcggaaatcgaaaccagaatcaacggaatgaaggaaacgctgggaaaacaagcgggcagagtaacctgagtgagaaagatcgaaagaaacaagtaatagtctcaattactggatcggaatattag

SEQ ID NO: 58052 - protein, 302 aa, Aspergillus fumigatus Af293
MTTDYSKKTNAELVEILKSRSLPHTGKKAEMVARLQEDDQNKAKAATAPAPAPAAKTDAADDVIDWEDDDVPAADTTAVKPSTEAGAAAIAAGGKGAVANPVAVPNQKVDTDPATTNDLKVESKGAAPSAESGAQGHEGTEGAPVEAAPAAPAEEKPAPDYSMGLPITEMEEELKKRKARAEKFGITEESKAAIAEAEKQLERAKRFGTVVHPTPAGGVKGLDEALPTEKSRKRGRGDNDQASRGGKRRDIGGRGKFRGKGRGNRNQNQRNEGNAGKTSGQSNLSEKDRKKQVIVSITGSEY

SEQ ID NO: 58053 - DNA, 792 bp, Ustilago maydis 521
  CDS (1)..(792)
atggagaccaaacttcaagcgctgagagtgaccgacctgaaggcgttgctcacctcggctggcttgttggtctcgggtaacaagccggatttgatccagaggttgttggagaacccaagtgctacagcttcacttggtggagcagagcaagagacagaggcagcagcaacagcggcagcagcagaagcggttccgacacccgctgcgacttcggtacaagcactagccccggcagcggtagcggtagaagcgttgccggcagcatccgcgtctgcacccgcgcccgcgcccgtggccgcatttgtcgcacctgtcgcatccgttcctgcacaagtcaacaacggatcaccagtagaagcgcctccacagcccgaggcggaagcgcaccgtcaagcgcttatcgtcgaactggagaaacgcaagcagcgagcggccaagttcggccaacctctcggcgaggcggaacgcaaactggaacgcgccatcaagttcggcctggacgccgaagaccaagccaacgtggccaagctcatgcaaccgctcggatccagaccggcaaaacccgccaagccgaccaagcagagttcagacaagacaacaccagtgcataccgaacaagagaacaaggctcgattcgcgcaattgcaagtggacaaggagaaggcgaaaaagcgcgctgagagattcggcttggtcaacgaggcgcgcgagcttgatgaggaaaagaaacgcaagcgcaacgcgcgcgacgacggcgcgttgacggatgcagacaagaagatcaaggcttga

SEQ ID NO: 58054 - protein, 263 aa, Ustilago maydis 521
METKLQALRVTDLKALLTSAGLLVSGNKPDLIQRLLENPSATASLGGAEQETEAAATAAAAEAVPTPAATSVQALAPAAVAVEALPAASASAPAPAPVAAFVAPVASVPAQVNNGSPVEAPPQPEAEAHRQALIVELEKRKQRAAKFGQPLGEAERKLERAIKFGLDAEDQANVAKLMQPLGSRPAKPAKPTKQSSDKTTPVHTEQENKARFAQLQVDKEKAKKRAERFGLVNEARELDEEKKRKRNARDDGALTDADKKIKA

SEQ ID NO: 58055 - DNA, 1035 bp, Neurospora crassa
  CDS (1)..(1035)
atgtcggactacaacagcatgaaggtccccgagctcaagaagctcctcaacgagcgctctttgccccagaccggcaacaaggccgacctgatcgctcgtcttcaggagcacgacaaacagcaggcgaagcccgccgatgccgcgcccgccaccaccaagaaggacggcgaggctgaggatgaaattgactacgaggatgatgacttccccgccggcgacaagaaggccgccaccgagaccaccgacgagaaagcccctgccagcgccgccgccgccgagactgctacagagtcagagcccaaggccccagtagaatccgaggcacagaagacaacagaagccgcccccgctgccgctgccagcacagaacaacccgccgcttcttccgctcagggagaggaggtcgccgccaaggacactactaccgccaccgctactactgccgaagatcccagcaaagcagaggagcagaagccggccgagcctctcttctcccaacaccttccccccaccgatgccaagtccgaagccgagaagcgcgccgcccgcgccgcccgctttggcatcacgacagacgagaagtccgaggaggcccagaaagctgcgcgcgccgcccgctttggcctggctaacgaccaggtgtcagctcttgacagcgcgttacccgataggccgcgcaagcgtggtcgtggcggcaaagaggagggtgctggcgaggagggtggcagtgagagggcagctaagcagcagaagaccactgctgctgctcctcaagagaacaagggcggcaaccagaggcaaggtggtggtggtggtggtgctggtggtggaaggaacaggcatgggaggaataggaacaacaacaacaacaacaacaacaaccgtggtggtcaaagtcaaaacagcagcaggcaacaagggaatcagcccaagcaacagcagcaacaacagaaaaagcctgctgctgctctcgacccagcggaaaaggccaagatggaggctagagcgaagcgctttgctgctgcgtcctcctaa

SEQ ID NO: 58056 - protein, 344 aa, Neurospora crassa
MSDYNSMKVPELKKLLNERSLPQTGNKADLIARLQEHDKQQAKPADAAPATTKKDGEAEDEIDYEDDDFPAGDKKAATETTDEKAPASAAAAETATESEPKAPVESEAQKTTEAAPAAAASTEQPAASSAQGEEVAAKDTTTATATTAEDPSKAEEQKPAEPLFSQHLPPTDAKSEAEKRAARAARFGITTDEKSEEAQKAARAARFGLANDQVSALDSALPDRPRKRGRGGKEEGAGEEGGSERAAKQQKTTAAAPQENKGGNQRQGGGGGGAGGGRNRHGRNRNNNNNNNNNRGGQSQNSSRQQGNQPKQQQQQQKKPAAALDPAEKAKMEARAKRFAAASS

SEQ ID NO: 58057 - DNA, 738 bp, Schizosaccharomyces pombe
  CDS (1)..(738)
atgtcagattacaagagtcttaaagttgcagaactgcgtgaaaaacttgcggagaaaggcctctccactgctggaaacaaagctgaattggtaagccgattgacagcagcgaccgagagtaacgatgaaaatacttcgaataacaacgctacagatctaggagatcttgctcctcccgaggatgatattgattggggagacatggagaatgatactatttcaactgacgttaacaagccagcagaacccgaaagtaaagagaccagtgctcctgccgctgctgtagagattgaaaaggaaaatgaaagcattatttcgaaagagacttcacaagctcctgaaacttccactggtgctgaagagcatcaagaaaccacagaggaatccaaacaaagtgtatctaatgaagtctctagcccagatgtagctaaagagcaagaaaaactcatccaaagggctaaacgatttggcattcctgtggacgatgaacaaattaagaaagctgctcgtgctgcacgttttggcattcaacaacctttagcgtcaagtaataacaaaaaccataatcaatctaagaaccctcaaaatcgttccaactcacgttctaaacaaagaaataagaatgcgcctcctaaaagtgctccatccaagcggaagagtaatattttggacgaccctatagaggcagaaaaagctaggaagcgtgctgagcgctttggtgttgctgccaagaattaa

SEQ ID NO: 58058 - protein, 245 aa, Schizosaccharomyces pombe
MSDYKSLKVAELREKLAEKGLSTAGNKAELVSRLTAATESNDENTSNNNATDLGDLAPPEDDIDWGDMENDTISTDVNKPAEPESKETSAPAAAVEIEKENESIISKETSQAPETSTGAEEHQETTEESKQSVSNEVSSPDVAKEQEKLIQRAKRFGIPVDDEQIKKAARAARFGIQQPLASSNNKNHNQSKNPQNRSNSRSKQRNKNAPPKSAPSKRKSNILDDPIEAEKARKRAERFGVAAKN

SEQ ID NO: 58059 - DNA, 25 bp, Artificial sequence
  Primer sequence
atggcagattattcttcccttactg

SEQ ID NO: 58060 - DNA, 24 bp, Artificial sequence
  Primer sequence
ttatcttctgtaaccagagcggtt

SEQ ID NO: 58061 - protein, 210 aa, Artificial sequence
  Consensus
  Variant (2)..(5): Xaa in position 2 to 5 is any amino acid
  Variant (7)..(8): Xaa in position 7 to 8 is any amino acid
  Variant (11)..(11): Xaa in position 11 is any amino acid
  Variant (14)..(15): Xaa in position 14 to 15 is any amino acid
  Variant (17)..(17): Xaa in position 17 is any amino acid
  Variant (19)..(21): Xaa in position 19 to 21 is any amino acid
  Variant (23)..(23): Xaa in position 23 is any amino acid
  Variant (25)..(25): Xaa in position 25 is any amino acid
  Variant (29)..(29): Xaa in position 29 is any amino acid
  Variant (32)..(34): Xaa in position 32 to 34 is any amino acid
  Variant (36)..(85): Xaa in position 36 to 85 is any amino acid
  Variant (86)..(146): Xaa in position 86 to 146 is any or no amino acid
  Variant (148)..(158): Xaa in position 148 to 158 is any amino acid
  Variant (159)..(176): Xaa in position 159 to 176 is any or no amino acid
  Variant (178)..(180): Xaa in position 178 to 180 is any amino acid
  Variant (183)..(183): Xaa in position 183 is any amino acid
  Variant (187)..(193): Xaa in position 187 to 193 is any amino acid
  Variant (194)..(199): Xaa in position 194 to 199 is any or no amino acid
  Variant (201)..(203): Xaa in position 201 to 203 is any amino acid
  Variant (205)..(206): Xaa in position 205 to 206 is any amino acid
YXXXXVXXLKXLLXXRXLXXXGXKXDLVXRLXXXDXXXXXXXXXXXXXXXXXXXXXXXXXXXXXXXXXXXXXXXXXXXXXXXXXXXXXXXXXXXXXXXXXXXXXXXXXXXXXXXXXXXXXXXXXXXXXXXXXXXXXXXXXXXXXXXEXXXXXXXXXXXXXXXXXXXXXXXXXXXXXKXXXRAXKFGXXXXXXXXXXXXXKXXXRXXKFGV

SEQ ID NO: 58062 - protein, 31 aa, Artificial sequence
  Consensus
  Variant (2)..(2): Xaa in position 2 is Ala, Pro, Thr or Val
  Variant (3)..(3): Xaa in position 3 is Asp, Glu or Gln
  Variant (5)..(5): Xaa in position 5 is Lys or Arg
  Variant (6)..(7): Xaa in position 6 to 7 is any amino acid
  Variant (9)..(11): Xaa in position 9 to 11 is any amino acid
  Variant (12)..(12): Xaa in position 12 is Glu, Gly, Asn or Ser
  Variant (14)..(15): Xaa in position 14 to 15 is any amino acid
  Variant (16)..(16): Xaa in position 16 is Ala, Asp, Glu, Gly, Asn, Gln, Ser or Thr
  Variant (18)..(18): Xaa in position 18 is any or no amino acid
  Variant (20)..(21): Xaa in position 20 to 21 is any amino acid
  Variant (22)..(22): Xaa in position 22 is any or no amino acid
  Variant (24)..(24): Xaa in position 24 is Ile or Val
  Variant (25)..(25): Xaa in position 25 is Ala, Asp, Glu, Asn, Gln or Ser
  Variant (28)..(30): Xaa in position 28 to 30 is any amino acid
  Variant (31)..(31): Xaa in position 31 is Asp, Pro or Thr
VXXLXXXLXXXXLXXXGXKXXXLXXRLXXXX

SEQ ID NO: 58063 - protein, 17 aa, Artificial sequence
  Consensus
  Variant (2)..(4): Xaa in position 2 to 4 is any amino acid
  Variant (7)..(7): Xaa in position 7 is any amino acid
  Variant (8)..(8): Xaa in position 8 is Lys or Arg
  Variant (11)..(11): Xaa in position 11 is any amino acid
  Variant (12)..(12): Xaa in position 12 is Asp, Glu, Pro or Thr
  Variant (13)..(14): Xaa in position 13 to 14 is any amino acid
  Variant (15)..(15): Xaa in position 15 is Ala, Asp, Glu, Gln, Ser or Thr
  Variant (16)..(16): Xaa in position 16 is any amino acid
  Variant (17)..(17): Xaa in position 17 is Ala, Asp, Glu, Gly, Gln or Ser
KXXXRAXXFGXXXXXXX

SEQ ID NO: 58064 - DNA, 1512 bp, Saccharomyces cerevisiae; identical to SEQ ID NO: 45354
  CDS (1)..(1512)

SEQ ID NO: 58065 - protein, 503 aa, Saccharomyces cerevisiae; identical to SEQ ID NO: 45355

SEQ ID NO: 58066 - DNA, 1479 bp, Homo sapiens; identical to SEQ ID NO: 45356
  CDS (1)..(1479)

SEQ ID NO: 58067 - protein, 492 aa, Homo sapiens; identical to SEQ ID NO: 45357

SEQ ID NO: 58068 - DNA, 1215 bp, Xenopus tropicalis; identical to SEQ ID NO: 45358
  CDS (1)..(1215)

SEQ ID NO: 58069 - protein, 404 aa, Xenopus tropicalis; identical to SEQ ID NO: 45359

SEQ ID NO: 58070 - DNA, 1248 bp, Mus musculus; identical to SEQ ID NO: 45360
  CDS (1)..(1248)

SEQ ID NO: 58071 - protein, 415 aa, Mus musculus; identical to SEQ ID NO: 45361

SEQ ID NO: 58072 - DNA, 1092 bp, Archaeoglobus fulgidus DSM 4304; identical to SEQ ID NO: 45362
  CDS (1)..(1092): transl_table=11

SEQ ID NO: 58073 - protein, 363 aa, Archaeoglobus fulgidus DSM 4304; identical to SEQ ID NO: 45363

SEQ ID NO: 58074 - DNA, 1212 bp, Arabidopsis thaliana; identical to SEQ ID NO: 45364
  CDS (1)..(1212)

SEQ ID NO: 58075 - protein, 403 aa, Arabidopsis thaliana; identical to SEQ ID NO: 45365

SEQ ID NO: 58076 - DNA, 2772 bp, Bacillus halodurans C-125; identical to SEQ ID NO: 45366
  CDS (1)..(2772): transl_table=11

SEQ ID NO: 58077 - protein, 923 aa, Bacillus halodurans C-125; identical to SEQ ID NO: 45367

SEQ ID NO: 58078 - DNA, 1119 bp, Clostridium acetobutylicum ATCC 824; identical to SEQ ID NO: 45368
  CDS (1)..(1119): transl_table=11

SEQ ID NO: 58079 - protein, 372 aa, Clostridium acetobutylicum ATCC 824; identical to SEQ ID NO: 45369

SEQ ID NO: 58080 - DNA, 1203 bp, Caenorhabditis elegans; identical to SEQ ID NO: 45370
  CDS (1)..(1203)

SEQ ID NO: 58081 - protein, 400 aa, Caenorhabditis elegans; identical to SEQ ID NO: 45371

SEQ ID NO: 58082 - DNA, 1314 bp, Caenorhabditis elegans; identical to SEQ ID NO: 45372
  CDS (1)..(1314)

SEQ ID NO: 58083 - protein, 437 aa, Caenorhabditis elegans; identical to SEQ ID NO: 45373

SEQ ID NO: 58084 - DNA, 1215 bp, Thermoanaerobacter tengcongensis MB4; identical to SEQ ID NO: 45374
  CDS (1)..(1215): transl_table=11

SEQ ID NO: 58085 - protein, 404 aa, Thermoanaerobacter tengcongensis MB4; identical to SEQ ID NO: 45375

SEQ ID NO: 58086 - DNA, 1275 bp, Drosophila melanogaster; identical to SEQ ID NO: 45376
  CDS (1)..(1275)

SEQ ID NO: 58087 - protein, 424 aa, Drosophila melanogaster; identical to SEQ ID NO: 45377

SEQ ID NO: 58088 - DNA, 1428 bp, Drosophila melanogaster; identical to SEQ ID NO: 45378
  CDS (1)..(1428)

SEQ ID NO: 58089 - protein, 475 aa, Drosophila melanogaster; identical to SEQ ID NO: 45379

SEQ ID NO: 58090 - DNA, 1353 bp, Mus musculus; identical to SEQ ID NO: 45380
  CDS (1)..(1353)

SEQ ID NO: 58091 - protein, 450 aa, Mus musculus; identical to SEQ ID NO: 45381

SEQ ID NO: 58092 - DNA, 972 bp, Homo sapiens; identical to SEQ ID NO: 45382
  CDS (1)..(972)

SEQ ID NO: 58093 - protein, 323 aa, Homo sapiens; identical to SEQ ID NO: 45383

SEQ ID NO: 58094 - DNA, 1464 bp, Xenopus tropicalis; identical to SEQ ID NO: 45384
  CDS (1)..(1464)

SEQ ID NO: 58095 - protein, 487 aa, Xenopus tropicalis; identical to SEQ ID NO: 45385

SEQ ID NO: 58096 - DNA, 1248 bp, Rattus norvegicus; identical to SEQ ID NO: 45386
  CDS (1)..(1248)

SEQ ID NO: 58097 - protein, 415 aa, Rattus norvegicus; identical to SEQ ID NO: 45387

SEQ ID NO: 58098 - DNA, 1242 bp, Anopheles gambiae str. PEST; identical to SEQ ID NO: 45388
  CDS (1)..(1242)

SEQ ID NO: 58099 - protein, 413 aa, Anopheles gambiae str. PEST; identical to SEQ ID NO: 45389

SEQ ID NO: 58100 - DNA, 1479 bp, Rattus norvegicus; identical to SEQ ID NO: 45390
  CDS (1)..(1479)

SEQ ID NO: 58101 - protein, 492 aa, Rattus norvegicus; identical to SEQ ID NO: 45391

SEQ ID NO: 58102 - DNA, 1950 bp, Magnaporthe grisea 70-15; identical to SEQ ID NO: 45392
  CDS (1)..(1950)

SEQ ID NO: 58103 - protein, 649 aa, Magnaporthe grisea 70-15; identical to SEQ ID NO: 45393

SEQ ID NO: 58104 - DNA, 1422 bp, Gibberella zeae PH-1; identical to SEQ ID NO: 45394
  CDS (1)..(1422)

SEQ ID NO: 58105 - protein, 473 aa, Gibberella zeae PH-1; identical to SEQ ID NO: 45395

SEQ ID NO: 58106 - DNA, 1437 bp, Aspergillus nidulans FGSC A4; identical to SEQ ID NO: 45396
  CDS (1)..(1437)

SEQ ID NO: 58107 - protein, 478 aa, Aspergillus nidulans FGSC A4; identical to SEQ ID NO: 45397

SEQ ID NO: 58108 - DNA, 1557 bp, Gallus gallus; identical to SEQ ID NO: 45398
  CDS (1)..(1557)

SEQ ID NO: 58109 - protein, 518 aa, Gallus gallus; identical to SEQ ID NO: 45399

SEQ ID NO: 58110 - DNA, 972 bp, Gallus gallus; identical to SEQ ID NO: 45400
  CDS (1)..(972)

SEQ ID NO: 58111 - protein, 323 aa, Gallus gallus; identical to SEQ ID NO: 45401

SEQ ID NO: 58112 - DNA, 1257 bp, Oryza sativa (japonica cultivar-group); identical to SEQ ID NO: 45402
  CDS (1)..(1257)

SEQ ID NO: 58113 - protein, 418 aa, Oryza sativa (japonica cultivar-group); identical to SEQ ID NO: 45403

SEQ ID NO: 58114 - DNA, 1311 bp, Pan troglodytes; identical to SEQ ID NO: 45404
  CDS (1)..(1311)

SEQ ID NO: 58115 - protein, 436 aa, Pan troglodytes; identical to SEQ ID NO: 45405

SEQ ID NO: 58116 - DNA, 1251 bp, Canis familiaris; identical to SEQ ID NO: 45406
  CDS (1)..(1251)

SEQ ID NO: 58117 - protein, 416 aa, Canis familiaris; identical to SEQ ID NO: 45407

SEQ ID NO: 58118 - DNA, 1506 bp, Cryptococcus neoformans var. neoformans JEC21; identical to SEQ ID NO: 45408
  CDS (1)..(1506)

SEQ ID NO: 58119 - protein, 501 aa, Cryptococcus neoformans var. neoformans JEC21; identical to SEQ ID NO: 45409

SEQ ID NO: 58120 - DNA, 1251 bp, Bos taurus; identical to SEQ ID NO: 45410
  CDS (1)..(1251)

SEQ ID NO: 58121 - protein, 416 aa, Bos taurus; identical to SEQ ID NO: 45411

SEQ ID NO: 58122 - DNA, 1500 bp, Bos taurus; identical to SEQ ID NO: 45412
  CDS (1)..(1500)

SEQ ID NO: 58123 - protein, 499 aa, Bos taurus; identical to SEQ ID NO: 45413

SEQ ID NO: 58124 - DNA, 1224 bp, Apis mellifera; identical to SEQ ID NO: 45414
  CDS (1)..(1224)

SEQ ID NO: 58125 - protein, 407 aa, Apis mellifera; identical to SEQ ID NO: 45415

SEQ ID NO: 58126 - DNA, 1428 bp, Cryptosporidium parvum; identical to SEQ ID NO: 45416
  CDS (1)..(1428)

SEQ ID NO: 58127 - protein, 475 aa, Cryptosporidium parvum; identical to SEQ ID NO: 45417

SEQ ID NO: 58128 - DNA, 1518 bp, Dictyostelium discoideum; identical to SEQ ID NO: 45418
  CDS (1)..(1518)

SEQ ID NO: 58129 - protein, 505 aa, Dictyostelium discoideum; identical to SEQ ID NO: 45419

SEQ ID NO: 58130 - DNA, 1263 bp, Dictyostelium discoideum; identical to SEQ ID NO: 45420
  CDS (1)..(1263)

SEQ ID NO: 58131 - protein, 420 aa, Dictyostelium discoideum; identical to SEQ ID NO: 45421

SEQ ID NO: 58132 - DNA, 1143 bp, Entamoeba histolytica HM-1:IMSS; identical to SEQ ID NO: 45422
  CDS (1)..(1143)

SEQ ID NO: 58133 - protein, 380 aa, Entamoeba histolytica HM-1:IMSS; identical to SEQ ID NO: 45423

SEQ ID NO: 58134 - DNA, 1338 bp, Entamoeba histolytica HM-1:IMSS; identical to SEQ ID NO: 45424
  CDS (1)..(1338)

SEQ ID NO: 58135 - protein, 445 aa, Entamoeba histolytica HM-1:IMSS; identical to SEQ ID NO: 45425

SEQ ID NO: 58136 - DNA, 1392 bp, Cryptosporidium hominis; identical to SEQ ID NO: 45426
  CDS (1)..(1392)

SEQ ID NO: 58137 - protein, 463 aa, Cryptosporidium hominis; identical to SEQ ID NO: 45427

SEQ ID NO: 58138 - DNA, 1344 bp, Cryptosporidium hominis; identical to SEQ ID NO: 45428
  CDS (1)..(1344)

SEQ ID NO: 58139 - protein, 447 aa, Cryptosporidium hominis; identical to SEQ ID NO: 45429

SEQ ID NO: 58140 - DNA, 1572 bp, Danio rerio; identical to SEQ ID NO: 45430
  CDS (1)..(1572)

SEQ ID NO: 58141 - protein, 523 aa, Danio rerio; identical to SEQ ID NO: 45431

SEQ ID NO: 58142 - DNA, 1413 bp, Aspergillus fumigatus Af293; identical to SEQ ID NO: 45432
  CDS (1)..(1413)

SEQ ID NO: 58143 - protein, 470 aa, Aspergillus fumigatus Af293; identical to SEQ ID NO: 45433

SEQ ID NO: 58144 - DNA, 1818 bp, Ustilago maydis 521; identical to SEQ ID NO: 45434
  CDS (1)..(1818)

SEQ ID NO: 58145 - protein, 605 aa, Ustilago maydis 521; identical to SEQ ID NO: 45435

SEQ ID NO: 58146 - DNA, 1431 bp, Strongylocentrotus purpuratus; identical to SEQ ID NO: 45436
  CDS (1)..(1431)

SEQ ID NO: 58147 - protein, 476 aa, Strongylocentrotus purpuratus; identical to SEQ ID NO: 45437

SEQ ID NO: 58148 - DNA, 1236 bp, Strongylocentrotus purpuratus; identical to SEQ ID NO: 45438
  CDS (1)..(1236)

SEQ ID NO: 58149 - protein, 411 aa, Strongylocentrotus purpuratus; identical to SEQ ID NO: 45439

SEQ ID NO: 58150 - DNA, 1518 bp, Trypanosoma cruzi; identical to SEQ ID NO: 45440
  CDS (1)..(1518)

SEQ ID NO: 58151 - protein, 505 aa, Trypanosoma cruzi; identical to SEQ ID NO: 45441

SEQ ID NO: 58152 - DNA, 1530 bp, Trypanosoma brucei; identical to SEQ ID NO: 45442
  CDS (1)..(1530)

SEQ ID NO: 58153 - protein, 509 aa, Trypanosoma brucei; identical to SEQ ID NO: 45443

SEQ ID NO: 58154 - DNA, 1086 bp, Synechococcus elongatus PCC 6301; identical to SEQ ID NO: 45444
  CDS (1)..(1086): transl_table=11

SEQ ID NO: 58155 - protein, 361 aa, Synechococcus elongatus PCC 6301; identical to SEQ ID NO: 45445

SEQ ID NO: 58156 - DNA, 1056 bp, Methanosarcina barkeri str. fusaro; identical to SEQ ID NO: 45446
  CDS (1)..(1056): transl_table=11

SEQ ID NO: 58157 - protein, 351 aa, Methanosarcina barkeri str. fusaro; identical to SEQ ID NO: 45447

SEQ ID NO: 58158 - DNA, 1524 bp, Nostoc punctiforme PCC 73102; identical to SEQ ID NO: 45448
  CDS (1)..(1524)

SEQ ID NO: 58159 - protein, 507 aa, Nostoc punctiforme PCC 73102; identical to SEQ ID NO: 45449

SEQ ID NO: 58160 - DNA, 1125 bp, Cytophaga hutchinsonii; identical to SEQ ID NO: 45450
  CDS (1)..(1125)

SEQ ID NO: 58161 - protein, 374 aa, Cytophaga hutchinsonii; identical to SEQ ID NO: 45451

SEQ ID NO: 58162 - DNA, 1995 bp, Mus musculus; identical to SEQ ID NO: 45452
  CDS (7)..(1485)

SEQ ID NO: 58163 - protein, 492 aa, Mus musculus; identical to SEQ ID NO: 45453

SEQ ID NO: 58164 - DNA, 1446 bp, Xenopus laevis; identical to SEQ ID NO: 45454
  CDS (1)..(1446)

SEQ ID NO: 58165 - protein, 481 aa, Xenopus laevis; identical to SEQ ID NO: 45455

SEQ ID NO: 58166 - DNA, 2310 bp, Tetraodon nigroviridis; identical to SEQ ID NO: 45456
  CDS (1)..(2310)

SEQ ID NO: 58167 - protein, 769 aa, Tetraodon nigroviridis; identical to SEQ ID NO: 45457

SEQ ID NO: 58168 - DNA, 1350 bp, Schistosoma japonicum; identical to SEQ ID NO: 45458
  CDS (61)..(1248)

SEQ ID NO: 58169 - protein, 395 aa, Schistosoma japonicum; identical to SEQ ID NO: 45459

SEQ ID NO: 58170 - DNA, 1479 bp, Homo sapiens; identical to SEQ ID NO: 45460
  CDS (1)..(1479)

SEQ ID NO: 58171 - protein, 492 aa, Homo sapiens; identical to SEQ ID NO: 45461

SEQ ID NO: 58172 - DNA, 1728 bp, Caenorhabditis briggsae; identical to SEQ ID NO: 45462
  CDS (1)..(1728)

SEQ ID NO: 58173 - protein, 575 aa, Caenorhabditis briggsae; identical to SEQ ID NO: 45463

SEQ ID NO: 58174 - DNA, 1215 bp, Xenopus laevis; identical to SEQ ID NO: 45464
  CDS (1)..(1215)

SEQ ID NO: 58175 - protein, 404 aa, Xenopus laevis; identical to SEQ ID NO: 45465

SEQ ID NO: 58176 - DNA, 987 bp, Homo sapiens; identical to SEQ ID NO: 45466
  CDS (1)..(987)

SEQ ID NO: 58177 - protein, 328 aa, Homo sapiens; identical to SEQ ID NO: 45467

SEQ ID NO: 58178 - DNA, 1272 bp, Brachydanio rerio; identical to SEQ ID NO: 45468
  CDS (1)..(1272)

SEQ ID NO: 58179 - protein, 423 aa, Brachydanio rerio; identical to SEQ ID NO: 45469

SEQ ID NO: 58180 - DNA, 1527 bp, Brachydanio rerio; identical to SEQ ID NO: 45470
  CDS (1)..(1527)

SEQ ID NO: 58181 - protein, 508 aa, Brachydanio rerio; identical to SEQ ID NO: 45471

SEQ ID NO: 58182 - DNA, 1275 bp, Drosophila melanogaster; identical to SEQ ID NO: 45472
  CDS (1)..(1275)

SEQ ID NO: 58183 - protein, 424 aa, Drosophila melanogaster; identical to SEQ ID NO: 45473

SEQ ID NO: 58184 - DNA, 1095 bp, Homo sapiens; identical to SEQ ID NO: 45474
  CDS (1)..(1095)

SEQ ID NO: 58185 - protein, 364 aa, Homo sapiens; identical to SEQ ID NO: 45475

SEQ ID NO: 58186 - DNA, 1092 bp, Actinobacillus actinomycetemcomitans; identical to SEQ ID NO: 45476
  CDS (1)..(1092): transl_table=11

SEQ ID NO: 58187 - protein, 363 aa, Actinobacillus actinomycetemcomitans; identical to SEQ ID NO: 45477

SEQ ID NO: 58188 - DNA, 1218 bp, Arabidopsis thaliana; identical to SEQ ID NO: 45478
  CDS (1)..(1218)

SEQ ID NO: 58189 - protein, 405 aa, Arabidopsis thaliana; identical to SEQ ID NO: 45479

SEQ ID NO: 58190 - DNA, 1416 bp, Schizosaccharomyces pombe; identical to SEQ ID NO: 45480
  CDS (1)..(1416)

SEQ ID NO: 58191 - protein, 471 aa, Schizosaccharomyces pombe; identical to SEQ ID NO: 45481

SEQ ID NO: 58192 - DNA, 1647 bp, Saccharomyces cerevisiae; identical to SEQ ID NO: 45482
  CDS (1)..(1647)

SEQ ID NO: 58193 - protein, 548 aa, Saccharomyces cerevisiae; identical to SEQ ID NO: 45483

SEQ ID NO: 58194 - DNA, 1545 bp, Ashbya gossypii; identical to SEQ ID NO: 45484
  CDS (1)..(1545)

SEQ ID NO: 58195 - protein, 514 aa, Ashbya gossypii; identical to SEQ ID NO: 45485

SEQ ID NO: 58196 - DNA, 1377 bp, Candida glabrata; identical to SEQ ID NO: 45486
  CDS (1)..(1377)

SEQ ID NO: 58197 - protein, 458 aa, Candida glabrata; identical to SEQ ID NO: 45487

SEQ ID NO: 58198 - DNA, 1431 bp, Debaryomyces hansenii; identical to SEQ ID NO: 45488
  CDS (1)..(1431)

SEQ ID NO: 58199 - protein, 476 aa, Debaryomyces hansenii; identical to SEQ ID NO: 45489

SEQ ID NO: 58200 - DNA, 1251 bp, Homo sapiens; identical to SEQ ID NO: 45490
  CDS (1)..(1251)

SEQ ID NO: 58201 - protein, 416 aa, Homo sapiens; identical to SEQ ID NO: 45491

SEQ ID NO: 58202 - DNA, 1512 bp, Kluyveromyces lactis; identical to SEQ ID NO: 45492
  CDS (1)..(1512)

SEQ ID NO: 58203 - protein, 503 aa, Kluyveromyces lactis; identical to SEQ ID NO: 45493

SEQ ID NO: 58204 - DNA, 1248 bp, Mus musculus; identical to SEQ ID NO: 45494
  CDS (1)..(1248)

SEQ ID NO: 58205 - protein, 415 aa, Mus musculus; identical to SEQ ID NO: 45495

SEQ ID NO: 58206 - DNA, 1416 bp, Neurospora crassa; identical to SEQ ID NO: 45496
  CDS (1)..(1416)

SEQ ID NO: 58207 - protein, 471 aa, Neurospora crassa; identical to SEQ ID NO: 45497

SEQ ID NO: 58208 - DNA, 1368 bp, Rhizomucor pusillus; identical to SEQ ID NO: 45498
  CDS (1)..(1368)

SEQ ID NO: 58209 - protein, 455 aa, Rhizomucor pusillus; identical to SEQ ID NO: 45499

SEQ ID NO: 58210 - DNA, 1536 bp, Schizosaccharomyces pombe; identical to SEQ ID NO: 45500
  CDS (1)..(1536)

SEQ ID NO: 58211 - protein, 511 aa, Schizosaccharomyces pombe; identical to SEQ ID NO: 45501

SEQ ID NO: 58212 - DNA, 1383 bp, Yarrowia lipolytica; identical to SEQ ID NO: 45502
  CDS (1)..(1383)

SEQ ID NO: 58213 - protein, 460 aa, Yarrowia lipolytica; identical to SEQ ID NO: 45503

SEQ ID NO: 58214 - DNA, 27 bp, Artificial sequence
  Primer sequence
atgattgaaaaggataaaagaacgatt

SEQ ID NO: 58215 - DNA, 26 bp, Artificial sequence
  Primer sequence
ttatatttcttcataagggtaggaga

SEQ ID NO: 58216 - protein, 581 aa, Artificial sequence; identical to SEQ ID NO: 45506
  Consensus
  Variant (2)..(7): Xaa in position 2 to 7 is any amino acid
  Variant (8)..(8): Xaa in position 8 is any or no amino acid
  Variant (10)..(15): Xaa in position 10 to 15 is any amino acid
  Variant (17)..(22): Xaa in position 17 to 22 is any amino acid
  Variant (23)..(28): Xaa in position 23 to 28 is any or no amino acid
  Variant (30)..(46): Xaa in position 30 to 46 is any amino acid
  Variant (47)..(49): Xaa in position 47 to 49 is any or no amino acid
  Variant (51)..(51): Xaa in position 51 is any amino acid
  Variant (53)..(55): Xaa in position 53 to 55 is any amino acid
  Variant (57)..(63): Xaa in position 57 to 63 is any amino acid
  Variant (64)..(72): Xaa in position 64 to 72 is any or no amino acid
  Variant (74)..(76): Xaa in position 74 to 76 is any or no amino acid
  Variant (78)..(79): Xaa in position 78 to 79 is any amino acid
  Variant (80)..(81): Xaa in position 80 to 81 is any or no amino acid
  Variant (83)..(85): Xaa in position 83 to 85 is any amino acid
  Variant (87)..(93): Xaa in position 87 to 93 is any amino acid
  Variant (94)..(186): Xaa in position 94 to 186 is any or no amino acid
  Variant (188)..(189): Xaa in position 188 to 189 is any amino acid
  Variant (190)..(210): Xaa in position 190 to 210 is any or no amino acid
  Variant (212)..(213): Xaa in position 212 to 213 is any or no amino acid
  Variant (215)..(220): Xaa in position 215 to 220 is any amino acid
  Variant (222)..(227): Xaa in position 222 to 227 is any amino acid
  Variant (228)..(228): Xaa in position 228 is any or no amino acid
  Variant (231)..(231): Xaa in position 231 is any or no amino acid
  Variant (233)..(234): Xaa in position 233 to 234 is any or no amino acid
  Variant (237)..(237): Xaa in position 237 is any or no amino acid
  Variant (240)..(241): Xaa in position 240 to 241 is any amino acid
  Variant (242)..(246): Xaa in position 242 to 246 is any or no amino acid
  Variant (248)..(252): Xaa in position 248 to 252 is any amino acid
  Variant (253)..(265): Xaa in position 253 to 265 is any or no amino acid
  Variant (270)..(285): Xaa in position 270 to 285 is any amino acid
  Variant (286)..(315): Xaa in position 286 to 315 is any or no amino acid
  Variant (319)..(320): Xaa in position 319 to 320 is any amino acid
  Variant (322)..(324): Xaa in position 322 to 324 is any amino acid
  Variant (326)..(328): Xaa in position 326 to 328 is any amino acid
  Variant (330)..(330): Xaa in position 330 is any amino acid
  Variant (332)..(332): Xaa in position 332 is any amino acid
  Variant (334)..(336): Xaa in position 334 to 336 is any amino acid
  Variant (338)..(339): Xaa in position 338 to 339 is any amino acid
  Variant (340)..(364): Xaa in position 340 to 364 is any or no amino acid
  Variant (368)..(368): Xaa in position 368 is any or no amino acid
  Variant (371)..(374): Xaa in position 371 to 374 is any amino acid
  Variant (375)..(376): Xaa in position 375 to 376 is any or no amino acid
  Variant (378)..(378): Xaa in position 378 is any amino acid
  Variant (379)..(384): Xaa in position 379 to 384 is any or no amino acid
  Variant (386)..(393): Xaa in position 386 to 393 is any or no amino acid
  Variant (395)..(424): Xaa in position 395 to 424 is any or no amino acid
  Variant (426)..(426): Xaa in position 426 is any amino acid
  Variant (428)..(439): Xaa in position 428 to 439 is any amino acid
  Variant (441)..(445): Xaa in position 441 to 445 is any amino acid
  Variant (446)..(450): Xaa in position 446 to 450 is any or no amino acid
  Variant (454)..(456): Xaa in position 454 to 456 is any amino acid
  Variant (462)..(463): Xaa in position 462 to 463 is any amino acid
  Variant (466)..(466): Xaa in position 466 is any amino acid
  Variant (468)..(472): Xaa in position 468 to 472 is any amino acid
  Variant (476)..(478): Xaa in position 476 to 478 is any amino acid
  Variant (482)..(484): Xaa in position 482 to 484 is any amino acid
  Variant (486)..(487): Xaa in position 486 to 487 is any amino acid
  Variant (488)..(518): Xaa in position 488 to 518 is any or no amino acid
  Variant (521)..(521): Xaa in position 521 is any amino acid
  Variant (523)..(528): Xaa in position 523 to 528 is any amino acid
  Variant (529)..(530): Xaa in position 529 to 530 is any or no amino acid
  Variant (533)..(534): Xaa in position 533 to 534 is any amino acid
  Variant (536)..(554): Xaa in position 536 to 554 is any amino acid
  Variant (555)..(579): Xaa in position 555 to 579 is any or no amino acid

SEQ ID NO: 58217 - protein, 26 aa, Artificial sequence
  Consensus
  Variant (2)..(3): Xaa in position 2 to 3 is any amino acid
  Variant (4)..(4): Xaa in position 4 is Leu, Pro or Val
  Variant (5)..(5): Xaa in position 5 is Phe, Ile, Leu, Met or Val
  Variant (6)..(18): Xaa in position 6 to 18 is any amino acid
  Variant (19)..(19): Xaa in position 19 is Ile, Leu or Val
  Variant (20)..(20): Xaa in position 20 is any amino acid
  Variant (21)..(21): Xaa in position 21 is Ala, Ser, Thr or Val
  Variant (24)..(24): Xaa in position 24 is any amino acid
  Variant (25)..(25): Xaa in position 25 is Phe, Trp or Tyr
  Variant (26)..(26): Xaa in position 26 is Ser or Thr
YXXXXXXXXXXXXXXXXXXXXNSXXX

SEQ ID NO: 58218 - protein, 15 aa, Artificial sequence
  Consensus
  Variant (2)..(3): Xaa in position 2 to 3 is any amino acid
  Variant (4)..(5): Xaa in position 4 to 5 is any or no amino acid
  Variant (7)..(7): Xaa in position 7 is any amino acid
  Variant (9)..(10): Xaa in position 9 to 10 is any or no amino acid
  Variant (12)..(12): Xaa in position 12 is Asp or Asn
  Variant (13)..(14): Xaa in position 13 to 14 is any amino acid
  Variant (15)..(15): Xaa in position 15 is Leu or Val
SXXXXRXEXXKXXXX

SEQ ID NO: 58219 - protein, 31 aa, Artificial sequence; identical to SEQ ID NO: 45509
  Consensus
  Variant (2)..(2): Xaa in position 2 is any amino acid
  Variant (3)..(4): Xaa in position 3 to 4 is any or no amino acid
  Variant (6)..(7): Xaa in position 6 to 7 is any or no amino acid
  Variant (12)..(12): Xaa in position 12 is Cys, Gly, Thr or Val
  Variant (13)..(13): Xaa in position 13 is Ile, Pro or Val
  Variant (14)..(14): Xaa in position 14 is any amino acid
  Variant (16)..(21): Xaa in position 16 to 21 is any amino acid
  Variant (22)..(22): Xaa in position 22 is Ala, Ile, Leu, Pro or Val
  Variant (23)..(23): Xaa in position 23 is any amino acid
  Variant (24)..(24): Xaa in position 24 is Phe, Ile, Leu or Val
  Variant (25)..(25): Xaa in position 25 is Ala, Ser or Val
  Variant (26)..(28): Xaa in position 26 to 28 is any amino acid

SEQ ID NO: 58220 - DNA, 1440 bp, Saccharomyces cerevisiae; identical to SEQ ID NO: 1
  CDS (1)..(1440)

SEQ ID NO: 58221 - protein, 479 aa, Saccharomyces cerevisiae; identical to SEQ ID NO: 2

SEQ ID NO: 58222 - DNA, 1260 bp, Nostoc sp. PCC 7120; identical to SEQ ID NO: 3
  CDS (1)..(1260)

SEQ ID NO: 58223 - protein, 419 aa, Nostoc sp. PCC 7120; identical to SEQ ID NO: 4

SEQ ID NO: 58224 - DNA, 1359 bp, Brucella melitensis; identical to SEQ ID NO: 5
  CDS (1)..(1359)

SEQ ID NO: 58225 - protein, 452 aa, Brucella melitensis; identical to SEQ ID NO: 6

SEQ ID NO: 58226 - DNA, 1179 bp, Yersinia pestis; identical to SEQ ID NO: 7
  CDS (1)..(1179)

SEQ ID NO: 58227 - protein, 392 aa, Yersinia pestis; identical to SEQ ID NO: 8

SEQ ID NO: 58228 - DNA, 1203 bp, Salmonella enterica subsp. enterica serovar Typhi; identical to SEQ ID NO: 9
  CDS (1)..(1203)

SEQ ID NO: 58229 - protein, 400 aa, Salmonella enterica subsp. enterica serovar Typhi; identical to SEQ ID NO: 10

SEQ ID NO: 58230 - DNA, 1179 bp, Salmonella enterica subsp. enterica serovar Typhi; identical to SEQ ID NO: 11
  CDS (1)..(1179)

SEQ ID NO: 58231 - protein, 392 aa, Salmonella enterica subsp. enterica serovar Typhi; identical to SEQ ID NO: 12

SEQ ID NO: 58232 - DNA, 1203 bp, Escherichia coli; identical to SEQ ID NO: 13
  CDS (1)..(1203)

SEQ ID NO: 58233 - protein, 400 aa, Escherichia coli [sequence omitted]

SEQ ID NO: 58234 - DNA, 1230 bp, Caulobacter crescentus; identical to SEQ ID NO: 15
  CDS (1)..(1230)

SEQ ID NO: 58235 - protein, 409 aa, Caulobacter crescentus; identical to SEQ ID NO: 16

SEQ ID NO: 58236 - DNA, 1179 bp, Escherichia coli; identical to SEQ ID NO: 17
  CDS (1)..(1179)

SEQ ID NO: 58237 - protein, 392 aa, Escherichia coli [sequence omitted]

SEQ ID NO: 58238 - DNA, 1230 bp, Vibrio cholerae; identical to SEQ ID NO: 19
  CDS (1)..(1230)

SEQ ID NO: 58239 - protein, 409 aa, Vibrio cholerae; identical to SEQ ID NO: 20

SEQ ID NO: 58240 - DNA, 1209 bp, Vibrio cholerae; identical to SEQ ID NO: 21
  CDS (1)..(1209)

SEQ ID NO: 58241 - protein, 402 aa, Vibrio cholerae; identical to SEQ ID NO: 22

SEQ ID NO: 58242 - DNA, 1218 bp, Pseudomonas aeruginosa; identical to SEQ ID NO: 23
  CDS (1)..(1218)

SEQ ID NO: 58243 - protein, 405 aa, Pseudomonas aeruginosa; identical to SEQ ID NO: 24

SEQ ID NO: 58244 - DNA, 1185 bp, Neisseria meningitidis; identical to SEQ ID NO: 25
  CDS (1)..(1185)

SEQ ID NO: 58245 - protein, 394 aa, Neisseria meningitidis; identical to SEQ ID NO: 26

SEQ ID NO: 58246 - DNA, 909 bp, Rickettsia prowazekii; identical to SEQ ID NO: 27
  CDS (1)..(909)

SEQ ID NO: 58247 - protein, 302 aa, Rickettsia prowazekii; identical to SEQ ID NO: 28

SEQ ID NO: 58248 - DNA, 1197 bp, Xylella fastidiosa; identical to SEQ ID NO: 29
  CDS (1)..(1197)

SEQ ID NO: 58249 - protein, 398 aa, Xylella fastidiosa; identical to SEQ ID NO: 30

SEQ ID NO: 58250 - DNA, 1245 bp, Synechocystis sp; identical to SEQ ID NO: 31
  CDS (1)..(1245)

SEQ ID NO: 58251 - protein, 414 aa, Synechocystis sp; identical to SEQ ID NO: 32

SEQ ID NO: 58252 - DNA, 1401 bp, Schizosaccharomyces pombe; identical to SEQ ID NO: 33
  CDS (1)..(1401)

SEQ ID NO: 58253 - protein, 466 aa, Schizosaccharomyces pombe; identical to SEQ ID NO: 34

SEQ ID NO: 58254 - DNA, 1479 bp, Debaryomyces hansenii; identical to SEQ ID NO: 35
  CDS (1)..(1479)

SEQ ID NO: 58255 - protein, 492 aa, Debaryomyces hansenii; identical to SEQ ID NO: 36

SEQ ID NO: 58256 - DNA, 1419 bp, Kluyveromyces lactis; identical to SEQ ID NO: 37
  CDS (1)..(1419)

SEQ ID NO: 58257 - protein, 472 aa, Kluyveromyces lactis; identical to SEQ ID NO: 38

SEQ ID NO: 58258 - DNA, 1179 bp, Erwinia carotovora subsp; identical to SEQ ID NO: 39
  CDS (1)..(1179)

SEQ ID NO: 58259 - protein, 392 aa, Erwinia carotovora subsp; identical to SEQ ID NO: 40

SEQ ID NO: 58260 - DNA, 1212 bp, Erwinia carotovora subsp; identical to SEQ ID NO: 41
  CDS (1)..(1212)

SEQ ID NO: 58261 - protein, 403 aa, Erwinia carotovora subsp; identical to SEQ ID NO: 42

SEQ ID NO: 58262 - DNA, 1233 bp, Acinetobacter sp; identical to SEQ ID NO: 43
  CDS (1)..(1233)

SEQ ID NO: 58263 - protein, 410 aa, Acinetobacter sp; identical to SEQ ID NO: 44

SEQ ID NO: 58264 - DNA, 1209 bp, Acinetobacter sp; identical to SEQ ID NO: 45
  CDS (1)..(1209)

SEQ ID NO: 58265 - protein, 402 aa, Acinetobacter sp; identical to SEQ ID NO: 46

SEQ ID NO: 58266 - DNA, 1434 bp, Candida glabrata; identical to SEQ ID NO: 47
  CDS (1)..(1434)

SEQ ID NO: 58267 - protein, 477 aa, Candida glabrata; identical to SEQ ID NO: 48

SEQ ID NO: 58268 - DNA, 1281 bp, Bartonella quintana; identical to SEQ ID NO: 49
  CDS (1)..(1281)

SEQ ID NO: 58269 - protein, 426 aa, Bartonella quintana; identical to SEQ ID NO: 50

SEQ ID NO: 58270 - DNA, 1281 bp, Bartonella henselae; identical to SEQ ID NO: 51
  CDS (1)..(1281)

SEQ ID NO: 58271 - protein, 426 aa, Bartonella henselae; identical to SEQ ID NO: 52

SEQ ID NO: 58272 - DNA, 1398 bp, Yarrowia lipolytica; identical to SEQ ID NO: 53
  CDS (1)..(1398)

SEQ ID NO: 58273 - protein, 465 aa, Yarrowia lipolytica; identical to SEQ ID NO: 54

SEQ ID NO: 58274 - DNA, 1209 bp, Photobacterium profundum; identical to SEQ ID NO: 55
  CDS (1)..(1209)

SEQ ID NO: 58275 - protein, 402 aa, Photobacterium profundum; identical to SEQ ID NO: 56

SEQ ID NO: 58276 - DNA, 1209 bp, Photobacterium profundum; identical to SEQ ID NO: 57
  CDS (1)..(1209)

SEQ ID NO: 58277 - protein, 402 aa, Photobacterium profundum; identical to SEQ ID NO: 58

SEQ ID NO: 58278 - DNA, 1197 bp, Rhodopseudomonas palustris; identical to SEQ ID NO: 59
  CDS (1)..(1197)

SEQ ID NO: 58279 - protein, 398 aa, Rhodopseudomonas palustris; identical to SEQ ID NO: 60

SEQ ID NO: 58280 - DNA, 1167 bp, uncultured bacterium 578; identical to SEQ ID NO: 61
  CDS (1)..(1167)

SEQ ID NO: 58281 - protein, 388 aa, uncultured bacterium 578; identical to SEQ ID NO: 62

SEQ ID NO: 58282 - DNA, 1182 bp, uncultured bacterium 311; identical to SEQ ID NO: 63
  CDS (1)..(1182)

SEQ ID NO: 58283 - protein, 393 aa, uncultured bacterium 311; identical to SEQ ID NO: 64

SEQ ID NO: 58284 - DNA, 1416 bp, Ashbya gossypii; identical to SEQ ID NO: 65
  CDS (1)..(1416)

SEQ ID NO: 58285 - protein, 471 aa, Ashbya gossypii; identical to SEQ ID NO: 66

SEQ ID NO: 58286 - DNA, 1179 bp, Shigella flexneri; identical to SEQ ID NO: 67
  CDS (1)..(1179)

SEQ ID NO: 58287 - protein, 392 aa, Shigella flexneri; identical to SEQ ID NO: 68

SEQ ID NO: 58288 - DNA, 1176 bp, Vibrio vulnificus; identical to SEQ ID NO: 69
  CDS (1)..(1176)

SEQ ID NO: 58289 - protein, 391 aa, Vibrio vulnificus; identical to SEQ ID NO: 70

SEQ ID NO: 58290 - DNA, 1233 bp, Vibrio vulnificus; identical to SEQ ID NO: 71
  CDS (1)..(1233)

SEQ ID NO: 58291 - protein, 410 aa, Vibrio vulnificus; identical to SEQ ID NO: 72

SEQ ID NO: 58292 - DNA, 1179 bp, Photorhabdus luminescens; identical to SEQ ID NO: 73
  CDS (1)..(1179)

SEQ ID NO: 58293 - protein, 392 aa, Photorhabdus luminescens; identical to SEQ ID NO: 74

SEQ ID NO: 58294 - DNA, 1221 bp, Photorhabdus luminescens; identical to SEQ ID NO: 75
  CDS (1)..(1221)

SEQ ID NO: 58295 - protein, 406 aa, Photorhabdus luminescens; identical to SEQ ID NO: 76

SEQ ID NO: 58296 - DNA, 1170 bp, Chromobacterium violaceum; identical to SEQ ID NO: 77
  CDS (1)..(1170)

SEQ ID NO: 58297 - protein, 389 aa, Chromobacterium violaceum; identical to SEQ ID NO: 78

SEQ ID NO: 58298 - DNA, 1152 bp, Chromobacterium violaceum; identical to SEQ ID NO: 79
  CDS (1)..(1152)

SEQ ID NO: 58299 - protein, 383 aa, Chromobacterium violaceum; identical to SEQ ID NO: 80

SEQ ID NO: 58300 - DNA, 1182 bp, Chromobacterium violaceum; identical to SEQ ID NO: 81
  CDS (1)..(1182)

SEQ ID NO: 58301 - protein, 393 aa, Chromobacterium violaceum; identical to SEQ ID NO: 82

SEQ ID NO: 58302 - DNA, 1473 bp, Neurospora crassa; identical to SEQ ID NO: 83
  CDS (1)..(1473)

SEQ ID NO: 58303 - protein, 490 aa, Neurospora crassa; identical to SEQ ID NO: 84

SEQ ID NO: 58304 - DNA, 1206 bp, Haemophilus ducreyi; identical to SEQ ID NO: 85
  CDS (1)..(1206)

SEQ ID NO: 58305 - protein, 401 aa, Haemophilus ducreyi; identical to SEQ ID NO: 86

SEQ ID NO: 58306 - DNA, 1194 bp, Candidatus Blochmannia floridanus; identical to SEQ ID NO: 87
  CDS (1)..(1194)

SEQ ID NO: 58307 - protein, 397 aa, Candidatus Blochmannia floridanus; identical to SEQ ID NO: 88

SEQ ID NO: 58308 - DNA, 1278 bp, Bartonella tribocorum; identical to SEQ ID NO: 89
  CDS (1)..(1278)

SEQ ID NO: 58309 - protein, 425 aa, Bartonella tribocorum; identical to SEQ ID NO: 90

SEQ ID NO: 58310 - DNA, 1167 bp, Nitrosomonas europaea; identical to SEQ ID NO: 91
  CDS (1)..(1167)

SEQ ID NO: 58311 - protein, 388 aa, Nitrosomonas europaea; identical to SEQ ID NO: 92

SEQ ID NO: 58312 - DNA, 1236 bp, Coxiella burnetii; identical to SEQ ID NO: 93
  CDS (1)..(1236)

SEQ ID NO: 58313 - protein, 411 aa, Coxiella burnetii; identical to SEQ ID NO: 94

SEQ ID NO: 58314 - DNA, 1182 bp, Shigella flexneri; identical to SEQ ID NO: 95
  CDS (1)..(1182)

SEQ ID NO: 58315 - protein, 393 aa, Shigella flexneri; identical to SEQ ID NO: 96

SEQ ID NO: 58316 - DNA, 1551 bp, Oryza sativa; identical to SEQ ID NO: 97
  CDS (1)..(1551)

SEQ ID NO: 58317 - protein, 516 aa, Oryza sativa; identical to SEQ ID NO: 98

SEQ ID NO: 58318 - DNA, 1998 bp, Neurospora crassa; identical to SEQ ID NO: 99
  CDS (1)..(1998)

SEQ ID NO: 58319 - protein, 665 aa, Neurospora crassa; identical to SEQ ID NO: 100

SEQ ID NO: 58320 - DNA, 1182 bp, Xylella fastidiosa; identical to SEQ ID NO: 101
  CDS (1)..(1182)

SEQ ID NO: 58321 - protein, 393 aa, Xylella fastidiosa; identical to SEQ ID NO: 102

SEQ ID NO: 58322 - DNA, 1179 bp, Vibrio parahaemolyticus; identical to SEQ ID NO: 103
  CDS (1)..(1179)

SEQ ID NO: 58323 - protein, 392 aa, Vibrio parahaemolyticus; identical to SEQ ID NO: 104

SEQ ID NO: 58324 - DNA, 1209 bp, Vibrio parahaemolyticus; identical to SEQ ID NO: 105
  CDS (1)..(1209)

SEQ ID NO: 58325 - protein, 402 aa, Vibrio parahaemolyticus; identical to SEQ ID NO: 106

SEQ ID NO: 58326 - DNA, 1176 bp, Vibrio parahaemolyticus; identical to SEQ ID NO: 107
  CDS (1)..(1176)

SEQ ID NO: 58327 - protein, 391 aa, Vibrio parahaemolyticus; identical to SEQ ID NO: 108

SEQ ID NO: 58328 - DNA, 1230 bp, Pseudomonas syringae; identical to SEQ ID NO: 109
  CDS (1)..(1230)

SEQ ID NO: 58329 - protein, 409 aa, Pseudomonas syringae; identical to SEQ ID NO: 110

SEQ ID NO: 58330 - DNA, 1224 bp, Pseudomonas putida; identical to SEQ ID NO: 111
  CDS (1)..(1224)

SEQ ID NO: 58331 - protein, 407 aa, Pseudomonas putida; identical to SEQ ID NO: 112

SEQ ID NO: 58332 - DNA, 1185 bp, Bradyrhizobium japonicum; identical to SEQ ID NO: 113
  CDS (1)..(1185)

SEQ ID NO: 58333 - protein, 394 aa, Bradyrhizobium japonicum; identical to SEQ ID NO: 114

SEQ ID NO: 58334 - DNA, 1437 bp, Yersinia pestis; identical to SEQ ID NO: 115
  CDS (1)..(1437)

SEQ ID NO: 58335 - protein, 478 aa, Yersinia pestis; identical to SEQ ID NO: 116

SEQ ID NO: 58336 - DNA, 1182 bp, Wigglesworthia glossinidia brevipalpis; identical to SEQ ID NO: 117
  CDS (1)..(1182)

SEQ ID NO: 58337 - protein, 393 aa, Wigglesworthia glossinidia brevipalpis; identical to SEQ ID NO: 118

SEQ ID NO: 58338 - DNA, 1188 bp, Wigglesworthia glossinidia brevipalpis; identical to SEQ ID NO: 119
  CDS (1)..(1188)

SEQ ID NO: 58339 - protein, 395 aa, Wigglesworthia glossinidia brevipalpis; identical to SEQ ID NO: 120

SEQ ID NO: 58340 - DNA, 1221 bp, Vibrio vulnificus; identical to SEQ ID NO: 121
  CDS (1)..(1221)

SEQ ID NO: 58341 - protein, 406 aa, Vibrio vulnificus; identical to SEQ ID NO: 122

SEQ ID NO: 58342 - DNA, 1275 bp, Synechococcus elongatus; identical to SEQ ID NO: 123
  CDS (1)..(1275)

SEQ ID NO: 58343 - protein, 424 aa, Synechococcus elongatus; identical to SEQ ID NO: 124

SEQ ID NO: 58344 - DNA, 1215 bp, Shewanella oneidensis; identical to SEQ ID NO: 125
  CDS (1)..(1215)

SEQ ID NO: 58345 - protein, 404 aa, Shewanella oneidensis; identical to SEQ ID NO: 126

SEQ ID NO: 58346 - DNA, 1224 bp, Shewanella oneidensis; identical to SEQ ID NO: 127
  CDS (1)..(1224)

SEQ ID NO: 58347 - protein, 407 aa, Shewanella oneidensis; identical to SEQ ID NO: 128

SEQ ID NO: 58348 - DNA, 1224 bp, Shewanella oneidensis; identical to SEQ ID NO: 129
  CDS (1)..(1224)

SEQ ID NO: 58349 - protein, 407 aa, Shewanella oneidensis; identical to SEQ ID NO: 130

SEQ ID NO: 58350 - DNA, 1179 bp, Escherichia coli O6; identical to SEQ ID NO: 131
  CDS (1)..(1179)

SEQ ID NO: 58351 - protein, 392 aa, Escherichia coli O6; identical to SEQ ID NO: 132

SEQ ID NO: 58352 - DNA, 1203 bp, Escherichia coli O6; identical to SEQ ID NO: 133
  CDS (1)..(1203)

SEQ ID NO: 58353 - protein, 400 aa, Escherichia coli O6; identical to SEQ ID NO: 134

SEQ ID NO: 58354 - DNA, 1197 bp, Escherichia coli O6; identical to SEQ ID NO: 135
  CDS (1)..(1197)

SEQ ID NO: 58355 - protein, 398 aa, Escherichia coli O6; identical to SEQ ID NO: 136

SEQ ID NO: 58356 - DNA, 1245 bp, Brucella suis; identical to SEQ ID NO: 137
  CDS (1)..(1245)

SEQ ID NO: 58357 - protein, 414 aa, Brucella suis; identical to SEQ ID NO: 138

SEQ ID NO: 58358 - DNA, 1179 bp, Xanthomonas campestris; identical to SEQ ID NO: 139
  CDS (1)..(1179)

SEQ ID NO: 58359 - protein, 392 aa, Xanthomonas campestris; identical to SEQ ID NO: 140

SEQ ID NO: 58360 - DNA, 1170 bp, Pasteurella multocida; identical to SEQ ID NO: 141
  CDS (1)..(1170)

SEQ ID NO: 58361 - protein, 389 aa, Pasteurella multocida; identical to SEQ ID NO: 142

SEQ ID NO: 58362 - DNA, 1176 bp, Pasteurella multocida; identical to SEQ ID NO: 143
  CDS (1)..(1176)

SEQ ID NO: 58363 - protein, 391 aa, Pasteurella multocida; identical to SEQ ID NO: 144

SEQ ID NO: 58364 - DNA, 1161 bp, Gamma; identical to SEQ ID NO: 145
  CDS (1)..(1161)

SEQ ID NO: 58365 - protein, 386 aa, Gamma; identical to SEQ ID NO: 146

SEQ ID NO: 58366 - DNA, 1149 bp, Haemophilus ducreyi; identical to SEQ ID NO: 147
  CDS (1)..(1149)

SEQ ID NO: 58367 - protein, 382 aa, Haemophilus ducreyi; identical to SEQ ID NO: 148

SEQ ID NO: 58368 - DNA, 1461 bp, Arabidopsis thaliana; identical to SEQ ID NO: 149
  CDS (1)..(1461)

SEQ ID NO: 58369 - protein, 486 aa, Arabidopsis thaliana; identical to SEQ ID NO: 150

SEQ ID NO: 58370 - DNA, 1356 bp, Caenorhabditis elegans; identical to SEQ ID NO: 151
  CDS (1)..(1356)

SEQ ID NO: 58371 - protein, 451 aa, Caenorhabditis elegans; identical to SEQ ID NO: 152

SEQ ID NO: 58372 - DNA, 1579 bp, Drosophila melanogaster; identical to SEQ ID NO: 153
  CDS (49)..(1482)

SEQ ID NO: 58373 - protein, 477 aa, Drosophila melanogaster; identical to SEQ ID NO: 154

SEQ ID NO: 58374 - DNA, 1609 bp, Homo sapiens; identical to SEQ ID NO: 155
  CDS (81)..(1487)

SEQ ID NO: 58375 - protein, 468 aa, Homo sapiens; identical to SEQ ID NO: 156

SEQ ID NO: 58376 - DNA, 1512 bp, Mus musculus; identical to SEQ ID NO: 157
  CDS (6)..(1415)

SEQ ID NO: 58377 - protein, 469 aa, Mus musculus; identical to SEQ ID NO: 158

SEQ ID NO: 58378 - DNA, 27 bp, Artificial sequence
  Primer sequence
atgttcttttcaaaagttatgcttact

SEQ ID NO: 58379 - DNA, 25 bp, Artificial sequence
  Primer sequence
tcatttctcatttcctcctaatgtg

SEQ ID NO: 58380 - protein, 538 aa, Artificial sequence
  Consensus
  Variant (4)..(5): Xaa in position 4 to 5 is any amino acid
  Variant (7)..(9): Xaa in position 7 to 9 is any amino acid
  Variant (11)..(53): Xaa in position 11 to 53 is any amino acid
  Variant (55)..(56): Xaa in position 55 to 56 is any amino acid
  Variant (58)..(72): Xaa in position 58 to 72 is any amino acid
  Variant (74)..(129): Xaa in position 74 to 129 is any amino acid
  Variant (131)..(137): Xaa in position 131 to 137 is any amino acid
  Variant (139)..(202): Xaa in position 139 to 202 is any amino acid
  Variant (204)..(219): Xaa in position 204 to 219 is any amino acid
  Variant (221)..(223): Xaa in position 221 to 223 is any amino acid
  Variant (227)..(228): Xaa in position 227 to 228 is any amino acid
  Variant (230)..(231): Xaa in position 230 to 231 is any amino acid
  Variant (233)..(244): Xaa in position 233 to 244 is any amino acid
  Variant (246)..(272): Xaa in position 246 to 272 is any amino acid
  Variant (274)..(276): Xaa in position 274 to 276 is any amino acid
  Variant (278)..(279): Xaa in position 278 to 279 is any amino acid
  Variant (281)..(281): Xaa in position 281 is any amino acid
  Variant (284)..(321): Xaa in position 284 to 321 is any amino acid
  Variant (324)..(413): Xaa in position 324 to 413 is any amino acid
  Variant (416)..(429): Xaa in position 416 to 429 is any amino acid
  Variant (431)..(431): Xaa in position 431 is any amino acid
  Variant (433)..(433): Xaa in position 433 is any amino acid
  Variant (436)..(438): Xaa in position 436 to 438 is any amino acid
  Variant (441)..(441): Xaa in position 441 is any amino acid
  Variant (446)..(446): Xaa in position 446 is any amino acid
  Variant (450)..(451): Xaa in position 450 to 451 is any amino acid
  Variant (453)..(455): Xaa in position 453 to 455 is any amino acid
  Variant (457)..(478): Xaa in position 457 to 478 is any amino acid
  Variant (480)..(481): Xaa in position 480 to 481 is any amino acid
  Variant (483)..(485): Xaa in position 483 to 485 is any amino acid
  Variant (487)..(514): Xaa in position 487 to 514 is any amino acid
  Variant (516)..(518): Xaa in position 516 to 518 is any amino acid
  Variant (520)..(537): Xaa in position 520 to 537 is any amino acid
GGGXXGXXXAXXXXXXXXXXXXXXXXXXXXXXXXXXXXXXXXXXXXXXXXXXXRXXAXXXXXXXXXXXXXXXWXXXXXXXXXXXXXXXXXXXXXXXXXXXXXXXXXXXXXXXXXXXXXXXXXXXXXXXXEXXXXXXXLXXXXXXXXXXXXXXXXXXXXXXXXXXXXXXXXXXXXXXXXXXXXXXXXXXXXXXXXXXXXXXXXLXXXXXXXXXXXXXXXXLXXXADGXXSXXRXXXXXXXXXXXXYXXXXXXXXXXXXXXXXXXXXXXXXXXXFXXXGXXAXLPXXXXXXXXXXXXXXXXXXXXXXXXXXXXXXXXXXXXXXVWXXXXXXXXXXXXXXXXXXXXXXXXXXXXXXXXXXXXXXXXXXXXXXXXXXXXXXXXXXXXXXXXXXXXXXXXXXXXXXXXXXXXXXXXXXPLXXXXXXXXXXXXXXLXGXAAXXXHPXAGQGXNLGXXDXXXLXXXXXXXXXXXXXXXXXXXXXXLXXYXXXRXXXXXXXXXXXXXXXXXXXXXXXXXXXXRXXXLXXXXXXXXXXXXXXXXXXG

SEQ ID NO: 58381 - protein, 66 aa, Artificial sequence; identical to SEQ ID NO: 1299
  Consensus
  Variant (1)..(1): Xaa in position 1 is Val, Leu, Ile, Met or Ala
  Variant (2)..(2): Xaa in position 2 is any amino acid
  Variant (3)..(3): Xaa in position 3 is Ile, Val or Leu
  Variant (4)..(4): Xaa in position 4 is any amino acid
  Variant (6)..(7): Xaa in position 6 to 7 is Gly or Ala
  Variant (8)..(8): Xaa in position 8 is any amino acid
  Variant (9)..(9): Xaa in position 9 is Val, Ala or Ile
  Variant (11)..(13): Xaa in position 11 to 13 is any amino acid
  Variant (14)..(14): Xaa in position 14 is Ala, Ser, Leu or Gly
  Variant (15)..(16): Xaa in position 15 to 16 is any amino acid
  Variant (17)..(17): Xaa in position 17 is Leu, Ile or Phe
  Variant (18)..(25): Xaa in position 18 to 25 is any amino acid
  Variant (26)..(33): Xaa in position 26 to 33 is any or no amino acid
  Variant (34)..(34): Xaa in position 34 is Leu, Val or Ile
  Variant (35)..(35): Xaa in position 35 is Ile, Val or Leu
  Variant (36)..(36): Xaa in position 36 is Glu, Asp or Ala
  Variant (37)..(44): Xaa in position 37 to 44 is any amino acid
  Variant (45)..(57): Xaa in position 45 to 57 is any or no amino acid
  Variant (58)..(58): Xaa in position 58 is Arg, Gln or Lys
  Variant (59)..(60): Xaa in position 59 to 60 is any amino acid
  Variant (61)..(61): Xaa in position 61 is Ala, Ser or Thr
  Variant (62)..(62): Xaa in position 62 is Leu, Ile, Val or Phe
  Variant (63)..(65): Xaa in position 63 to 65 is any amino acid
  Variant (66)..(66): Xaa in position 66 is Ser, Thr or Ala
